United States Patent Application Publication US 2007/0214517 A1 - sequence listing, part 8

SEQ ID NO: 9806 - DNA, 1436 bp, Zea mays subsp. mays
  misc_feature (1)..(1436): Ceres Seq. ID no. 12360026
  misc_feature: MA Experiment ID: 108544 Result: Down-regulated in Transcription
  misc_feature: MA Experiment ID: 20000480 Result: Up-regulated in Transcription
  misc_feature: MA Experiment 20000480 PARAMETER Experiment Name: Zm_Drought_P Parameter: Age (day) Value: 11
  misc_feature: MA Experiment 20000480 PARAMETER Experiment Name: Zm_Drought_P Parameter: Organism Value: Zea mays
  misc_feature: MA Experiment 20000480 PARAMETER Experiment Name: Zm_Drought_P Parameter: Plant Line Value: 35A19
  misc_feature: MA Experiment 20000480 PARAMETER Experiment Name: Zm_Drought_P Parameter: Timepoint (hr) Value: 72
  misc_feature: MA Experiment 20000480 PARAMETER Experiment Name: Zm_Drought_P Parameter: Tissue Value: Aerial
  misc_feature: MA Experiment 20000480 PARAMETER Experiment Name: Zm_Drought_P Parameter: Treatment Value: Drought vs. No Drought
  misc_feature: MA Experiment ID: 20000632 Result: Down-regulated in Transcription
  misc_feature: MA Experiment 20000632 PARAMETER Experiment Name: Zm_Herbicide-Treatments_P Parameter: Timepoint (hr) Value: 4
  misc_feature: MA Experiment 20000632 PARAMETER Experiment Name: Zm_Herbicide-Treatments_P Parameter: Tissue Value: Aerial
  misc_feature: MA Experiment 20000632 PARAMETER Experiment Name: Zm_Herbicide-Treatments_P Parameter: Treatment Value: Glean vs. No Treatment
aaccaggtgtctgttcagttcgtgtccgccgtcctctgttcaagtgcaagcgagcgaagaaacgaagcaccaggaggcgggaacaagaaggaatttgcgcagcaagcaaaggtcccgagttgcaaacttgcaacccaagaagagcgttggacatgcagatggaggggagggagggtatcgcggtggtggccgcaggcggcggccatggatccgggcagcacggcatgttcggagcggcagacatcgccatggcagaggcgcaggaggcagcggctaaggggtaccagtaccagtcctccccctcgtcgccgtnngacgtccctcacgccgtcgccgccgccggctgcggctggcnnctgnnggggangccaccgcggcgccacttgcctggagcctgggcggcgggatgccgagcgaggccgcgggggacagcggcgtgcgggcggccgggcatagccagagcgagcacgccaacaacatgagctccgagcgccgccgcggccgcccgcgcggctccggcaggcgccagatcctggccactctcggtgaatggtacgcgctgtcagccggcgggagcttcacgcctcacgtcatcatcgtgggtactggggaggatgtggcggcgcgcgtcatgtcgttttcgcagaaaggcccacgctcggtctgcatcctctccgccaacgggacaatctctaacgtgacgctgaggcagccgggttcatctggtagcaccttcacctacgagggccgtttcgagatcctgcagctgatgggctcaatcacaatggctgaggaaggtcgtaagaggacaggcggcctcagcgtctctctcgctggcccagacggccgtgtggtcggcggcgtagtggctgggatgctgcgtgccgcaagtcctatacaggtgatcgtgggaagcttcctgcccaacagcctgaagcagcaccagaggcggatgagcgcgcagcagcagctctccccggttccggcactgccagaacctgaggcgcccccacccgtgctcaccgcagccaccccgatctctctggcaggtcctggggacgggttccatgatgcgccgccaccctccgccgcacctccccagccccacgccagcgccatgaacctgaacgcgacgggcttccccgtggctggctggcccgcaagctcgccgcagcccatggtgtacagggcttcccctgacatcaacgtcagcttgactccccaggagtaggatcgttgggctcgtcgtcgtcttcttctcttttctttccgtcgcctctacgctgatacattttgggagagagagaggaagtgagctaggatcatgaacccatgtcgaggataggcaatatactgaatgagaatgaactgatctgtaggtggcgccaaccatgactgtgggctgtggcagttgatttagtcccttctcctttttc

SEQ ID NO: 9807 - protein, 274 aa, Zea mays subsp. mays
  peptide (1)..(274): Ceres Seq. ID no. 12360027
  misc_feature (1)..(244): Homolog of NCBI NO: 37537056 NR Description: putative AT-Hook DNA-binding protein [Oryza
  misc_feature (1)..(268): Homolog of NCBI NO: 38346715 NR Description: OSJNBa0086O06.13 [Oryza sativa (japonica
  misc_feature (1)..(235): Homolog of NCBI NO: 32352210 NR Description: hypothetical protein [Oryza sativa (japonica
  misc_feature (19)..(196): Homolog of NCBI NO: 22328578 NR Description: putative DNA-binding protein; protein id: supported by cDNA: gi_17979484 [Arabidopsis thaliana] AT4g12080/F16J13_150 [Arabidopsis thaliana]
  misc_feature (1)..(212): Homolog of NCBI NO: 14326504 NR Description: At2g33620/F4P9.39 [Arabidopsis thaliana]
  misc_feature (1)..(212): Homolog of NCBI NO: 2598227 NR Description: AT-hook protein 1 [Arabidopsis thaliana]
  misc_feature (1)..(212): Homolog of NCBI NO: 25408293 NR Description: AT-hook DNA-binding protein (AHP1) [imported] -
  misc_feature (1)..(212): Homolog of NCBI NO: 18403332 NR Description: AT-hook DNA-binding protein (AHP1); protein id: supported by cDNA: gi_14326503, supported by cDNA: gi_19548036 thaliana] >gi|19548037|gb|AAL87382.1| At2g33620/F4P9.39
  misc_feature (1)..(187): Homolog of NCBI NO: 15225902 NR Description: putative AT-hook DNA-binding protein; protein id: supported by cDNA: gi_14194130, supported by cDNA: gi_16323337, by cDNA: gi_17065245 [Arabidopsis thaliana]
  misc_feature (18)..(209): Homolog of NCBI NO: 30696854 NR Description: DNA-binding protein -related [Arabidopsis
MPSEAAGDSGVRAAGHSQSEHANNMSSERRRGRPRGSGRRQILATLGEWYALSAGGSFTPHVIIVGTGEDVAARVMSFSQKGPRSVCILSANGTISNVTLRQPGSSGSTFTYEGRFEILQLMGSITMAEEGRKRTGGLSVSLAGPDGRVVGGVVAGMLRAASPIQVIVGSFLPNSLKQHQRRMSAQQQLSPVPALPEPEAPPPVLTAATPISLAGPGDGFHDAPPPSAAPPQPHASAMNLNATGFPVAGWPASSPQPMVYRASPDINVSLTPQE

SEQ ID NO: 9808 - protein, 250 aa, Zea mays subsp. mays
  peptide (1)..(250): Ceres Seq. ID no. 12360028
  misc_feature (1)..(220): Homolog of NCBI NO: 37537056 NR Description: putative AT-Hook DNA-binding protein [Oryza
  misc_feature (1)..(244): Homolog of NCBI NO: 38346715 NR Description: OSJNBa0086O06.13 [Oryza sativa (japonica
  misc_feature (1)..(211): Homolog of NCBI NO: 32352210 NR Description: hypothetical protein [Oryza sativa (japonica
  misc_feature (1)..(172): Homolog of NCBI NO: 22328578 NR Description: putative DNA-binding protein; protein id: supported by cDNA: gi_17979484 [Arabidopsis thaliana] AT4g12080/F16J13_150 [Arabidopsis thaliana]
  misc_feature (1)..(188): Homolog of NCBI NO: 14326504 NR Description: At2g33620/F4P9.39 [Arabidopsis thaliana]
  misc_feature (1)..(188): Homolog of NCBI NO: 2598227 NR Description: AT-hook protein 1 [Arabidopsis thaliana]
  misc_feature (1)..(188): Homolog of NCBI NO: 18403332 NR Description: AT-hook DNA-binding protein (AHP1); protein id: supported by cDNA: gi_14326503, supported by cDNA: gi_19548036 thaliana] >gi|19548037|gb|AAL87382.1| At2g33620/F4P9.39
  misc_feature (1)..(188): Homolog of NCBI NO: 25408293 NR Description: AT-hook DNA-binding protein (AHP1) [imported] -
  misc_feature (1)..(163): Homolog of NCBI NO: 15225902 NR Description: putative AT-hook DNA-binding protein; protein id: supported by cDNA: gi_14194130, supported by cDNA: gi_16323337, by cDNA: gi_17065245 [Arabidopsis thaliana]
  misc_feature (1)..(185): Homolog of NCBI NO: 30696854 NR Description: DNA-binding protein -related [Arabidopsis
MSSERRRGRPRGSGRRQILATLGEWYALSAGGSFTPHVIIVGTGEDVAARVMSFSQKGPRSVCILSANGTISNVTLRQPGSSGSTFTYEGRFEILQLMGSITMAEEGRKRTGGLSVSLAGPDGRVVGGVVAGMLRAASPIQVIVGSFLPNSLKQHQRRMSAQQQLSPVPALPEPEAPPPVLTAATPISLAGPGDGFHDAPPPSAAPPQPHASAMNLNATGFPVAGWPASSPQPMVYRASPDINVSLTPQE

SEQ ID NO: 9809 - protein, 199 aa, Zea mays subsp. mays
  peptide (1)..(199): Ceres Seq. ID no. 12360029
  misc_feature (1)..(169): Homolog of NCBI NO: 37537056 NR Description: putative AT-Hook DNA-binding protein [Oryza
  misc_feature (1)..(193): Homolog of NCBI NO: 38346715 NR Description: OSJNBa0086O06.13 [Oryza sativa (japonica
  misc_feature (1)..(160): Homolog of NCBI NO: 32352210 NR Description: hypothetical protein [Oryza sativa (japonica
  misc_feature (1)..(121): Homolog of NCBI NO: 22328578 NR Description: putative DNA-binding protein; protein id: supported by cDNA: gi_17979484 [Arabidopsis thaliana] AT4g12080/F16J13_150 [Arabidopsis thaliana]
  misc_feature (1)..(137): Homolog of NCBI NO: 14326504 NR Description: At2g33620/F4P9.39 [Arabidopsis thaliana]
  misc_feature (1)..(137): Homolog of NCBI NO: 2598227 NR Description: AT-hook protein 1 [Arabidopsis thaliana]
  misc_feature (1)..(137): Homolog of NCBI NO: 25408293 NR Description: AT-hook DNA-binding protein (AHP1) [imported] -
  misc_feature (1)..(137): Homolog of NCBI NO: 18403332 NR Description: AT-hook DNA-binding protein (AHP1); protein id: supported by cDNA: gi_14326503, supported by cDNA: gi_19548036 thaliana] >gi|19548037|gb|AAL87382.1| At2g33620/F4P9.39
  misc_feature (1)..(112): Homolog of NCBI NO: 15225902 NR Description: putative AT-hook DNA-binding protein; protein id: supported by cDNA: gi_14194130, supported by cDNA: gi_16323337, by cDNA: gi_17065245 [Arabidopsis thaliana]
  misc_feature (1)..(134): Homolog of NCBI NO: 30696854 NR Description: DNA-binding protein -related [Arabidopsis
MSFSQKGPRSVCILSANGTISNVTLRQPGSSGSTFTYEGRFEILQLMGSITMAEEGRKRTGGLSVSLAGPDGRVVGGVVAGMLRAASPIQVIVGSFLPNSLKQHQRRMSAQQQLSPVPALPEPEAPPPVLTAATPISLAGPGDGFHDAPPPSAAPPQPHASAMNLNATGFPVAGWPASSPQPMVYRASPDINVSLTPQE

SEQ ID NO: 9810 - DNA, 1439 bp, Zea mays subsp. mays
  misc_feature (1)..(1439): Ceres Seq. ID no. 12382324
  misc_feature: MA Experiment ID: 108504 Result: Up-regulated in Transcription
  misc_feature: MA Experiment 108504 PARAMETER Experiment Name: Zm_Drought_P Parameter: Age (day) Value: 8
  misc_feature: MA Experiment 108504 PARAMETER Experiment Name: Zm_Drought_P Parameter: Organism Value: Zea mays
  misc_feature: MA Experiment 108504 PARAMETER Experiment Name: Zm_Drought_P Parameter: Plant Line Value: 35A19
  misc_feature: MA Experiment 108504 PARAMETER Experiment Name: Zm_Drought_P Parameter: Timepoint (hr) Value: 12
  misc_feature: MA Experiment 108504 PARAMETER Experiment Name: Zm_Drought_P Parameter: Tissue Value: Aerial
  misc_feature: MA Experiment 108504 PARAMETER Experiment Name: Zm_Drought_P Parameter: Treatment Value: Drought vs. No Drought
  misc_feature: MA Experiment ID: 108513 Result: Up-regulated in Transcription
  misc_feature: MA Experiment 108513 PARAMETER Experiment Name: Zm_100uM_ABA_P Parameter: Age (day) Value: 8
  misc_feature: MA Experiment 108513 PARAMETER Experiment Name: Zm_100uM_ABA_P Parameter: Organism Value: Zea mays
  misc_feature: MA Experiment 108513 PARAMETER Experiment Name: Zm_100uM_ABA_P Parameter: Plant Line Value: 35A19
  misc_feature: MA Experiment 108513 PARAMETER Experiment Name: Zm_100uM_ABA_P Parameter: Timepoint (hr) Value: 6
  misc_feature: MA Experiment 108513 PARAMETER Experiment Name: Zm_100uM_ABA_P Parameter: Tissue Value: Aerial
  misc_feature: MA Experiment 108513 PARAMETER Experiment Name: Zm_100uM_ABA_P Parameter: Treatment Value: 100uM ABA vs. No Treatment
  misc_feature: MA Experiment ID: 108527 Result: Up-regulated in Transcription
  misc_feature: MA Experiment 108527 PARAMETER Experiment Name: Zm_5mM_NO_P Parameter: Age (day) Value: 8
  misc_feature: MA Experiment 108527 PARAMETER Experiment Name: Zm_5mM_NO_P Parameter: Organism Value: Zea mays
  misc_feature: MA Experiment 108527 PARAMETER Experiment Name: Zm_5mM_NO_P Parameter: Plant Line Value: 35A19
  misc_feature: MA Experiment 108527 PARAMETER Experiment Name: Zm_5mM_NO_P Parameter: Timepoint (hr) Value: 6
  misc_feature: MA Experiment 108527 PARAMETER Experiment Name: Zm_5mM_NO_P Parameter: Tissue Value: Aerial
  misc_feature: MA Experiment 108527 PARAMETER Experiment Name: Zm_5mM_NO_P Parameter: Treatment Value: 5mM NO vs. No Treatment
  misc_feature: MA Experiment ID: 108528 Result: Up-regulated in Transcription
  misc_feature: MA Experiment 108528 PARAMETER Experiment Name: Zm_Imbibed_Seeds_P Parameter: Age (day) Value: 5 vs. 2
  misc_feature: MA Experiment 108528 PARAMETER Experiment Name: Zm_Imbibed_Seeds_P Parameter: Organism Value: Zea mays
  misc_feature: MA Experiment 108528 PARAMETER Experiment Name: Zm_Imbibed_Seeds_P Parameter: Plant Line Value: 35A19
  misc_feature: MA Experiment 108528 PARAMETER Experiment Name: Zm_Imbibed_Seeds_P Parameter: Tissue Value: Aerial vs. Embryo
  misc_feature: MA Experiment ID: 108529 Result: Up-regulated in Transcription
  misc_feature: MA Experiment 108529 PARAMETER Experiment Name: Zm_Imbibed_Seeds_P Parameter: Age (day) Value: 5 vs. 2
  misc_feature: MA Experiment 108529 PARAMETER Experiment Name: Zm_Imbibed_Seeds_P Parameter: Organism Value: Zea mays
  misc_feature: MA Experiment 108529 PARAMETER Experiment Name: Zm_Imbibed_Seeds_P Parameter: Plant Line Value: 35A19
  misc_feature: MA Experiment 108529 PARAMETER Experiment Name: Zm_Imbibed_Seeds_P Parameter: Tissue Value: Roots vs. Embryo
  misc_feature: MA Experiment ID: 108530 Result: Up-regulated in Transcription
  misc_feature: MA Experiment 108530 PARAMETER Experiment Name: Zm_Imbibed_Seeds_P Parameter: Age (day) Value: 6 vs. 2
  misc_feature: MA Experiment 108530 PARAMETER Experiment Name: Zm_Imbibed_Seeds_P Parameter: Organism Value: Zea mays
  misc_feature: MA Experiment 108530 PARAMETER Experiment Name: Zm_Imbibed_Seeds_P Parameter: Plant Line Value: 35A19
  misc_feature: MA Experiment 108530 PARAMETER Experiment Name: Zm_Imbibed_Seeds_P Parameter: Tissue Value: Aerial vs. Embryo
  misc_feature: MA Experiment ID: 108534 Result: Up-regulated in Transcription
  misc_feature: MA Experiment 108534 PARAMETER Experiment Name: Zm_4deg_Cold_P Parameter: Age (hr) Value: 8
  misc_feature: MA Experiment 108534 PARAMETER Experiment Name: Zm_4deg_Cold_P Parameter: Organism Value: Zea mays
  misc_feature: MA Experiment 108534 PARAMETER Experiment Name: Zm_4deg_Cold_P Parameter: Plant Line Value: 35A19
  misc_feature: MA Experiment 108534 PARAMETER Experiment Name: Zm_4deg_Cold_P Parameter: Temperature (deg C) Value: 4 vs. 22
  misc_feature: MA Experiment 108534 PARAMETER Experiment Name: Zm_4deg_Cold_P Parameter: Timepoint (hr) Value: 6
  misc_feature: MA Experiment 108534 PARAMETER Experiment Name: Zm_4deg_Cold_P Parameter: Tissue Value: Aerial
  misc_feature: MA Experiment ID: 108535 Result: Down-regulated in Transcription
  misc_feature: MA Experiment 108535 PARAMETER Experiment Name: Zm_Meristem_P Parameter: Age (day) Value: 8
  misc_feature: MA Experiment 108535 PARAMETER Experiment Name: Zm_Meristem_P Parameter: Organism Value: Zea mays
  misc_feature: MA Experiment 108535 PARAMETER Experiment Name: Zm_Meristem_P Parameter: Plant Line Value: 35A19
  misc_feature: MA Experiment 108535 PARAMETER Experiment Name: Zm_Meristem_P Parameter: Tissue Value: Root Meristem vs. Above Root Meristem
  misc_feature: MA Experiment ID: 108540 Result: Up-regulated in Transcription
  misc_feature: MA Experiment 108540 PARAMETER Experiment Name: Zm_20percent_PEG_P Parameter: Age (day) Value: 8
  misc_feature: MA Experiment 108540 PARAMETER Experiment Name: Zm_20percent_PEG_P Parameter: Organism Value: Zea mays
  misc_feature: MA Experiment 108540 PARAMETER Experiment Name: Zm_20percent_PEG_P Parameter: Plant Line Value: 35A19
  misc_feature: MA Experiment 108540 PARAMETER Experiment Name: Zm_20percent_PEG_P Parameter: Timepoint (hr) Value: 6
  misc_feature: MA Experiment 108540 PARAMETER Experiment Name: Zm_20percent_PEG_P Parameter: Tissue Value: Aerial
  misc_feature: MA Experiment 108540 PARAMETER Experiment Name: Zm_20percent_PEG_P Parameter: Treatment Value: 20percent PEG vs. No Treatment
  misc_feature: MA Experiment ID: 108542 Result: Up-regulated in Transcription
  misc_feature: MA Experiment 108542 PARAMETER Experiment Name: Zm_150mM_NaCl_P Parameter: Age (day) Value: 8
  misc_feature: MA Experiment 108542 PARAMETER Experiment Name: Zm_150mM_NaCl_P Parameter: Organism Value: Zea mays
  misc_feature: MA Experiment 108542 PARAMETER Experiment Name: Zm_150mM_NaCl_P Parameter: Plant Line Value: 35A19
  misc_feature: MA Experiment 108542 PARAMETER Experiment Name: Zm_150mM_NaCl_P Parameter: Timepoint (hr) Value: 6
  misc_feature: MA Experiment 108542 PARAMETER Experiment Name: Zm_150mM_NaCl_P Parameter: Tissue Value: Aerial
  misc_feature: MA Experiment 108542 PARAMETER Experiment Name: Zm_150mM_NaCl_P Parameter: Treatment Value: 150mM NaCl vs. No Treatment
  misc_feature: MA Experiment ID: 108547 Result: Up-regulated in Transcription
  misc_feature: MA Experiment 108547 PARAMETER Experiment Name: Zm_Imbibed_Seeds_P Parameter: Age (day) Value: 4 vs. 2
  misc_feature: MA Experiment 108547 PARAMETER Experiment Name: Zm_Imbibed_Seeds_P Parameter: Organism Value: Zea mays
  misc_feature: MA Experiment 108547 PARAMETER Experiment Name: Zm_Imbibed_Seeds_P Parameter: Plant Line Value: 35A19
  misc_feature: MA Experiment 108547 PARAMETER Experiment Name: Zm_Imbibed_Seeds_P Parameter: Tissue Value: Aerial vs. Embryo
  misc_feature: MA Experiment ID: 108556 Result: Up-regulated in Transcription
  misc_feature: MA Experiment 108556 PARAMETER Experiment Name: Zm_Drought_P Parameter: Age (day) Value: 9
  misc_feature: MA Experiment 108556 PARAMETER Experiment Name: Zm_Drought_P Parameter: Organism Value: Zea mays
  misc_feature: MA Experiment 108556 PARAMETER Experiment Name: Zm_Drought_P Parameter: Plant Line Value: 35A19
  misc_feature: MA Experiment 108556 PARAMETER Experiment Name: Zm_Drought_P Parameter: Timepoint (hr) Value: 24
  misc_feature: MA Experiment 108556 PARAMETER Experiment Name: Zm_Drought_P Parameter: Tissue Value: Aerial
  misc_feature: MA Experiment 108556 PARAMETER Experiment Name: Zm_Drought_P Parameter: Treatment Value: Drought vs. No Drought
  misc_feature: MA Experiment ID: 108559 Result: Up-regulated in Transcription
  misc_feature: MA Experiment 108559 PARAMETER Experiment Name: Zm_5mM_NO_P Parameter: Age (day) Value: 8
  misc_feature: MA Experiment 108559 PARAMETER Experiment Name: Zm_5mM_NO_P Parameter: Organism Value: Zea mays
  misc_feature: MA Experiment 108559 PARAMETER Experiment Name: Zm_5mM_NO_P Parameter: Plant Line Value: 35A19
  misc_feature: MA Experiment 108559 PARAMETER Experiment Name: Zm_5mM_NO_P Parameter: Timepoint (hr) Value: 12
  misc_feature: MA Experiment 108559 PARAMETER Experiment Name: Zm_5mM_NO_P Parameter: Tissue Value: Aerial
  misc_feature: MA Experiment 108559 PARAMETER Experiment Name: Zm_5mM_NO_P Parameter: Treatment Value: 5mM NO vs. No Treatment
  misc_feature: MA Experiment ID: 108597 Result: Up-regulated in Transcription
  misc_feature: MA Experiment 108597 PARAMETER Experiment Name: Zm_100uM_ABA_P Parameter: Age (day) Value: 9
  misc_feature: MA Experiment 108597 PARAMETER Experiment Name: Zm_100uM_ABA_P Parameter: Organism Value: Zea mays
  misc_feature: MA Experiment 108597 PARAMETER Experiment Name: Zm_100uM_ABA_P Parameter: Plant Line Value: 35A19
  misc_feature: MA Experiment 108597 PARAMETER Experiment Name: Zm_100uM_ABA_P Parameter: Timepoint (hr) Value: 24
  misc_feature: MA Experiment 108597 PARAMETER Experiment Name: Zm_100uM_ABA_P Parameter: Tissue Value: Aerial
  misc_feature: MA Experiment 108597 PARAMETER Experiment Name: Zm_100uM_ABA_P Parameter: Treatment Value: 100uM ABA vs. No Treatment
  misc_feature: MA Experiment ID: 108689 Result: Up-regulated in Transcription
  misc_feature: MA Experiment 108689 PARAMETER Experiment Name: Zm_Drought_Roots_P Parameter: Age (day) Value: 9
  misc_feature: MA Experiment 108689 PARAMETER Experiment Name: Zm_Drought_Roots_P Parameter: Organism Value: Zea mays
  misc_feature: MA Experiment 108689 PARAMETER Experiment Name: Zm_Drought_Roots_P Parameter: Plant Line Value: 35A19
  misc_feature: MA Experiment 108689 PARAMETER Experiment Name: Zm_Drought_Roots_P Parameter: Timepoint (hr) Value: 24
  misc_feature: MA Experiment 108689 PARAMETER Experiment Name: Zm_Drought_Roots_P Parameter: Tissue Value: Roots
  misc_feature: MA Experiment 108689 PARAMETER Experiment Name: Zm_Drought_Roots_P Parameter: Treatment Value: Drought vs. No Drought
  misc_feature: MA Experiment ID: 20000108 Result: Down-regulated in Transcription
  misc_feature: MA Experiment 20000108 PARAMETER Experiment Name: Zm_Root-Tips_P Parameter: Age (day) Value: 12
  misc_feature: MA Experiment 20000108 PARAMETER Experiment Name: Zm_Root-Tips_P Parameter: Organism Value: Zea mays
  misc_feature: MA Experiment 20000108 PARAMETER Experiment Name: Zm_Root-Tips_P Parameter: Tissue Value: Root tips vs. Root mid region    35
  misc_feature: MA Experiment 20000108 PARAMETER Experiment Name: Zm_Root-Tips_P Parameter: Tissue Value: Root tips vs. Root mid region   Sequence Listing-Misc Features (4)
  misc_feature: MA Experiment ID: 20000477 Result: Up-regulated in Transcription
  misc_feature: MA Experiment 20000477 PARAMETER Experiment Name: Zm_5mM_SA_P Parameter: Age (day) Value: 10
  misc_feature: MA Experiment 20000477 PARAMETER Experiment Name: Zm_5mM_SA_P Parameter: Organism Value: Zea mays
  misc_feature: MA Experiment 20000477 PARAMETER Experiment Name: Zm_5mM_SA_P Parameter: Plant Line Value: 35A19
  misc_feature: MA Experiment 20000477 PARAMETER Experiment Name: Zm_5mM_SA_P Parameter: Timepoint (hr) Value: 48
  misc_feature: MA Experiment 20000477 PARAMETER Experiment Name: Zm_5mM_SA_P Parameter: Tissue Value: Aerial
  misc_feature: MA Experiment 20000477 PARAMETER Experiment Name: Zm_5mM_SA_P Parameter: Treatment Value: 5mM SA vs. No Treatment
  misc_feature: MA Experiment ID: 20000478 Result: Up-regulated in Transcription
  misc_feature: MA Experiment 20000478 PARAMETER Experiment Name: Zm_5mM_SA_P Parameter: Age (day) Value: 11
  misc_feature: MA Experiment 20000478 PARAMETER Experiment Name: Zm_5mM_SA_P Parameter: Organism Value: Zea mays
  misc_feature: MA Experiment 20000478 PARAMETER Experiment Name: Zm_5mM_SA_P Parameter: Plant Line Value: 35A19
  misc_feature: MA Experiment 20000478 PARAMETER Experiment Name: Zm_5mM_SA_P Parameter: Timepoint (hr) Value: 72
  misc_feature: MA Experiment 20000478 PARAMETER Experiment Name: Zm_5mM_SA_P Parameter: Tissue Value: Aerial
  misc_feature: MA Experiment 20000478 PARAMETER Experiment Name: Zm_5mM_SA_P Parameter: Treatment Value: 5mM SA vs. No Treatment
  misc_feature: MA Experiment ID: 20000479 Result: Up-regulated in Transcription
  misc_feature: MA Experiment 20000479 PARAMETER Experiment Name: Zm_Drought_P Parameter: Age (day) Value: 10
  misc_feature: MA Experiment 20000479 PARAMETER Experiment Name: Zm_Drought_P Parameter: Organism Value: Zea mays
  misc_feature: MA Experiment 20000479 PARAMETER Experiment Name: Zm_Drought_P Parameter: Plant Line Value: 35A19
  misc_feature: MA Experiment 20000479 PARAMETER Experiment Name: Zm_Drought_P Parameter: Timepoint (hr) Value: 48
  misc_feature: MA Experiment 20000479 PARAMETER Experiment Name: Zm_Drought_P Parameter: Tissue Value: Aerial
  misc_feature: MA Experiment 20000479 PARAMETER Experiment Name: Zm_Drought_P Parameter: Treatment Value: Drought vs. No Drought
  misc_feature: MA Experiment ID: 20000480 Result: Up-regulated in Transcription
  misc_feature: MA Experiment 20000480 PARAMETER Experiment Name: Zm_Drought_P Parameter: Age (day) Value: 11
  misc_feature: MA Experiment 20000480 PARAMETER Experiment Name: Zm_Drought_P Parameter: Organism Value: Zea mays
  misc_feature: MA Experiment 20000480 PARAMETER Experiment Name: Zm_Drought_P Parameter: Plant Line Value: 35A19
  misc_feature: MA Experiment 20000480 PARAMETER Experiment Name: Zm_Drought_P Parameter: Timepoint (hr) Value: 72
  misc_feature: MA Experiment 20000480 PARAMETER Experiment Name: Zm_Drought_P Parameter: Tissue Value: Aerial
  misc_feature: MA Experiment 20000480 PARAMETER Experiment Name: Zm_Drought_P Parameter: Treatment Value: Drought vs. No Drought
acaacatacagatacagctcggccggagctagagtagcgggcggcggcgagaggagaaaacaaggaagcgaggagatggcgggcgggggcagggatgggccggcggcgcgtcttctccggcgcgtccccgccgccgtgtccgtcctcttgatgctgacgctgtgctcccccgggccgcccggcgcggtggtggtggtgtcggcccggaaggtgggcgagacgtgcgcgctggaccggaactgcgacgccgggctgcactgcgagacgtgtgtggccgacggcaacgtgcggccgcgctgcacccgcgtcgctcccgtcgacccgcagaccaaggcgcgggacctgccgttcaaccgctacgcgtggctgacgacgcacaactcgttcgcgcggctcgggcagcggtcgcagaccggggtcgccatagccacgccgtggaaccagcaggacaccgtcaccgagcagctcaacaacggcgttaggggtctgatgctggacatgtacgacttccgcaacgacgtctggctctgccactcctacggcggcatctgccagaacttcaccgcctttcaaccggcggtgaacgtgctccgcgaggtggagcgcttcctgtcgcggaaccccgccgaggtggtgaccatcttcgtggaggactacgtggagtcgcccatggggctcacccgggtgctcaacgcgtcgggcctcgcgcgctacgtgctccccgcctggcgcatgcccaagagcggcggcgactggccgctgctcagcgacatggtccgcgacaaccaccgcctgctcgtcttcacctccaaggccgctaaggaggccgccgagggcatcgcctacgagtggcgctacgtcgtcgagaaccagtacgggaccaaggggatggtgaaggggacgtgccacaaccgcgccgagtcggccgccatgaacgacctgtcgaggtcgctggtgctcaactacttcagggacctcccgaacctgccggcggcgtgcaaggacaactcggcgcagctgctggacatggtcaccgcctgccacgacaagtccggggaccggtggcccaacttcatcgccgtggacttctacaagaggagcgaccggggcggcgcggcggaggccacggacaaggcgaacggcggcctagtctgcggctgcgggagcatatcggcctgcaacgccaactggacatgcactcccaggcacggcaggacgcccagaggcatcttcaacgcctcatctgacgcagcggcgtggaggccgccgccgccggtgctgcaatggcagaggctcatcctgctgccttttctccttgctcttcttatgggcctgtgagttctacgtattttgttgtatagacgggtacggatcggtttggttgcaggcaccgagcgtattttgttgtgtatatatacacacagatgacagattggtcg

SEQ ID NO: 9811 - protein, 445 aa, Zea mays subsp. mays
  peptide (1)..(445): Ceres Seq. ID no. 12382325
  misc_feature (40)..(443): Homolog of NCBI NO: 38345461 NR Description: OSJNBa0042L16.16 [Oryza sativa (japonica
  misc_feature (40)..(443): Homolog of NCBI NO: 34897530 NR Description: OSJNBa0042L16.2 [Oryza sativa (japonica
  misc_feature (65)..(399): Homolog of NCBI NO: 18402763 NR Description: expressed protein; protein id: At1g49740.1, by cDNA: 17743., supported by cDNA: gi_20260217 [Arabidopsis
  misc_feature (60)..(407): Homolog of NCBI NO: 15230348 NR Description: unknown protein; protein id: At3g19310.1
  misc_feature (68)..(407): Homolog of NCBI NO: 27754722 NR Description: unknown protein [Arabidopsis thaliana]
  misc_feature (67)..(398): Homolog of NCBI NO: 38637049 NR Description: MAP3K-like protein kinase [Oryza sativa (japonica
  misc_feature (70)..(396): Homolog of NCBI NO: 25407778 NR Description: MAP3K-like protein kinase [imported] -
  misc_feature (43)..(424): Homolog of NCBI NO: 38345515 NR Description: OSJNBa0039K24.18 [Oryza sativa (japonica
  misc_feature (45)..(393): Homolog of NCBI NO: 18425155 NR Description: putative protein; protein id: At5g67130.1, by cDNA: 38897., supported by cDNA: gi_15451187, supported by gi_20148448 [Arabidopsis thaliana] >gi|15451188|gb|AAK96865.1|
  misc_feature (45)..(393): Homolog of NCBI NO: 21593427 NR Description: unknown [Arabidopsis thaliana]
TTYRYSSAGARVAGGGERRKQGSEEMAGGGRDGPAARLLRRVPAAVSVLLMLTLCSPGPPGAVVVVSARKVGETCALDRNCDAGLHCETCVADGNVRPRCTRVAPVDPQTKARDLPFNRYAWLTTHNSFARLGQRSQTGVAIATPWNQQDTVTEQLNNGVRGLMLDMYDFRNDVWLCHSYGGICQNFTAFQPAVNVLREVERFLSRNPAEVVTIFVEDYVESPMGLTRVLNASGLARYVLPAWRMPKSGGDWPLLSDMVRDNHRLLVFTSKAAKEAAEGIAYEWRYVVENQYGTKGMVKGTCHNRAESAAMNDLSRSLVLNYFRDLPNLPAACKDNSAQLLDMVTACHDKSGDRWPNFIAVDFYKRSDRGGAAEATDKANGGLVCGCGSISACNANWTCTPRHGRTPRGIFNASSDAAAWRPPPPVLQWQRLILLPFLLALLMGL

SEQ ID NO: 9812 - protein, 420 aa, Zea mays subsp. mays
  peptide (1)..(420): Ceres Seq. ID no. 12382326
  misc_feature (40)..(374): Homolog of NCBI NO: 18402763 NR Description: expressed protein; protein id: At1g49740.1, by cDNA: 17743., supported by cDNA: gi_20260217 [Arabidopsis
  misc_feature (35)..(382): Homolog of NCBI NO: 15230348 NR Description: unknown protein; protein id: At3g19310.1
  misc_feature (43)..(382): Homolog of NCBI NO: 27754722 NR Description: unknown protein [Arabidopsis thaliana]
  misc_feature (42)..(373): Homolog of NCBI NO: 38637049 NR Description: MAP3K-like protein kinase [Oryza sativa (japonica
  misc_feature (45)..(371): Homolog of NCBI NO: 25407778 NR Description: MAP3K-like protein kinase [imported] -
  misc_feature (18)..(399): Homolog of NCBI NO: 38345515 NR Description: OSJNBa0039K24.18 [Oryza sativa (japonica
  misc_feature (20)..(368): Homolog of NCBI NO: 18425155 NR Description: putative protein; protein id: At5g67130.1, by cDNA: 38897., supported by cDNA: gi_15451187, supported by gi_20148448 [Arabidopsis thaliana] >gi|15451188|gb|AAK96865.1|
  misc_feature (20)..(368): Homolog of NCBI NO: 21593427 NR Description: unknown [Arabidopsis thaliana]
  misc_feature (15)..(418): Homolog of NCBI NO: 38345461 NR Description: OSJNBa0042L16.16 [Oryza sativa (japonica
  misc_feature (15)..(418): Homolog of NCBI NO: 34897530 NR Description: OSJNBa0042L16.2 [Oryza sativa (japonica
MAGGGRDGPAARLLRRVPAAVSVLLMLTLCSPGPPGAVVVVSARKVGETCALDRNCDAGLHCETCVADGNVRPRCTRVAPVDPQTKARDLPFNRYAWLTTHNSFARLGQRSQTGVAIATPWNQQDTVTEQLNNGVRGLMLDMYDFRNDVWLCHSYGGICQNFTAFQPAVNVLREVERFLSRNPAEVVTIFVEDYVESPMGLTRVLNASGLARYVLPAWRMPKSGGDWPLLSDMVRDNHRLLVFTSKAAKEAAEGIAYEWRYVVENQYGTKGMVKGTCHNRAESAAMNDLSRSLVLNYFRDLPNLPAACKDNSAQLLDMVTACHDKSGDRWPNFIAVDFYKRSDRGGAAEATDKANGGLVCGCGSISACNANWTCTPRHGRTPRGIFNASSDAAAWRPPPPVLQWQRLILLPFLLALLMGL

SEQ ID NO: 9813 - protein, 395 aa, Zea mays subsp. mays
  peptide (1)..(395): Ceres Seq. ID no. 12382327
  misc_feature (1)..(393): Homolog of NCBI NO: 38345461 NR Description: OSJNBa0042L16.16 [Oryza sativa (japonica
  misc_feature (1)..(393): Homolog of NCBI NO: 34897530 NR Description: OSJNBa0042L16.2 [Oryza sativa (japonica
  misc_feature (15)..(349): Homolog of NCBI NO: 18402763 NR Description: expressed protein; protein id: At1g49740.1, by cDNA: 17743., supported by cDNA: gi_20260217 [Arabidopsis
  misc_feature (10)..(357): Homolog of NCBI NO: 15230348 NR Description: unknown protein; protein id: At3g19310.1
  misc_feature (18)..(357): Homolog of NCBI NO: 27754722 NR Description: unknown protein [Arabidopsis thaliana]
  misc_feature (17)..(348): Homolog of NCBI NO: 38637049 NR Description: MAP3K-like protein kinase [Oryza sativa (japonica
  misc_feature (20)..(346): Homolog of NCBI NO: 25407778 NR Description: MAP3K-like protein kinase [imported] -
  misc_feature (1)..(374): Homolog of NCBI NO: 38345515 NR Description: OSJNBa0039K24.18 [Oryza sativa (japonica
  misc_feature (1)..(343): Homolog of NCBI NO: 18425155 NR Description: putative protein; protein id: At5g67130.1, by cDNA: 38897., supported by cDNA: gi_15451187, supported by gi_20148448 [Arabidopsis thaliana] >gi|15451188|gb|AAK96865.1|
  misc_feature (1)..(343): Homolog of NCBI NO: 21593427 NR Description: unknown [Arabidopsis thaliana]
MLTLCSPGPPGAVVVVSARKVGETCALDRNCDAGLHCETCVADGNVRPRCTRVAPVDPQTKARDLPFNRYAWLTTHNSFARLGQRSQTGVAIATPWNQQDTVTEQLNNGVRGLMLDMYDFRNDVWLCHSYGGICQNFTAFQPAVNVLREVERFLSRNPAEVVTIFVEDYVESPMGLTRVLNASGLARYVLPAWRMPKSGGDWPLLSDMVRDNHRLLVFTSKAAKEAAEGIAYEWRYVVENQYGTKGMVKGTCHNRAESAAMNDLSRSLVLNYFRDLPNLPAACKDNSAQLLDMVTACHDKSGDRWPNFIAVDFYKRSDRGGAAEATDKANGGLVCGCGSISACNANWTCTPRHGRTPRGIFNASSDAAAWRPPPPVLQWQRLILLPFLLALLMGL

SEQ ID NO: 9814 - DNA, 1418 bp, Zea mays subsp. mays
  misc_feature (1)..(1418): Ceres Seq. ID no. 12411535
  misc_feature: MA Experiment ID: 20000488 Result: Up-regulated in Transcription
  misc_feature: MA Experiment 20000488 PARAMETER Experiment Name: Zm_50mM_NH4NO3_L_to_H_P Parameter: Organism Value: Zea mays
  misc_feature: MA Experiment 20000488 PARAMETER Experiment Name: Zm_50mM_NH4NO3_L_to_H_P Parameter: Timepoint (hr) Value: 8
  misc_feature: MA Experiment 20000488 PARAMETER Experiment Name: Zm_50mM_NH4NO3_L_to_H_P Parameter: Tissue Value: Leaves
  misc_feature: MA Experiment 20000488 PARAMETER Experiment Name: Zm_50mM_NH4NO3_L_to_H_P Parameter: Treatment Value: 50mM NH4NO3 vs. 100mM Mannitol
  misc_feature: MA Experiment ID: 20000492 Result: Up-regulated in Transcription
  misc_feature: MA Experiment 20000492 PARAMETER Experiment Name: Zm_Hybrid_Seed_Dev_P Parameter: DAP Value: 12
  misc_feature: MA Experiment 20000492 PARAMETER Experiment Name: Zm_Hybrid_Seed_Dev_P Parameter: Organism Value: Zea mays
  misc_feature: MA Experiment 20000492 PARAMETER Experiment Name: Zm_Hybrid_Seed_Dev_P Parameter: Plant Line Value: 35A19
  misc_feature: MA Experiment 20000492 PARAMETER Experiment Name: Zm_Hybrid_Seed_Dev_P Parameter: Tissue Value: Fert Kernel vs. Unfert Floret
agtggcactcgcagactcgcttctccccgaaaaacggctgaaccctgaaccctcactacgtcccgccgcctgcttcacagttcaccccggccatggtctccaccgctcgcgccgccctcccgacgccccacctctctctcgcttcctcctcccgccgcaggcccatctgtttttcacgccctcctccgcacctcgcctgcgcggcggcgctgccacctccatcaccgccggcagctccgcctcgccgcagcagcaccaggtcaccacgcgcctgggcgacgtgatagaggcgcagcagttcgatcgggactcgcttaacgagatctttgaggtggcgcgggagatggaggccgtggagcggagctcccacggcgctcccagtcgcgtcctcgaggggtacctcatggccactctcttctacgagccctccacgcgcacgcgcctctccttcgaggccgctatgcggaggctcggcggggaggtgctcaccaccgagaacgcgcgcgagttctcttccgccgccaagggggagacactcaagatacataagaaccgttgagggttattctgatattattgttctgagacattttgaaagtggagctgcaaggagagcagatatactgcgaatattctgttattaatgcaggtgatgggccagggcaacatccaacccaggctttgttggatgtttatacaataaagagagaaattggcacactagatggaataaaacttggtttggttggtgaccttgctaatgggaggacagttcgttctctggcttacttgattgctaagtaccagaacattaagatatactttgtatctccagatgttgttaaaatgaaggatgatatcaaggactacttaaattcccaaggtgttgaatgggaagaatgttcagatttgttggaggtggcatccaagtgtgatgttatttatcaaacacgtattcaaaaagaaagatttggtgagaggattgatctttataaagctgctcgtggtaagtacattgtggataagaaggtcttagatgtgctgccaaagcatgctgtgatcatgcatccccttccaaggcttgatgagatcacggcagaagtcgatagtgatccaagagctgcatattttaggcaggctaagaatggcctctacataaggatggcattgctcaaacttctgcttgttggtcactgacatatctgctagtgtgtgagcttgtgctgcgtcaagggatgaggaaatgtactaataatcagcagctcctgtcaaaattcaacgttcctgcgctgtcagggtaataaaagtctggatccatgctggagtgcagcaaagtttggcatggccatgttaatgtacaaatggtgttcgaaatagagttttgctgttctcatgtgatgtgagaacatggaacgtcg

SEQ ID NO: 9815 - protein, 185 aa, Zea mays subsp. mays
  peptide (1)..(185): Ceres Seq. ID no. 12411536
  misc_feature (92)..(180): Pfam Name: Aspartate/ornithine carbamoyltransferase, Pfam Description: Aspartate/ornithine carbamoyltransferase,
  misc_feature (92)..(180): Pfam Name: Aspartate/ornithine carbamoyltransferase, Pfam Description: Aspartate/ornithine carbamoyltransferase,
  misc_feature (44)..(180): Homolog of NCBI NO: 9453916 NR Description: aspartate carbamoyl transferase [Oryza sativa
  misc_feature (90)..(180): Homolog of NCBI NO: 3914501 NR Description: Aspartate carbamoyltransferase 3, chloroplast (Aspartate transcarbamylase 3) (ATCase 3) >gi|7433584|pir||T06425
  misc_feature (90)..(180): Homolog of NCBI NO: 3914503 NR Description: Aspartate carbamoyltransferase 2, chloroplast (Aspartate transcarbamylase 2) (ATCase 2) >gi|7433605|pir||T10181
  misc_feature (91)..(180): Homolog of NCBI NO: 21535795 NR Description: aspartate carbamoyltransferase [Solanum tuberosum]
  misc_feature (91)..(180): Homolog of NCBI NO: 15231112 NR Description: aspartate carbamoyltransferase precursor transcarbamylase); protein id: At3g20330.1, supported by cDNA: supported by cDNA: gi_19699265 [Arabidopsis thaliana] chloroplast
  misc_feature (90)..(180): Homolog of NCBI NO: 3914501 NR Description: Aspartate carbamoyltransferase 3, chloroplast (Aspartate transcarbamylase 3) (ATCase 3) >gi|7433584|pir||T06425
  misc_feature (91)..(180): Homolog of NCBI NO: 21535795 NR Description: aspartate carbamoyltransferase [Solanum tuberosum]
  misc_feature (132)..(180): Homolog of NCBI NO: 397385 NR Description: aspartate carbamoyltransferase [Lycopersicon
  misc_feature (132)..(180): Homolog of NCBI NO: 479713 NR Description: aspartate carbamoyltransferase (EC 2.1.3.2) -
  misc_feature (91)..(180): Homolog of NCBI NO: 15215706 NR Description: AT3g20330/MQC12_8 [Arabidopsis thaliana]
  misc_feature (90)..(180): Homolog of NCBI NO: 3914502 NR Description: Aspartate carbamoyltransferase 1, chloroplast (Aspartate transcarbamylase 1) (ATCase 1) >gi|7433585|pir||T06484
  misc_feature (91)..(180): Homolog of NCBI NO: 1076293 NR Description: aspartate carbamoyltransferase (EC 2.1.3.2) - thaliana >gi|443820|emb|CAA50687.1| aspartate
  misc_feature (91)..(180): Homolog of NCBI NO: 15231112 NR Description: aspartate carbamoyltransferase precursor transcarbamylase); protein id: At3g20330.1, supported by cDNA: supported by cDNA: gi_19699265 [Arabidopsis thaliana] chloroplast
  misc_feature (90)..(180): Homolog of NCBI NO: 3914503 NR Description: Aspartate carbamoyltransferase 2, chloroplast (Aspartate transcarbamylase 2) (ATCase 2) >gi|7433605|pir||T10181
  misc_feature (44)..(180): Homolog of NCBI NO: 9453916 NR Description: aspartate carbamoyl transferase [Oryza sativa
  misc_feature (91)..(180): Homolog of NCBI NO: 1076293 NR Description: aspartate carbamoyltransferase (EC 2.1.3.2) - thaliana >gi|443820|emb|CAA50687.1| aspartate
  misc_feature (90)..(180): Homolog of NCBI NO: 3914502 NR Description: Aspartate carbamoyltransferase 1, chloroplast (Aspartate transcarbamylase 1) (ATCase 1) >gi|7433585|pir||T06484
  misc_feature (91)..(180): Homolog of NCBI NO: 15215706 NR Description: AT3g20330/MQC12_8 [Arabidopsis thaliana]
  misc_feature (132)..(180): Homolog of NCBI NO: 479713 NR Description: aspartate carbamoyltransferase (EC 2.1.3.2) -
  misc_feature (132)..(180): Homolog of NCBI NO: 397385 NR Description: aspartate carbamoyltransferase [Lycopersicon
VALADSLLPEKRLNPEPSLRPAACFTVHPGHGLHRSRRPPDAPPLSRFLLPPQAHLFFTPSSAPRLRGGAATSITAGSSASPQQHQVTTRLGDVIEAQQFDRDSLNEIFEVAREMEAVERSSHGAPSRVLEGYLMATLFYEPSTRTRLSFEAAMRRLGGEVLTTENAREFSSAAKGETLKIHKNR

SEQ ID NO: 9816 - protein, 116 aa, Zea mays subsp. mays
  peptide (1)..(116): Ceres Seq. ID no. 12411537
  misc_feature (1)..(113): Pfam Name: Aspartate/ornithine carbamoyltransferase, Pfam Description: Aspartate/ornithine carbamoyltransferase,
  misc_feature (1)..(113): Pfam Name: Aspartate/ornithine carbamoyltransferase, Pfam Description: Aspartate/ornithine carbamoyltransferase,
  misc_feature (1)..(115): Homolog of NCBI NO: 9453916 NR Description: aspartate carbamoyl transferase [Oryza sativa
  misc_feature (1)..(115): Homolog of NCBI NO: 3914501 NR Description: Aspartate carbamoyltransferase 3, chloroplast (Aspartate transcarbamylase 3) (ATCase 3) >gi|7433584|pir||T06425
  misc_feature (1)..(115): Homolog of NCBI NO: 3914503 NR Description: Aspartate carbamoyltransferase 2, chloroplast (Aspartate transcarbamylase 2) (ATCase 2) >gi|7433605|pir||T10181
  misc_feature (1)..(115): Homolog of NCBI NO: 21535795 NR Description: aspartate carbamoyltransferase [Solanum tuberosum]
  misc_feature (1)..(115): Homolog of NCBI NO: 15231112 NR Description: aspartate carbamoyltransferase precursor transcarbamylase); protein id: At3g20330.1, supported by cDNA: supported by cDNA: gi_19699265 [Arabidopsis thaliana] chloroplast
  misc_feature (1)..(115): Homolog of NCBI NO: 3914501 NR Description: Aspartate carbamoyltransferase 3, chloroplast (Aspartate transcarbamylase 3) (ATCase 3) >gi|7433584|pir||T06425
  misc_feature (1)..(115): Homolog of NCBI NO: 21535795 NR Description: aspartate carbamoyltransferase [Solanum tuberosum]
  misc_feature (1)..(115): Homolog of NCBI NO: 397385 NR Description: aspartate carbamoyltransferase [Lycopersicon
  misc_feature (1)..(115): Homolog of NCBI NO: 479713 NR Description: aspartate carbamoyltransferase (EC 2.1.3.2) -
  misc_feature (1)..(115): Homolog of NCBI NO: 15215706 NR Description: AT3g20330/MQC12_8 [Arabidopsis thaliana]
  misc_feature (1)..(115): Homolog of NCBI NO: 3914502 NR Description: Aspartate carbamoyltransferase 1, chloroplast (Aspartate transcarbamylase 1) (ATCase 1) >gi|7433585|pir||T06484
  misc_feature (1)..(115): Homolog of NCBI NO: 1076293 NR Description: aspartate carbamoyltransferase (EC 2.1.3.2) - thaliana >gi|443820|emb|CAA50687.1| aspartate
  misc_feature (1)..(115): Homolog of NCBI NO: 15231112 NR Description: aspartate carbamoyltransferase precursor transcarbamylase); protein id: At3g20330.1, supported by cDNA: supported by cDNA: gi_19699265 [Arabidopsis thaliana] chloroplast
  misc_feature (1)..(115): Homolog of NCBI NO: 3914503 NR Description: Aspartate carbamoyltransferase 2, chloroplast (Aspartate transcarbamylase 2) (ATCase 2) >gi|7433605|pir||T10181
  misc_feature (1)..(115): Homolog of NCBI NO: 9453916 NR Description: aspartate carbamoyl transferase [Oryza sativa
  misc_feature (1)..(115): Homolog of NCBI NO: 1076293 NR Description: aspartate carbamoyltransferase (EC 2.1.3.2) - thaliana >gi|443820|emb|CAA50687.1| aspartate
  misc_feature (1)..(115): Homolog of NCBI NO: 3914502 NR Description: Aspartate carbamoyltransferase 1, chloroplast (Aspartate transcarbamylase 1) (ATCase 1) >gi|7433585|pir||T06484
  misc_feature (1)..(115): Homolog of NCBI NO: 15215706 NR Description: AT3g20330/MQC12_8 [Arabidopsis thaliana]
  misc_feature (1)..(115): Homolog of NCBI NO: 479713 NR Description: aspartate carbamoyltransferase (EC 2.1.3.2) -
  misc_feature (1)..(115): Homolog of NCBI NO: 397385 NR Description: aspartate carbamoyltransferase [Lycopersicon
MKDDIKDYLNSQGVEWEECSDLLEVASKCDVIYQTRIQKERFGERIDLYKAARGKYIVDKKVLDVLPKHAVIMHPLPRLDEITAEVDSDPRAAYFRQAKNGLYIRMALLKLLLVGH

SEQ ID NO: 9817 - DNA, 1569 bp, Zea mays subsp. mays
  misc_feature (1)..(1569): Ceres Seq. ID no. 12349393
  misc_feature: MA Experiment ID: 20000478 Result: Up-regulated in Transcription
  misc_feature: MA Experiment 20000478 PARAMETER Experiment Name: Zm_5mM_SA_P Parameter: Age (day) Value: 11
  misc_feature: MA Experiment 20000478 PARAMETER Experiment Name: Zm_5mM_SA_P Parameter: Organism Value: Zea mays
  misc_feature: MA Experiment 20000478 PARAMETER Experiment Name: Zm_5mM_SA_P Parameter: Plant Line Value: 35A19
  misc_feature: MA Experiment 20000478 PARAMETER Experiment Name: Zm_5mM_SA_P Parameter: Timepoint (hr) Value: 72
  misc_feature: MA Experiment 20000478 PARAMETER Experiment Name: Zm_5mM_SA_P Parameter: Tissue Value: Aerial
  misc_feature: MA Experiment 20000478 PARAMETER Experiment Name: Zm_5mM_SA_P Parameter: Treatment Value: 5mM SA vs. No Treatment
  misc_feature: MA Experiment ID: 20000479 Result: Up-regulated in Transcription
  misc_feature: MA Experiment 20000479 PARAMETER Experiment Name: Zm_Drought_P Parameter: Age (day) Value: 10
  misc_feature: MA Experiment 20000479 PARAMETER Experiment Name: Zm_Drought_P Parameter: Organism Value: Zea mays
  misc_feature: MA Experiment 20000479 PARAMETER Experiment Name: Zm_Drought_P Parameter: Plant Line Value: 35A19
  misc_feature: MA Experiment 20000479 PARAMETER Experiment Name: Zm_Drought_P Parameter: Timepoint (hr) Value: 48
  misc_feature: MA Experiment 20000479 PARAMETER Experiment Name: Zm_Drought_P Parameter: Tissue Value: Aerial
  misc_feature: MA Experiment 20000479 PARAMETER Experiment Name: Zm_Drought_P Parameter: Treatment Value: Drought vs. No Drought
  misc_feature: MA Experiment ID: 20000492 Result: Down-regulated in Transcription
  misc_feature: MA Experiment 20000492 PARAMETER Experiment Name: Zm_Hybrid_Seed_Dev_P Parameter: DAP Value: 12
  misc_feature: MA Experiment 20000492 PARAMETER Experiment Name: Zm_Hybrid_Seed_Dev_P Parameter: Organism Value: Zea mays
  misc_feature: MA Experiment 20000492 PARAMETER Experiment Name: Zm_Hybrid_Seed_Dev_P Parameter: Plant Line Value: 35A19
  misc_feature: MA Experiment 20000492 PARAMETER Experiment Name: Zm_Hybrid_Seed_Dev_P Parameter: Tissue Value: Fert Kernel vs. Unfert Floret
aagaagagaccaagattagtaccacttgtactgtacactcctcgttccgcgtgcgaagcgaaccctgttccatgttcttgaatctctctgagcccagtccttgtagctagcagatcagatcgctcaggcggaaagatcgagagaaggtcgccccaggatcgagatctagagcgagaaaggtttaagagggaaaggcgcggcaaggagtcgagagaatagaatgttcccttcctccaagaagcaggccagcaccggtgccgcgaacccaaatgatcggcctatgtgcgggcaaggcggcgactccggcggtctcgtcctcaccaccgaccccaagccccgcctccggtggacacccgagctccatgaccgcttcgtcgatgccgtcgcccagctcggaggcccggacaaggcaacgcccaagaccatcatgagggttatgggagtcaagggcctcaccctctaccacctcaagagtcaccttcagaaattcaggctagggaagcagcacaaggagttgggtgaccatacagcaatggagatgcaacgtagcgtggcctcttcttcaggcatgatagcaagaagcatgaacgaccgcagcgtgaatgtgaacgaggccttaaggatccaaatggaagtccaaagaaggctccatggagaactagaggtgcagaagcacctccagatgagggttgaagcccaggggaagtacatgcagtccatcgtggagaaagcataccaagccctcgggtccagcgactgcgccacgtggcccgctgggtacagaactctaggcagccaaggggtccttgacatcggcaccagctccacgagcttctcgtccgtccaggacctgcagtgcttctatggaggaagcagccacatggaccagctcctgcatcagatggagaggccaatggatggcttcctgacgctgggcgagagctgcttcattgggtccgcggacaacaagaaggaccctaataaccattgcagctccagtggcaagagctcgatgatgtgggccagcgaagagcagcaggcaaagagcggcaacgatcagcttcagatggggtcgtcgacaaggatggagggtgcaggcattgatgtcatggatccagtagtcaccgggctgtacgagggcgccgtgtcgggagactccatggacagcaagggttttgagggttcgaactccaggctcgagatgaagccgcctgcacaacaagcacctgtaggaagtcagaggatacgcatatagtcgtccaatatataatggtttggaactcacgtaaagaactgtatactacaatatatggataagcaaggtcaagctaaggtatttaaatgcaagtgtcagttttgttgtgaaccatcaaagttcagacgattagcgtgtgatcggagttgtagtacatgcagtcattagttttgttggatacaagatattatggagatcaattctccatatatatgtttgtttattttgtccctaagattcgccatatatatgctgtattatattggatttgtgtgacacccttgtaacattgatcagagatcttttgtgggtgc

SEQ ID NO: 9818 - protein, 344 aa, Zea mays subsp. mays
  peptide (1)..(344): Ceres Seq. ID no. 12349394
  misc_feature (40)..(91): Pfam Name: Myb-like DNA-binding domain Pfam Description: Myb-like DNA-binding domain
  misc_feature (1)..(337): Homolog of NCBI NO: 30699418 NR Description: transfactor -related [Arabidopsis thaliana]
  misc_feature (1)..(204): Homolog of NCBI NO: 25406584 NR Description: hypothetical protein T8K14.15 [imported] - thaliana >gi|4835766|gb|AAD30233.1|AC007202_15 Contains
  misc_feature (31)..(175): Homolog of NCBI NO: 18414049 NR Description: putative protein; protein id: At4g13640.1, by cDNA: 38327. [Arabidopsis thaliana]
  misc_feature (26)..(265): Homolog of NCBI NO: 18404044 NR Description: transfactor, putative; protein id: At3g24120.1, by cDNA: 6626., supported by cDNA: gi_15215653, supported by gi_20334891 [Arabidopsis thaliana] >gi|15215654|gb|AAK91372.1|
  misc_feature (4)..(177): Homolog of NCBI NO: 34394528 NR Description: transfactor-like protein [Oryza sativa (japonica
  misc_feature (23)..(208): Homolog of NCBI NO: 29647444 NR Description: P0410E11.32 [Oryza sativa (japonica
  misc_feature (23)..(253): Homolog of NCBI NO: 14596181 NR Description: transfactor-like protein [Arabidopsis thaliana]
  misc_feature (23)..(253): Homolog of NCBI NO: 15238770 NR Description: transfactor-like protein; protein id: supported by cDNA: gi_14596180 [Arabidopsis thaliana]
  misc_feature (23)..(253): Homolog of NCBI NO: 28059694 NR Description: transfactor-like protein [Arabidopsis thaliana]
  misc_feature (18)..(179): Homolog of NCBI NO: 32470629 NR Description: putative phosphate starvation response regulator
MFPSSKKQASTGAANPNDRPMCGQGGDSGGLVLTTDPKPRLRWTPELHDRFVDAVAQLGGPDKATPKTIMRVMGVKGLTLYHLKSHLQKFRLGKQHKELGDHTAMEMQRSVASSSGMIARSMNDRSVNVNEALRIQMEVQRRLHGELEVQKHLQMRVEAQGKYMQSIVEKAYQALGSSDCATWPAGYRTLGSQGVLDIGTSSTSFSSVQDLQCFYGGSSHMDQLLHQMERPMDGFLTLGESCFIGSADNKKDPNNHCSSSGKSSMMWASEEQQAKSGNDQLQMGSSTRMEGAGIDVMDPVVTGLYEGAVSGDSMDSKGFEGSNSRLEMKPPAQQAPVGSQRIRI

SEQ ID NO: 9819 - protein, 324 aa, Zea mays subsp. mays
  peptide (1)..(324): Ceres Seq. ID no. 12349395
  misc_feature (20)..(71): Pfam Name: Myb-like DNA-binding domain Pfam Description: Myb-like DNA-binding domain
  misc_feature (1)..(317): Homolog of NCBI NO: 30699418 NR Description: transfactor -related [Arabidopsis thaliana]
  misc_feature (1)..(184): Homolog of NCBI NO: 25406584 NR Description: hypothetical protein T8K14.15 [imported] - thaliana >gi|4835766|gb|AAD30233.1|AC007202_15 Contains
  misc_feature (11)..(155): Homolog of NCBI NO: 18414049 NR Description: putative protein; protein id: At4g13640.1, by cDNA: 38327. [Arabidopsis thaliana]
  misc_feature (6)..(245): Homolog of NCBI NO: 18404044 NR Description: transfactor, putative; protein id: At3g24120.1, by cDNA: 6626., supported by cDNA: gi_15215653, supported by gi_20334891 [Arabidopsis thaliana] >gi|15215654|gb|AAK91372.1|
  misc_feature (1)..(157): Homolog of NCBI NO: 34394528 NR Description: transfactor-like protein [Oryza sativa (japonica
  misc_feature (3)..(188): Homolog of NCBI NO: 29647444 NR Description: P0410E11.32 [Oryza sativa (japonica
  misc_feature (3)..(233): Homolog of NCBI NO: 14596181 NR Description: transfactor-like protein [Arabidopsis thaliana]
  misc_feature (3)..(233): Homolog of NCBI NO: 28059694 NR Description: transfactor-like protein [Arabidopsis thaliana]
  misc_feature (3)..(233): Homolog of NCBI NO: 15238770 NR Description: transfactor-like protein; protein id: supported by cDNA: gi_14596180 [Arabidopsis thaliana]
  misc_feature (1)..(159): Homolog of NCBI NO: 32470629 NR Description: putative phosphate starvation response regulator
MCGQGGDSGGLVLTTDPKPRLRWTPELHDRFVDAVAQLGGPDKATPKTIMRVMGVKGLTLYHLKSHLQKFRLGKQHKELGDHTAMEMQRSVASSSGMIARSMNDRSVNVNEALRIQMEVQRRLHGELEVQKHLQMRVEAQGKYMQSIVEKAYQALGSSDCATWPAGYRTLGSQGVLDIGTSSTSFSSVQDLQCFYGGSSHMDQLLHQMERPMDGFLTLGESCFIGSADNKKDPNNHCSSSGKSSMMWASEEQQAKSGNDQLQMGSSTRMEGAGIDVMDPVVTGLYEGAVSGDSMDSKGFEGSNSRLEMKPPAQQAPVGSQRIRI

SEQ ID NO: 9820 - protein, 275 aa, Zea mays subsp. mays
  peptide (1)..(275): Ceres Seq. ID no. 12349396
  misc_feature (1)..(268): Homolog of NCBI NO: 30699418 NR Description: transfactor -related [Arabidopsis thaliana]
  misc_feature (1)..(135): Homolog of NCBI NO: 25406584 NR Description: hypothetical protein T8K14.15 [imported] - thaliana >gi|4835766|gb|AAD30233.1|AC007202_15 Contains
  misc_feature (1)..(106): Homolog of NCBI NO: 18414049 NR Description: putative protein; protein id: At4g13640.1, by cDNA: 38327. [Arabidopsis thaliana]
  misc_feature (1)..(196): Homolog of NCBI NO: 18404044 NR Description: transfactor, putative; protein id: At3g24120.1, by cDNA: 6626., supported by cDNA: gi_15215653, supported by gi_20334891 [Arabidopsis thaliana] >gi|15215654|gb|AAK91372.1|
  misc_feature (1)..(108): Homolog of NCBI NO: 34394528 NR Description: transfactor-like protein [Oryza sativa (japonica
  misc_feature (1)..(139): Homolog of NCBI NO: 29647444 NR Description: P0410E11.32 [Oryza sativa (japonica
  misc_feature (1)..(184): Homolog of NCBI NO: 14596181 NR Description: transfactor-like protein [Arabidopsis thaliana]
  misc_feature (1)..(184): Homolog of NCBI NO: 15238770 NR Description: transfactor-like protein; protein id: supported by cDNA: gi_14596180 [Arabidopsis thaliana]
  misc_feature (1)..(184): Homolog of NCBI NO: 28059694 NR Description: transfactor-like protein [Arabidopsis thaliana]
  misc_feature (1)..(110): Homolog of NCBI NO: 32470629 NR Description: putative phosphate starvation response regulator
MRVMGVKGLTLYHLKSHLQKFRLGKQHKELGDHTAMEMQRSVASSSGMIARSMNDRSVNVNEALRIQMEVQRRLHGELEVQKHLQMRVEAQGKYMQSIVEKAYQALGSSDCATWPAGYRTLGSQGVLDIGTSSTSFSSVQDLQCFYGGSSHMDQLLHQMERPMDGFLTLGESCFIGSADNKKDPNNHCSSSGKSSMMWASEEQQAKSGNDQLQMGSSTRMEGAGIDVMDPVVTGLYEGAVSGDSMDSKGFEGSNSRLEMKPPAQQAPVGSQRIRI

SEQ ID NO: 9821 - DNA, 1828 bp, Zea mays subsp. mays
  misc_feature (1)..(1828): Ceres Seq. ID no. 12356837
  misc_feature: MA Experiment ID: 108528 Result: Down-regulated in Transcription
  misc_feature: MA Experiment 108528 PARAMETER Experiment Name: Zm_Imbibed_Seeds_P Parameter: Age (day) Value: 5 vs. 2
  misc_feature: MA Experiment 108528 PARAMETER Experiment Name: Zm_Imbibed_Seeds_P Parameter: Organism Value: Zea mays
  misc_feature: MA Experiment 108528 PARAMETER Experiment Name: Zm_Imbibed_Seeds_P Parameter: Plant Line Value: 35A19
  misc_feature: MA Experiment 108528 PARAMETER Experiment Name: Zm_Imbibed_Seeds_P Parameter: Tissue Value: Aerial vs. Embryo
  misc_feature: MA Experiment ID: 108529 Result: Down-regulated in Transcription
  misc_feature: MA Experiment 108529 PARAMETER Experiment Name: Zm_Imbibed_Seeds_P Parameter: Age (day) Value: 5 vs. 2
  misc_feature: MA Experiment 108529 PARAMETER Experiment Name: Zm_Imbibed_Seeds_P Parameter: Organism Value: Zea mays
  misc_feature: MA Experiment 108529 PARAMETER Experiment Name: Zm_Imbibed_Seeds_P Parameter: Plant Line Value: 35A19
  misc_feature: MA Experiment 108529 PARAMETER Experiment Name: Zm_Imbibed_Seeds_P Parameter: Tissue Value: Roots vs. Embryo
  misc_feature: MA Experiment ID: 108545 Result: Down-regulated in Transcription
  misc_feature: MA Experiment 108545 PARAMETER Experiment Name: Zm_Imbibed_Seeds_P Parameter: Age (day) Value: 3 vs. 2
  misc_feature: MA Experiment 108545 PARAMETER Experiment Name: Zm_Imbibed_Seeds_P Parameter: Organism Value: Zea mays
  misc_feature: MA Experiment 108545 PARAMETER Experiment Name: Zm_Imbibed_Seeds_P Parameter: Plant Line Value: 35A19
  misc_feature: MA Experiment 108545 PARAMETER Experiment Name: Zm_Imbibed_Seeds_P Parameter: Tissue Value: Aerial vs. Embryo
  misc_feature: MA Experiment ID: 108547 Result: Down-regulated in Transcription
  misc_feature: MA Experiment 108547 PARAMETER Experiment Name: Zm_Imbibed_Seeds_P Parameter: Age (day) Value: 4 vs. 2
  misc_feature: MA Experiment 108547 PARAMETER Experiment Name: Zm_Imbibed_Seeds_P Parameter: Organism Value: Zea mays
  misc_feature: MA Experiment 108547 PARAMETER Experiment Name: Zm_Imbibed_Seeds_P Parameter: Plant Line Value: 35A19
  misc_feature: MA Experiment 108547 PARAMETER Experiment Name: Zm_Imbibed_Seeds_P Parameter: Tissue Value: Aerial vs. Embryo
atgcatagtaaagttagcaatgtcgatggattacttggctgctgctgtacccgtgaccttggctctgggagtgggatctatcttgttggtcttacgatggacgtactgccgccgccgaacaagcgccgaagaagtgagactgccgccggggtcaaggggcctcctgttcctgggggagacgctccactacctggcagcgtcctccaccccgggggtattgccaccattcttccagcgacggttggagaggtatggccccatcttccggacgaacctggtcggggaggacctcgtcgtgtcgctggacgcggagctgaacgcgcacgtgctgaagcaggaggagcgcggcttccagatctggtacccgccctccttcatgcgcgtcttcggcgccgacaacatcaccgccaagctcggcgtgctccaccactacatgaggaccctcgtgctccgcctcttcggccaccagaccgtccgctccgtgctgctgcacgacgtgcagcggagcgcgcgcgacgagctgcgctcatggctcggccgcccggacgtcgaggtcaggacggccacctccaggatgatatttggcgtcactgccaagaagctgatcagccatgacgacgcagcatctggagaaacgttgtggagatgcttccacgactggacttcggggctgctctcgtttccggtttccattcccggcacaaccttctacagatgcatgcagggacgtaagaaggttatgacgatgctgaaacagcagctcgtcgagcgtcgacggaacgcagcggagcgcgagacagaggattttcttcgatctcgtgatcgatgaactgaacaagccagaccctatgatggacgagagcaccgcgttggacttgctgttcaccatgttgtttgcgagccatgagacgacgtccatggtattaaccgtcatactcaagtatctgacggacaaccccaaagctttgcaagagctgacagaggagcacgaaagaatcctggaaagtagggccaatccaggctctgacctcacgtgggaggagtacaagtctatgaaattcacatctcatgttgtacatgagtcgctaaggctcgcaaacatcgcactggccatgttcaggaaagcaaatcaggatgtgcacataaatgggtacacaattccaaaaggatcaaagatcatgatgtgtccactagcatcgcacttgaatacggaggtctacgaggacccctcagtgttcaatccatggagatggaaggatattcctgaaccagtaggcacttctaaggacttcatggccttcgggggtggtttgcgcctatgtgctggtgccgacttttccaagatgcagatggctatgttcctccattacttggtcacaaattacaggtggaaacccgtcggcggtgggacaatgctattctatccaggactgcaatttccagaaggcttccacatccagcttcttccaaaaatcccaaacgtggttccataaaccctatgaagaaatatgaatacaaataatttaagcaaatattctaaatgtaccatggggaattgaagttcgataacgatatggtacgggctaatttggtgatccacttgttaccaaatcaaccctaatggtagcaggtcggattgtcagaacaaataatagtttcaccaaacagaaggggagtatgtatgtgtgtaacattttatagttataaataatagtagagtaaattctgctcgttgtgtaacaactatgcaggtgagtaaaaattggttcagcatattgtatacattatgcccagttcaatgaaaaaaaaactttgttgtttggtgcgt

SEQ ID NO: 9822 - protein, 275 aa, Zea mays subsp. mays
  peptide (1)..(275): Ceres Seq. ID no. 12356838
  misc_feature (92)..(270): Homolog of NCBI NO: 27764671 NR Description: putative hydroxylase [Oryza sativa (japonica
  misc_feature (5)..(269): Homolog of NCBI NO: 20520627 NR Description: putative cytochrome P450 [Oryza sativa (japonica
  misc_feature (5)..(269): Homolog of NCBI NO: 38567920 NR Description: OSJNBa0088I22.16 [Oryza sativa (japonica
  misc_feature (20)..(269): Homolog of NCBI NO: 30682922 NR Description: cytochrome P450, putative [Arabidopsis thaliana]
  misc_feature (20)..(269): Homolog of NCBI NO: 9502380 NR Description: T12C24.27 [Arabidopsis thaliana]
  misc_feature (27)..(260): Homolog of NCBI NO: 38567916 NR Description: OSJNBa0088I22.12 [Oryza sativa (japonica
  misc_feature (92)..(269): Homolog of NCBI NO: 37531698 NR Description: putative cytochrome P450 [Oryza sativa (japonica group)] >gi|21671941|gb|AAM74303.1| Putative cytochrome P450
  misc_feature (7)..(269): Homolog of NCBI NO: 18483228 NR Description: putative cytochrome P450-like protein [Sorghum
  misc_feature (156)..(270): Homolog of NCBI NO: 28564842 NR Description: putative cytochrome P450 [Oryza sativa (japonica
  misc_feature (46)..(138): Homolog of NCBI NO: 28564842 NR Description: putative cytochrome P450 [Oryza sativa (japonica
CIVKLAMSMDYLAAAVPVTLALGVGSILLVLRWTYCRRRTSAEEVRLPPGSRGLLFLGETLHYLAASSTPGVLPPFFQRRLERYGPIFRTNLVGEDLVVSLDAELNAHVLKQEERGFQIWYPPSFMRVFGADNITAKLGVLHHYMRTLVLRLFGHQTVRSVLLHDVQRSARDELRSWLGRPDVEVRTATSRMIFGVTAKKLISHDDAASGETLWRCFHDWTSGLLSFPVSIPGTTFYRCMQGRKKVMTMLKQQLVERRRNAAERETEDFLRSRDR

SEQ ID NO: 9823 - protein, 269 aa, Zea mays subsp. mays
  peptide (1)..(269): Ceres Seq. ID no. 12356839
  misc_feature (86)..(264): Homolog of NCBI NO: 27764671 NR Description: putative hydroxylase [Oryza sativa (japonica
  misc_feature (1)..(263): Homolog of NCBI NO: 20520627 NR Description: putative cytochrome P450 [Oryza sativa (japonica
  misc_feature (1)..(263): Homolog of NCBI NO: 38567920 NR Description: OSJNBa0088I22.16 [Oryza sativa (japonica
  misc_feature (14)..(263): Homolog of NCBI NO: 30682922 NR Description: cytochrome P450, putative [Arabidopsis thaliana]
  misc_feature (14)..(263): Homolog of NCBI NO: 9502380 NR Description: T12C24.27 [Arabidopsis thaliana]
  misc_feature (21)..(254): Homolog of NCBI NO: 38567916 NR Description: OSJNBa0088I22.12 [Oryza sativa (japonica
  misc_feature (86)..(263): Homolog of NCBI NO: 37531698 NR Description: putative cytochrome P450 [Oryza sativa (japonica group)] >gi|21671941|gb|AAM74303.1| Putative cytochrome P450
  misc_feature (1)..(263): Homolog of NCBI NO: 18483228 NR Description: putative cytochrome P450-like protein [Sorghum
  misc_feature (150)..(264): Homolog of NCBI NO: 28564842 NR Description: putative cytochrome P450 [Oryza sativa (japonica
  misc_feature (40)..(132): Homolog of NCBI NO: 28564842 NR Description: putative cytochrome P450 [Oryza sativa (japonica
MSMDYLAAAVPVTLALGVGSILLVLRWTYCRRRTSAEEVRLPPGSRGLLFLGETLHYLAASSTPGVLPPFFQRRLERYGPIFRTNLVGEDLVVSLDAELNAHVLKQEERGFQIWYPPSFMRVFGADNITAKLGVLHHYMRTLVLRLFGHQTVRSVLLHDVQRSARDELRSWLGRPDVEVRTATSRMIFGVTAKKLISHDDAASGETLWRCFHDWTSGLLSFPVSIPGTTFYRCMQGRKKVMTMLKQQLVERRRNAAERETEDFLRSRDR

SEQ ID NO: 9824 - protein, 267 aa, Zea mays subsp. mays
  peptide (1)..(267): Ceres Seq. ID no. 12356840
  misc_feature (84)..(262): Homolog of NCBI NO: 27764671 NR Description: putative hydroxylase [Oryza sativa (japonica
  misc_feature (1)..(261): Homolog of NCBI NO: 20520627 NR Description: putative cytochrome P450 [Oryza sativa (japonica
  misc_feature (1)..(261): Homolog of NCBI NO: 38567920 NR Description: OSJNBa0088I22.16 [Oryza sativa (japonica
  misc_feature (12)..(261): Homolog of NCBI NO: 30682922 NR Description: cytochrome P450, putative [Arabidopsis thaliana]
  misc_feature (12)..(261): Homolog of NCBI NO: 9502380 NR Description: T12C24.27 [Arabidopsis thaliana]
  misc_feature (19)..(252): Homolog of NCBI NO: 38567916 NR Description: OSJNBa0088I22.12 [Oryza sativa (japonica
  misc_feature (84)..(261): Homolog of NCBI NO: 37531698 NR Description: putative cytochrome P450 [Oryza sativa (japonica group)] >gi|21671941|gb|AAM74303.1| Putative cytochrome P450
  misc_feature (1)..(261): Homolog of NCBI NO: 18483228 NR Description: putative cytochrome P450-like protein [Sorghum
  misc_feature (148)..(262): Homolog of NCBI NO: 28564842 NR Description: putative cytochrome P450 [Oryza sativa (japonica
  misc_feature (38)..(130): Homolog of NCBI NO: 28564842 NR Description: putative cytochrome P450 [Oryza sativa (japonica
MDYLAAAVPVTLALGVGSILLVLRWTYCRRRTSAEEVRLPPGSRGLLFLGETLHYLAASSTPGVLPPFFQRRLERYGPIFRTNLVGEDLVVSLDAELNAHVLKQEERGFQIWYPPSFMRVFGADNITAKLGVLHHYMRTLVLRLFGHQTVRSVLLHDVQRSARDELRSWLGRPDVEVRTATSRMIFGVTAKKLISHDDAASGETLWRCFHDWTSGLLSFPVSIPGTTFYRCMQGRKKVMTMLKQQLVERRRNAAERETEDFLRSRDR

SEQ ID NO: 9825 - DNA, 2170 bp, Zea mays subsp. mays
  misc_feature (1)..(2170): Ceres Seq. ID no. 12416076
  misc_feature: MA Experiment ID: 108543 Result: Up-regulated in Transcription
  misc_feature: MA Experiment ID: 20000534 Result: Down-regulated in Transcription
  misc_feature: MA Experiment 20000534 PARAMETER Experiment Name: Zm_Hybrid_Pollen_P Parameter: Age (day) Value: 8
  misc_feature: MA Experiment 20000534 PARAMETER Experiment Name: Zm_Hybrid_Pollen_P Parameter: Organism Value: Zea mays
  misc_feature: MA Experiment 20000534 PARAMETER Experiment Name: Zm_Hybrid_Pollen_P Parameter: Plant Line Value: 35A19
  misc_feature: MA Experiment 20000534 PARAMETER Experiment Name: Zm_Hybrid_Pollen_P Parameter: Tissue Value: Pollen vs. Aerial
gcacgagaccattacctagaacatcctaatcgaaaagagacaaccggcacccgccgatcgctcgctggtgggatgaagaaatgctccggcgtgctcttcatcctcacactcgccgtcgtgctcttcctcctctcgccgtcgccctcccccactccaccccccaacaccgcacccaatggcccgatcaccgacctcctccccaccctccccggcctttcggacctctaccctcccgctcccaactccactgcacatctctcctggggcctcctccgcccgctcctctgccgctccgacgcgctcccgggaacctctgcaggcgtcctcgaggcagccgaagcctggcggaatctcaccctggctgtcaccgccgcggcaagcgaggaggaggcgcgtctccaaggactccgctgctcatcgtccgtgggaggggatctacgcacgggacgtgccacactcccctgcgggctctcggagggcgcggcattgacggtggtcgggattctcagggagggggcggccaagttctgggtggaaatgctgggtgcgaacggtgaggttgtgctgcacgtcaatgtgagcctgggagccgcgggggtgttggtggagcagaattcctggacgccagaggaggggtggggggagtgggagcggtgcccgcctgttggtgatgtgagcagcagcaatagcagcttgcagctaagtccagtggacggccttgttcattgcaatgagaaagtgggtgcaaggatcgtccaggagagtaataatactgtggtaaatattactgggaaccaacctgaagattggcagagtcaaacaggacatggtcagttaagtggacgtttctcaattgttgaaggagagccttttacagtaacactgtgggctggtgtagaggggttccatatgacagtaaatgggcggcatgagacatcatttgcctatagagagaggtcagagccatggttggtagcagaagtcatgttttctggtgatttggagctcttgtcattcttggctaatgagttaccagtatcagaagatatagacatggaaaatgttgcagttttgaaggccccacctctgccaaagaagcaaacttttctgctggttggtgttttctctactggaaacaacttcaagcggcggatggctttgaggcgaacatggatgcaatatgaggctgttcgctcaggcgatgtagtagtccgttttttcactggtcttcacaagaatgagcaagtcaatatggagttatggagagaggctcaattatatggtgatatccaattgatgcccttcgttgactactatactttgatcactttgaagaccatatcaatttgcattttcggaacaaaaattgttcctgcaaagtacatcatgaaaacggatgacgatgcttttgttaggatcgatgaagtgatctcgagcctaaagaagagaaattccaatggccttctttatggtctcatttctttccaatcttccccccacagagacaagggtagcaaatggttcatcagtcggaaggaatggcccttcgacatgtacccgccatgggctcatggccctggatacgtaatctcacgtgacatcgctaagtttgtagtccaaggccaccaggaactgactcttcagcttttcaaacttgaagacgtggcaatgggtatttggatccaacagtacaagaacagtgggcagcaagtaaacattgtgactgatgaccggttctacaatgaaggatgcgaagctgactacgtccttgcccactaccagaccccgaggcttatgatgtgtctgtgggagaagctgaagacggaatatcatgctatatgctgtgaatagcatccgaattgcaagtaggaggcgatagaggaatggatagatagaggaatggataggttagccttggttttgaagaagacatttgctccgattttgacgctgtgtggaaaattgttgggactatgcgcaaaaagcctgtaacattgggttctcacttctgttctgtggcctgtgggttcatgttctttgtttttgggtagaaaatgttaatccgtgcaacttgatggatgttgtaaaaagagtgttgtaggacatttgagagagtttatctggcacaacctctcaagttattggatccatatacacctgcactcgtcct

SEQ ID NO: 9826 - protein, 616 aa, Zea mays subsp. mays
  peptide (1)..(616): Ceres Seq. ID no. 12416077
  misc_feature (382)..(576): Pfam Name: Galactosyltransferase Pfam Description: Galactosyltransferase
  misc_feature (25)..(221): Homolog of NCBI NO: 34894810 NR Description: P0554D10.8 [Oryza sativa (japonica
  misc_feature (319)..(512): Homolog of NCBI NO: 34894810 NR Description: P0554D10.8 [Oryza sativa (japonica
  misc_feature (548)..(613): Homolog of NCBI NO: 34894810 NR Description: P0554D10.8 [Oryza sativa (japonica
  misc_feature (82)..(616): Homolog of NCBI NO: 18397574 NR Description: expressed protein; protein id: At3g06440.1, by cDNA: gi_13605628 [Arabidopsis thaliana] AT3g06440/F24P17_7 [Arabidopsis thaliana]
  misc_feature (222)..(616): Homolog of NCBI NO: 6437545 NR Description: unknown protein [Arabidopsis thaliana]
  misc_feature (86)..(615): Homolog of NCBI NO: 15223352 NR Description: hypothetical protein; protein id: At1g26810.1 thaliana] >gi|22136678|gb|AAM91658.1| unknown protein
  misc_feature (104)..(615): Homolog of NCBI NO: 34393276 NR Description: putative beta-1,3-galactosyltransferase 5 [Oryza
  misc_feature (174)..(615): Homolog of NCBI NO: 30689779 NR Description: galactosyltransferase family [Arabidopsis
  misc_feature (166)..(615): Homolog of NCBI NO: 8809658 NR Description: gb|AAD55296.1~gene_id:MRG21.3~strong similarity
  misc_feature (174)..(615): Homolog of NCBI NO: 26451550 NR Description: unknown protein [Arabidopsis thaliana]
ARDHYLEHPNRKETTGTRRSLAGGMKKCSGVLFILTLAVVLFLLSPSPSPTPPPNTAPNGPITDLLPTLPGLSDLYPPAPNSTAHLSWGLLRPLLCRSDALPGTSAGVLEAAEAWRNLTLAVTAAASEEEARLQGLRCSSSVGGDLRTGRATLPCGLSEGAALTVVGILREGAAKFWVEMLGANGEVVLHVNVSLGAAGVLVEQNSWTPEEGWGEWERCPPVGDVSSSNSSLQLSPVDGLVHCNEKVGARIVQESNNTVVNITGNQPEDWQSQTGHGQLSGRFSIVEGEPFTVTLWAGVEGFHMTVNGRHETSFAYRERSEPWLVAEVMFSGDLELLSFLANELPVSEDIDMENVAVLKAPPLPKKQTFLLVGVFSTGNNFKRRMALRRTWMQYEAVRSGDVVVRFFTGLHKNEQVNMELWREAQLYGDIQLMPFVDYYTLITLKTISICIFGTKIVPAKYIMKTDDDAFVRIDEVISSLKKRNSNGLLYGLISFQSSPHRDKGSKWFISRKEWPFDMYPPWAHGPGYVISRDIAKFVVQGHQELTLQLFKLEDVAMGIWIQQYKNSGQQVNIVTDDRFYNEGCEADYVLAHYQTPRLMMCLWEKLKTEYHAICCE

SEQ ID NO: 9827 - protein, 592 aa, Zea mays subsp. mays
  peptide (1)..(592): Ceres Seq. ID no. 12416078
  misc_feature (358)..(552): Pfam Name: Galactosyltransferase Pfam Description: Galactosyltransferase
  misc_feature (198)..(592): Homolog of NCBI NO: 6437545 NR Description: unknown protein [Arabidopsis thaliana]
  misc_feature (62)..(591): Homolog of NCBI NO: 15223352 NR Description: hypothetical protein; protein id: At1g26810.1 thaliana] >gi|22136678|gb|AAM91658.1| unknown protein
  misc_feature (80)..(591): Homolog of NCBI NO: 34393276 NR Description: putative beta-1,3-galactosyltransferase 5 [Oryza
  misc_feature (1)..(197): Homolog of NCBI NO: 34894810 NR Description: P0554D10.8 [Oryza sativa (japonica
  misc_feature (524)..(589): Homolog of NCBI NO: 34894810 NR Description: P0554D10.8 [Oryza sativa (japonica
  misc_feature (58)..(592): Homolog of NCBI NO: 18397574 NR Description: expressed protein; protein id: At3g06440.1, by cDNA: gi_13605628 [Arabidopsis thaliana] AT3g06440/F24P17_7 [Arabidopsis thaliana]
  misc_feature (295)..(488): Homolog of NCBI NO: 34894810 NR Description: P0554D10.8 [Oryza sativa (japonica
  misc_feature (150)..(591): Homolog of NCBI NO: 30689779 NR Description: galactosyltransferase family [Arabidopsis
  misc_feature (142)..(591): Homolog of NCBI NO: 8809658 NR Description: gb|AAD55296.1~gene_id:MRG21.3~strong similarity
  misc_feature (150)..(591): Homolog of NCBI NO: 26451550 NR Description: unknown protein [Arabidopsis thaliana]
MKKCSGVLFILTLAVVLFLLSPSPSPTPPPNTAPNGPITDLLPTLPGLSDLYPPAPNSTAHLSWGLLRPLLCRSDALPGTSAGVLEAAEAWRNLTLAVTAAASEEEARLQGLRCSSSVGGDLRTGRATLPCGLSEGAALTVVGILREGAAKFWVEMLGANGEVVLHVNVSLGAAGVLVEQNSWTPEEGWGEWERCPPVGDVSSSNSSLQLSPVDGLVHCNEKVGARIVQESNNTVVNITGNQPEDWQSQTGHGQLSGRFSIVEGEPFTVTLWAGVEGFHMTVNGRHETSFAYRERSEPWLVAEVMFSGDLELLSFLANELPVSEDIDMENVAVLKAPPLPKKQTFLLVGVFSTGNNFKRRMALRRTWMQYEAVRSGDVVVRFFTGLHKNEQVNMELWREAQLYGDIQLMPFVDYYTLITLKTISICIFGTKIVPAKYIMKTDDDAFVRIDEVISSLKKRNSNGLLYGLISFQSSPHRDKGSKWFISRKEWPFDMYPPWAHGPGYVISRDIAKFVVQGHQELTLQLFKLEDVAMGIWIQQYKNSGQQVNIVTDDRFYNEGCEADYVLAHYQTPRLMMCLWEKLKTEYHAICCE

SEQ ID NO: 9828 - protein, 437 aa, Zea mays subsp. mays
  peptide (1)..(437): Ceres Seq. ID no. 12416079
  misc_feature (203)..(397): Pfam Name: Galactosyltransferase Pfam Description: Galactosyltransferase
  misc_feature (1)..(42): Homolog of NCBI NO: 34894810 NR Description: P0554D10.8 [Oryza sativa (japonica
  misc_feature (140)..(333): Homolog of NCBI NO: 34894810 NR Description: P0554D10.8 [Oryza sativa (japonica
  misc_feature (369)..(434): Homolog of NCBI NO: 34894810 NR Description: P0554D10.8 [Oryza sativa (japonica
  misc_feature (1)..(437): Homolog of NCBI NO: 18397574 NR Description: expressed protein; protein id: At3g06440.1, by cDNA: gi_13605628 [Arabidopsis thaliana] AT3g06440/F24P17_7 [Arabidopsis thaliana]
  misc_feature (43)..(437): Homolog of NCBI NO: 6437545 NR Description: unknown protein [Arabidopsis thaliana]
  misc_feature (1)..(436): Homolog of NCBI NO: 15223352 NR Description: hypothetical protein; protein id: At1g26810.1 thaliana] >gi|22136678|gb|AAM91658.1| unknown protein
  misc_feature (1)..(436): Homolog of NCBI NO: 34393276 NR Description: putative beta-1,3-galactosyltransferase 5 [Oryza
  misc_feature (1)..(436): Homolog of NCBI NO: 30689779 NR Description: galactosyltransferase family [Arabidopsis
  misc_feature (1)..(436): Homolog of NCBI NO: 8809658 NR Description: gb|AAD55296.1~gene_id:MRG21.3~strong similarity
  misc_feature (1)..(436): Homolog of NCBI NO: 26451550 NR Description: unknown protein [Arabidopsis thaliana]
MLGANGEVVLHVNVSLGAAGVLVEQNSWTPEEGWGEWERCPPVGDVSSSNSSLQLSPVDGLVHCNEKVGARIVQESNNTVVNITGNQPEDWQSQTGHGQLSGRFSIVEGEPFTVTLWAGVEGFHMTVNGRHETSFAYRERSEPWLVAEVMFSGDLELLSFLANELPVSEDIDMENVAVLKAPPLPKKQTFLLVGVFSTGNNFKRRMALRRTWMQYEAVRSGDVVVRFFTGLHKNEQVNMELWREAQLYGDIQLMPFVDYYTLITLKTISICIFGTKIVPAKYIMKTDDDAFVRIDEVISSLKKRNSNGLLYGLISFQSSPHRDKGSKWFISRKEWPFDMYPPWAHGPGYVISRDIAKFVVQGHQELTLQLFKLEDVAMGIWIQQYKNSGQQVNIVTDDRFYNEGCEADYVLAHYQTPRLMMCLWEKLKTEYHAICCE

SEQ ID NO: 9829 - DNA, 847 bp, Zea mays subsp. mays
  misc_feature (1)..(847): Ceres Seq. ID no. 12416837
  misc_feature: MA Experiment ID: 108515 Result: Down-regulated in Transcription
  misc_feature: MA Experiment 108515 PARAMETER Experiment Name: Zm_2mM_SA_P Parameter: Age (day) Value: 8
  misc_feature: MA Experiment 108515 PARAMETER Experiment Name: Zm_2mM_SA_P Parameter: Organism Value: Zea mays
  misc_feature: MA Experiment 108515 PARAMETER Experiment Name: Zm_2mM_SA_P Parameter: Plant Line Value: 35A19
  misc_feature: MA Experiment 108515 PARAMETER Experiment Name: Zm_2mM_SA_P Parameter: Timepoint (hr) Value: 12
  misc_feature: MA Experiment 108515 PARAMETER Experiment Name: Zm_2mM_SA_P Parameter: Tissue Value: Aerial
  misc_feature: MA Experiment 108515 PARAMETER Experiment Name: Zm_2mM_SA_P Parameter: Treatment Value: 2mM SA vs. No Treatment
  misc_feature: MA Experiment ID: 108535 Result: Up-regulated in Transcription
  misc_feature: MA Experiment 108535 PARAMETER Experiment Name: Zm_Meristem_P Parameter: Age (day) Value: 8
  misc_feature: MA Experiment 108535 PARAMETER Experiment Name: Zm_Meristem_P Parameter: Organism Value: Zea mays
  misc_feature: MA Experiment 108535 PARAMETER Experiment Name: Zm_Meristem_P Parameter: Plant Line Value: 35A19
  misc_feature: MA Experiment 108535 PARAMETER Experiment Name: Zm_Meristem_P Parameter: Tissue Value: Root Meristem vs. Above Root Meristem
  misc_feature: MA Experiment ID: 108543 Result: Up-regulated in Transcription
  misc_feature: MA Experiment ID: 108597 Result: Down-regulated in Transcription
  misc_feature: MA Experiment 108597 PARAMETER Experiment Name: Zm_100uM_ABA_P Parameter: Age (day) Value: 9
  misc_feature: MA Experiment 108597 PARAMETER Experiment Name: Zm_100uM_ABA_P Parameter: Organism Value: Zea mays
  misc_feature: MA Experiment 108597 PARAMETER Experiment Name: Zm_100uM_ABA_P Parameter: Plant Line Value: 35A19
  misc_feature: MA Experiment 108597 PARAMETER Experiment Name: Zm_100uM_ABA_P Parameter: Timepoint (hr) Value: 24
  misc_feature: MA Experiment 108597 PARAMETER Experiment Name: Zm_100uM_ABA_P Parameter: Tissue Value: Aerial
  misc_feature: MA Experiment 108597 PARAMETER Experiment Name: Zm_100uM_ABA_P Parameter: Treatment Value: 100uM ABA vs. No Treatment
  misc_feature: MA Experiment ID: 20000478 Result: Down-regulated in Transcription
  misc_feature: MA Experiment 20000478 PARAMETER Experiment Name: Zm_5mM_SA_P Parameter: Age (day) Value: 11
  misc_feature: MA Experiment 20000478 PARAMETER Experiment Name: Zm_5mM_SA_P Parameter: Organism Value: Zea mays
  misc_feature: MA Experiment 20000478 PARAMETER Experiment Name: Zm_5mM_SA_P Parameter: Plant Line Value: 35A19
  misc_feature: MA Experiment 20000478 PARAMETER Experiment Name: Zm_5mM_SA_P Parameter: Timepoint (hr) Value: 72
  misc_feature: MA Experiment 20000478 PARAMETER Experiment Name: Zm_5mM_SA_P Parameter: Tissue Value: Aerial
  misc_feature: MA Experiment 20000478 PARAMETER Experiment Name: Zm_5mM_SA_P Parameter: Treatment Value: 5mM SA vs. No Treatment
  misc_feature: MA Experiment ID: 20000480 Result: Down-regulated in Transcription
  misc_feature: MA Experiment 20000480 PARAMETER Experiment Name: Zm_Drought_P Parameter: Age (day) Value: 11
  misc_feature: MA Experiment 20000480 PARAMETER Experiment Name: Zm_Drought_P Parameter: Organism Value: Zea mays
  misc_feature: MA Experiment 20000480 PARAMETER Experiment Name: Zm_Drought_P Parameter: Plant Line Value: 35A19
  misc_feature: MA Experiment 20000480 PARAMETER Experiment Name: Zm_Drought_P Parameter: Timepoint (hr) Value: 72
  misc_feature: MA Experiment 20000480 PARAMETER Experiment Name: Zm_Drought_P Parameter: Tissue Value: Aerial
  misc_feature: MA Experiment 20000480 PARAMETER Experiment Name: Zm_Drought_P Parameter: Treatment Value: Drought vs. No Drought
  misc_feature: MA Experiment ID: 20000487 Result: Down-regulated in Transcription
  misc_feature: MA Experiment 20000487 PARAMETER Experiment Name: Zm_50mM_NH4NO3_L_to_H_P Parameter: Organism Value: Zea mays
  misc_feature: MA Experiment 20000487 PARAMETER Experiment Name: Zm_50mM_NH4NO3_L_to_H_P Parameter: Timepoint (hr) Value: 4
  misc_feature: MA Experiment 20000487 PARAMETER Experiment Name: Zm_50mM_NH4NO3_L_to_H_P Parameter: Tissue Value: Leaves
  misc_feature: MA Experiment 20000487 PARAMETER Experiment Name: Zm_50mM_NH4NO3_L_to_H_P Parameter: Treatment Value: 50mM NH4NO3 vs. 100mM Mannitol
  misc_feature: MA Experiment ID: 20000632 Result: Down-regulated in Transcription
  misc_feature: MA Experiment 20000632 PARAMETER Experiment Name: Zm_Herbicide-Treatments_P Parameter: Timepoint (hr) Value: 4
  misc_feature: MA Experiment 20000632 PARAMETER Experiment Name: Zm_Herbicide-Treatments_P Parameter: Tissue Value: Aerial
  misc_feature: MA Experiment 20000632 PARAMETER Experiment Name: Zm_Herbicide-Treatments_P Parameter: Treatment Value: Glean vs. No Treatment
  misc_feature: MA Experiment ID: 20000633 Result: Down-regulated in Transcription
  misc_feature: MA Experiment 20000633 PARAMETER Experiment Name: Zm_Herbicide-Treatments_P Parameter: Timepoint (hr) Value: 4
  misc_feature: MA Experiment 20000633 PARAMETER Experiment Name: Zm_Herbicide-Treatments_P Parameter: Tissue Value: Aerial
  misc_feature: MA Experiment 20000633 PARAMETER Experiment Name: Zm_Herbicide-Treatments_P Parameter: Treatment Value: Trimec vs. No Treatment
  misc_feature: MA Experiment ID: 20001614 Result: Up-regulated in Transcription
  misc_feature: MA Experiment 20001614 PARAMETER Experiment Name: Zm_50ppm_KNO3_L-to-H_P Parameter: Age (day) Value: 21
  misc_feature: MA Experiment 20001614 PARAMETER Experiment Name: Zm_50ppm_KNO3_L-to-H_P Parameter: Organism Value: Zea mays
  misc_feature: MA Experiment 20001614 PARAMETER Experiment Name: Zm_50ppm_KNO3_L-to-H_P Parameter: Plant Line Value: 35A19
  misc_feature: MA Experiment 20001614 PARAMETER Experiment Name: Zm_50ppm_KNO3_L-to-H_P Parameter: Timepoint (hr) Value: 48
  misc_feature: MA Experiment 20001614 PARAMETER Experiment Name: Zm_50ppm_KNO3_L-to-H_P Parameter: Tissue Value: Roots
  misc_feature: MA Experiment 20001614 PARAMETER Experiment Name: Zm_50ppm_KNO3_L-to-H_P Parameter: Treatment Value: 50ppm KNO3 vs. 50ppm KCl
atactccactccagtccccgcgctgcatccttccgcttcctctcgctccctctgctctctcgcggtcgcagtctcgcagatcccgatcgcgcaaggagccagcgtagagggtgatcgacgatggcgggcagcacgcgcgcagcgcacaaggcgttcctgctctgcaactacacgctgctgggtgcagcatcggcgtgcatcttcctcacgctctcgctccgcctcgccccgtccgcgtgcggcctgctcctcgtcttcctccacgcgctcaccgctgtcttcgccgccgcgggctgctcgggctccttcaccgacggcggcgccggggccggccgcgcgcacgccgcgcacacagcgggggccgtgctcaccgccatcttccagggcgccgccgcgctgctcgccttcacccggaccgccgacttcctagccgagctgcggtcctacgtccgggaggaggacggcgaggtcattctcaagctcatcggcgggctcggcaccgccatcttcgtgctcgagtgggccgcgctagcgctcgcattcgcgctccggcttgacgatgatggcaacgaggagattgacggtgagcactgcaagagctgggcgtcagcgtaccatgtctgattctgctctgttcagacaccggagacgcgagagatacaggcacacaaaccagaaattgggggggggggggattttctcttctattatttacagctgtggatctattccgctgttgttacttgttactgtggtcatgaaccgaagtgcaaaggcaaatgttttgctttgcaatgtattcaattcatctcttagaaattgcaataaagtacattcagtgagccgt

SEQ ID NO: 9830 - protein, 167 aa, Zea mays subsp. mays
  peptide (1)..(167): Ceres Seq. ID no. 12416838
  misc_feature (2)..(167): Homolog of NCBI NO: 34907616 NR Description: contains EST C27797(C52876)~unknown protein
  misc_feature (6)..(144): Homolog of NCBI NO: 38345379 NR Description: OSJNBa0067K08.8 [Oryza sativa (japonica
  misc_feature (1)..(153): Homolog of NCBI NO: 15239379 NR Description: putative protein; protein id: At5g36710.1 thaliana] >gi|8885623|dbj|BAA97553.1| to unknown protein [Arabidopsis thaliana]
  misc_feature (1)..(153): Homolog of NCBI NO: 15239407 NR Description: putative protein; protein id: At5g36800.1
  misc_feature (9)..(144): Homolog of NCBI NO: 15237310 NR Description: putative protein; protein id: At5g16250.1, by cDNA: 18222. [Arabidopsis thaliana] >gi|11346160|pir||T51495
  misc_feature (9)..(144): Homolog of NCBI NO: 21553926 NR Description: unknown [Arabidopsis thaliana]
  misc_feature (9)..(144): Homolog of NCBI NO: 21703131 NR Description: AT5g16250/T21H19_170 [Arabidopsis thaliana]
  misc_feature (9)..(150): Homolog of NCBI NO: 18396262 NR Description: expressed protein; protein id: At3g02640.1, by cDNA: 4861., supported by cDNA: gi_17065095 [Arabidopsis
MAGSTRAAHKAFLLCNYTLLGAASACIFLTLSLRLAPSACGLLLVFLHALTAVFAAAGCSGSFTDGGAGAGRAHAAHTAGAVLTAIFQGAAALLAFTRTADFLAELRSYVREEDGEVILKLIGGLGTAIFVLEWAALALAFALRLDDDGNEEIDGEHCKSWASAYHV

SEQ ID NO: 9831 - protein, 142 aa, Zea mays subsp. mays
  peptide (1)..(142): Ceres Seq. ID no. 12416839
  misc_feature (65)..(142): Pfam Name: Cupin Pfam Description: Cupin
  misc_feature (43)..(142): Homolog of NCBI NO: 38175466 NR Description: putative high-affinity potassium transporter
  misc_feature (65)..(142): Homolog of NCBI NO: 2429362 NR Description: proline rich protein [Santalum album]
  misc_feature (2)..(142): Homolog of NCBI NO: 11359723 NR Description: proteophosphoglycan, membrane-associated - Leishmania major (fragment) >gi|5420389|emb|CAB46680.1|
  misc_feature (6)..(142): Homolog of NCBI NO: 11359723 NR Description: proteophosphoglycan, membrane-associated - Leishmania major (fragment) >gi|5420389|emb|CAB46680.1|
  misc_feature (2)..(142): Homolog of NCBI NO: 13592175 NR Description: ppg3 [Leishmania major]
  misc_feature (2)..(142): Homolog of NCBI NO: 13592175 NR Description: ppg3 [Leishmania major]
  misc_feature (2)..(142): Homolog of NCBI NO: 13592175 NR Description: ppg3 [Leishmania major]
  misc_feature (57)..(142): Homolog of NCBI NO: 30140331 NR Description: putative arabinagalactan protein [Lotus japonicus]
  misc_feature (10)..(142): Homolog of NCBI NO: 13592175 NR Description: ppg3 [Leishmania major]
YSTPVPALHPSASSRSLCSLAVAVSQIPIAQGASVEGDRRWRAARAQRTRRSCSATTRCWVQHRRASSSRSRSASPRPRAACSSSSSTRSPLSSPPRAARAPSPTAAPGPAARTPRTQRGPCSPPSSRAPPRCSPSPGPPTS

SEQ ID NO: 9832 - protein, 96 aa, Zea mays subsp. mays
  peptide (1)..(96): Ceres Seq. ID no. 12416840
  misc_feature (1)..(11): Homolog of NCBI NO: 38175466 NR Description: putative high-affinity potassium transporter
  misc_feature (1)..(24): Homolog of NCBI NO: 11359723 NR Description: proteophosphoglycan, membrane-associated - Leishmania major (fragment) >gi|5420389|emb|CAB46680.1|
  misc_feature (1)..(24): Homolog of NCBI NO: 13592175 NR Description: ppg3 [Leishmania major]
  misc_feature (1)..(24): Homolog of NCBI NO: 13592175 NR Description: ppg3 [Leishmania major]
MMATRRLTVSTARAGRQRTMSDSALFRHRRRERYRHTNQKLGGGGIFSSIIYSCGSIPLLLLVTVVMNRSAKANVLLCNVFNSSLRNCNKVHSVSR

SEQ ID NO: 9833 - DNA, 1912 bp, Zea mays subsp. mays
  misc_feature (1)..(1912): Ceres Seq. ID no. 12374982
  misc_feature: MA Experiment ID: 20000535 Result: Up-regulated in Transcription
  misc_feature: MA Experiment 20000535 PARAMETER Experiment Name: Zm_Hybrid_Seed_Dev_P Parameter: DAP Value: 30 vs. 12
  misc_feature: MA Experiment 20000535 PARAMETER Experiment Name: Zm_Hybrid_Seed_Dev_P Parameter: Organism Value: Zea mays
  misc_feature: MA Experiment 20000535 PARAMETER Experiment Name: Zm_Hybrid_Seed_Dev_P Parameter: Plant Line Value: 35A19
  misc_feature: MA Experiment 20000535 PARAMETER Experiment Name: Zm_Hybrid_Seed_Dev_P Parameter: Tissue Value: Embryo vs. Unfert Floret
gagagaaacgcgctgcggccaccgccctccgccctccgcctaccacctcccacctctgacctcgcgtgccgagttcgggacgaagccaacgacgagctcagcggcgccggcgccgcagcgagaacacccgctccgtcgagaatacgtgtaaactaaattcaaaggcaggaatgtggcgcctctgttgctgcaattgccaggtggacgaaatagatcggcgtgagagtggtcatgtcaaggccacaaccaacaccatctgacggggtgacgaaggggttgagggatgatgctccccctatcgatgtacctgttctgtccttggatggtctgataagaaaaactggtgactttggttcaagagccttgataggtgaaggtatttatgggagactgtactatgcaactcttggtaattgaacaaaaatggcagtaaagaaacttcactctactgaaaatgaacccgctgccgagttcttggcccaggtctcgttggtttcaaggctgaaacatgaaaactttgttgacatgttggggtactatatcgagcgtgatcttcacatagtatcctacaaattcgccaccatgggttctctgcatgatcttctacatggaagaaaaggagttcaaggtgctcaagctggcccagtgcttcgttggatgcaacgagtgtgaattgctgttgatgctgcaaaagggctcgaatatcttcacgggaaagttcagccttccattgtccatagggatattagatcaagcaatatcctcttgtttgaagatgataggaatcgggcggattccctgatcgatctcaggttgtagtggtgggtgattggtggccagggtttgaggcgcgatgcacaacggcggggcgccgtgttcaccgcgcgcaagaggagagacgcgaggaaaggggcggctaggtcacagtaatcttccggctctctctggaaagccgaaacaatcttgtttctgcttaatccctatagagtggtgcttacaattatttatactcccttctagttcttatctaatgagataaatcccctattttctctctaacaaattttatctccttaatcttctaatccttatcatcttctaatccttatctgcatgcctatgctgttgcccggcgcctatagtggcggccgatcataacagaagacttcaaggcaaagatagcagacttcagtctctcaaaccagacttcatatatgtctgtccggttgcacattagctcacctcgggcctatggatatcatgccccagagtatgtaatgactggtaaactaacccagaaaagtgacgtatatagctttggaatagttcttttggagcttttgacaggtagaaagccaatagaccatacaatgcctatagatcagcacaacctgagagcttggaccacaccaatgttaactgaagagaaggtgaagcagtgtgtagatccgcgtttgatgggtgtgtatccagcaaaaggagtcgcaaagctcgctgctgtagcggctttgtgtgtgcaatctgatgctaagctccgcccaaatatgagcgttgtggttcacctatcagatttccatcactaactgcatggaggacgtcataactcattagtactgcactaataactttgcatctgcggctccacagcatgtcaacaatgttcatattcatctctcaggaaatgccagtataaggactagtgactaggtgatgaaatattgtcattagcattgagacttattgcaaagatgcggaattgtagaaaccccttcttttggtggcacaaacgctaatggaatcaccaagtggttcatacatgtccaactgttgtaatggtaattcattccgctgtgaatcggaagacaagcaaagcagaaaagcattacaacagttgaatctcaaaagacatgcg

SEQ ID NO: 9834 - protein, 122 aa, Zea mays subsp. mays
  peptide (1)..(122): Ceres Seq. ID no. 12374983
  misc_feature (1)..(115): Homolog of NCBI NO: 34907668 NR Description: putative protein kinase [Oryza sativa (japonica group)] >gi|19386705|dbj|BAB86087.1| putative protein kinase
MSVRLHISSPRAYGYHAPEYVMTGKLTQKSDVYSFGIVLLELLTGRKPIDHTMPIDQHNLRAWTTPMLTEEKVKQCVDPRLMGVYPAKGVAKLAAVAALCVQSDAKLRPNMSVVVHLSDFHH

SEQ ID NO: 9835 - protein, 101 aa, Zea mays subsp. mays
  peptide (1)..(101): Ceres Seq. ID no. 12374984
  misc_feature (1)..(94): Homolog of NCBI NO: 34907668 NR Description: putative protein kinase [Oryza sativa (japonica group)] >gi|19386705|dbj|BAB86087.1| putative protein kinase
MTGKLTQKSDVYSFGIVLLELLTGRKPIDHTMPIDQHNLRAWTTPMLTEEKVKQCVDPRLMGVYPAKGVAKLAAVAALCVQSDAKLRPNMSVVVHLSDFHH

SEQ ID NO: 9836 - protein, 82 aa, Zea mays subsp. mays
  peptide (1)..(82): Ceres Seq. ID no. 12374985
  misc_feature (1)..(82): Homolog of NCBI NO: 34907668 NR Description: putative protein kinase [Oryza sativa (japonica group)] >gi|19386705|dbj|BAB86087.1| putative protein kinase
MAVKKLHSTENEPAAEFLAQVSLVSRLKHENFVDMLGYYIERDLHIVSYKFATMGSLHDLLHGRKGVQGAQAGPVLRWMQRV

SEQ ID NO: 9837 - DNA, 1626 bp, Zea mays subsp. mays
  misc_feature (1)..(1626): Ceres Seq. ID no. 12374930
  misc_feature: MA Experiment ID: 108523 Result: Down-regulated in Transcription
  misc_feature: MA Experiment 108523 PARAMETER Experiment Name: Zm_42deg_Heat_P Parameter: Age (day) Value: 8
  misc_feature: MA Experiment 108523 PARAMETER Experiment Name: Zm_42deg_Heat_P Parameter: Organism Value: Zea mays
  misc_feature: MA Experiment 108523 PARAMETER Experiment Name: Zm_42deg_Heat_P Parameter: Plant Line Value: 35A19
  misc_feature: MA Experiment 108523 PARAMETER Experiment Name: Zm_42deg_Heat_P Parameter: Temperature (deg C) Value: 42 vs. 22
  misc_feature: MA Experiment 108523 PARAMETER Experiment Name: Zm_42deg_Heat_P Parameter: Timepoint (hr) Value: 6
  misc_feature: MA Experiment 108523 PARAMETER Experiment Name: Zm_42deg_Heat_P Parameter: Tissue Value: Aerial
  misc_feature: MA Experiment ID: 108527 Result: Down-regulated in Transcription
  misc_feature: MA Experiment 108527 PARAMETER Experiment Name: Zm_5mM_NO_P Parameter: Age (day) Value: 8
  misc_feature: MA Experiment 108527 PARAMETER Experiment Name: Zm_5mM_NO_P Parameter: Organism Value: Zea mays
  misc_feature: MA Experiment 108527 PARAMETER Experiment Name: Zm_5mM_NO_P Parameter: Plant Line Value: 35A19
  misc_feature: MA Experiment 108527 PARAMETER Experiment Name: Zm_5mM_NO_P Parameter: Timepoint (hr) Value: 6
  misc_feature: MA Experiment 108527 PARAMETER Experiment Name: Zm_5mM_NO_P Parameter: Tissue Value: Aerial
  misc_feature: MA Experiment 108527 PARAMETER Experiment Name: Zm_5mM_NO_P Parameter: Treatment Value: 5mM NO vs. No Treatment
  misc_feature: MA Experiment ID: 108532 Result: Up-regulated in Transcription
  misc_feature: MA Experiment 108532 PARAMETER Experiment Name: Zm_20uM_KNO3_H-to-L_P Parameter: Age (day) Value: 11
  misc_feature: MA Experiment 108532 PARAMETER Experiment Name: Zm_20uM_KNO3_H-to-L_P Parameter: Organism Value: Zea mays
  misc_feature: MA Experiment 108532 PARAMETER Experiment Name: Zm_20uM_KNO3_H-to-L_P Parameter: Plant Line Value: 35A19
  misc_feature: MA Experiment 108532 PARAMETER Experiment Name: Zm_20uM_KNO3_H-to-L_P Parameter: Timepoint (hr) Value: 16
  misc_feature: MA Experiment 108532 PARAMETER Experiment Name: Zm_20uM_KNO3_H-to-L_P Parameter: Tissue Value: Roots
  misc_feature: MA Experiment 108532 PARAMETER Experiment Name: Zm_20uM_KNO3_H-to-L_P Parameter: Treatment Value: 20uM KNO3 vs. 60mM KNO3
  misc_feature: MA Experiment ID: 108535 Result: Down-regulated in Transcription
  misc_feature: MA Experiment 108535 PARAMETER Experiment Name: Zm_Meristem_P Parameter: Age (day) Value: 8
  misc_feature: MA Experiment 108535 PARAMETER Experiment Name: Zm_Meristem_P Parameter: Organism Value: Zea mays
  misc_feature: MA Experiment 108535 PARAMETER Experiment Name: Zm_Meristem_P Parameter: Plant Line Value: 35A19
  misc_feature: MA Experiment 108535 PARAMETER Experiment Name: Zm_Meristem_P Parameter: Tissue Value: Root Meristem vs. Above Root Meristem
  misc_feature: MA Experiment ID: 108543 Result: Up-regulated in Transcription
  misc_feature: MA Experiment ID: 108544 Result: Up-regulated in Transcription
  misc_feature: MA Experiment ID: 108545 Result: Down-regulated in Transcription
  misc_feature: MA Experiment 108545 PARAMETER Experiment Name: Zm_Imbibed_Seeds_P Parameter: Age (day) Value: 3 vs. 2
  misc_feature: MA Experiment 108545 PARAMETER Experiment Name: Zm_Imbibed_Seeds_P Parameter: Organism Value: Zea mays
  misc_feature: MA Experiment 108545 PARAMETER Experiment Name: Zm_Imbibed_Seeds_P Parameter: Plant Line Value: 35A19
  misc_feature: MA Experiment 108545 PARAMETER Experiment Name: Zm_Imbibed_Seeds_P Parameter: Tissue Value: Aerial vs. Embryo
  misc_feature: MA Experiment ID: 108688 Result: Down-regulated in Transcription
  misc_feature: MA Experiment 108688 PARAMETER Experiment Name: Zm_Embryos-Flowers__P Parameter: Tissue Value: Immature Flowers vs. Aerial+
  misc_feature: MA Experiment ID: 20000488 Result: Down-regulated in Transcription
  misc_feature: MA Experiment 20000488 PARAMETER Experiment Name: Zm_50mM_NH4NO3_L_to_H_P Parameter: Organism Value: Zea mays
  misc_feature: MA Experiment 20000488 PARAMETER Experiment Name: Zm_50mM_NH4NO3_L_to_H_P Parameter: Timepoint (hr) Value: 8
  misc_feature: MA Experiment 20000488 PARAMETER Experiment Name: Zm_50mM_NH4NO3_L_to_H_P Parameter: Tissue Value: Leaves
  misc_feature: MA Experiment 20000488 PARAMETER Experiment Name: Zm_50mM_NH4NO3_L_to_H_P Parameter: Treatment Value: 50mM NH4NO3 vs. 100mM Mannitol
  misc_feature: MA Experiment ID: 20000534 Result: Down-regulated in Transcription
  misc_feature: MA Experiment 20000534 PARAMETER Experiment Name: Zm_Hybrid_Pollen_P Parameter: Age (day) Value: 8
  misc_feature: MA Experiment 20000534 PARAMETER Experiment Name: Zm_Hybrid_Pollen_P Parameter: Organism Value: Zea mays
  misc_feature: MA Experiment 20000534 PARAMETER Experiment Name: Zm_Hybrid_Pollen_P Parameter: Plant Line Value: 35A19
  misc_feature: MA Experiment 20000534 PARAMETER Experiment Name: Zm_Hybrid_Pollen_P Parameter: Tissue Value: Pollen vs. Aerial
ccttttttcccccaccctccttcttttccatactctactattgcatagtagccttcaacaacggtgctggtgctctgtcggtccgtctgtcgttactcacagcgcttcccggcccgccggctcttgttcttgtctctgtttgccccgtggccagctccgcctcgccgccgcagtacatgacgccggcggcgtcgcccgcgcagttcgcgccggcgcccctcaggatggggtacgggcggccggcgcccgtgacgggcatgtggagcagcgagccgttcaaggtcgacagcggcggccacgccacctgcagcgcgtccaccgtcatggaggcggacaccaagctggagacaagcaggctacaagatgatgttccacaggtagcactcgagccagagaggagtacggatcaggaaacgagcaggccgccagagagggtcatgagaaggctcgcgcagaacagagaggctgctcggaagagtcgcctgcggaaaaaggcctacatccagcagctagagacaagccggatgaagctggcccagctagagctggagcttcaacgggctcgacggcagcagggcgcgtacgcaaatgggagcatgggagactcagctctcggatacacagggtcgatcgatccaggcgtcgccgcgttcgagatcgaatacaggcactgggtggacgagcagaagcggcacacggcggagctgatgtcggcgctccaggggcatcagacgtcgacgacgtcggagctggagctccgcttgctggtggagacggggctcagcaactacgagcacctcttcaggatcaaggcggtggccgccaacgcggacgtgttccacgtcatgtcgggcgtgtggaagacccccgccgagaggttcttcctctggatcggcgggttccgcccgtcggaggtcctaaagatcctgagcccgcagctggagccgttggcggaggcgcagcgcatgctcgtgggcggcctccaggcacacgtcaacgcaggcggaggacgcgctgtcgcagggcatggagaagctacagcagaacctcgccgagatcctgaccgccgaggctgaccccttcggggcccccgacgcctacatgctgcagatggccactgcggtggagaagctgaaagagctcgtcaacttcgtcacccaggcggaccatctccggctgatgacgctgcaacagatgcacaagatcctgacgacgcggcaggcggccaggggcctgctggcgctcggcgactacttccagcgcctccgcacgctgagctcgctgtgggcggcgcgcccgcgggaggcggcgattagctagatgcccgcggtgtgggtgtggccagccaaaggcccaccaaagaacacgacgacgacgaatagtagcagttcgctgtatactttcccaagctgtaaagtccagtggaggacgaagaaatcgacctcacagtcactggggttcggttccgacgaaaggatgcaaggcttttaagtcaatggcggtgcctgcgcctgcgctgcgtttcctcgctcgtctctccgcagcagcagcagcagcagcaagcggtgtgcgtttgtcaagcgaagcgactagagaataaaacggaaatggattgaggccttctcc

SEQ ID NO: 9838 - protein, 357 aa, Zea mays subsp. mays
  peptide (1)..(357): Ceres Seq. ID no. 12374931
  misc_feature (140)..(197): Pfam Name: bZIP transcription factor Pfam Description: bZIP transcription factor
  misc_feature (75)..(328): Homolog of NCBI NO: 39545747 NR Description: OSJNBb0034I13.13 [Oryza sativa (japonica
  misc_feature (62)..(327): Homolog of NCBI NO: 7488719 NR Description: transcription factor STGA1 - soybean
  misc_feature (62)..(322): Homolog of NCBI NO: 15148922 NR Description: TGA-type basic leucine zipper protein TGA1.1
  misc_feature (68)..(328): Homolog of NCBI NO: 15238046 NR Description: bZIP transcription factor, OBF4; protein id:
  misc_feature (63)..(328): Homolog of NCBI NO: 15238367 NR Description: bZIP transcription factor, TGA1; protein id: supported by cDNA: 31032., supported by cDNA: gi_20466253 thaliana] >gi|10178183|dbj|BAB11657.1| DNA binding protein TGA1a
  misc_feature (68)..(328): Homolog of NCBI NO: 1076422 NR Description: transcription factor OBF4 - Arabidopsis thaliana
  misc_feature (63)..(328): Homolog of NCBI NO: 320563 NR Description: transcription factor tga1 - Arabidopsis thaliana
  misc_feature (86)..(328): Homolog of NCBI NO: 21592661 NR Description: DNA binding protein TGA1a homolog [Arabidopsis
  misc_feature (75)..(328): Homolog of NCBI NO: 18395068 NR Description: bZIP transcription factor, TGA3; protein id: supported by cDNA: 33016., supported by cDNA: gi_304112
  misc_feature (75)..(328): Homolog of NCBI NO: 21592831 NR Description: transcription factor [Arabidopsis thaliana]
FFPPPSFFSILYYCIVAFNNGAGALSVRLSLLTALPGPPALVLVSVCPVASSASPPQYMTPAASPAQFAPAPLRMGYGRPAPVTGMWSSEPFKVDSGGHATCSASTVMEADTKLETSRLQDDVPQVALEPERSTDQETSRPPERVMRRLAQNREAARKSRLRKKAYIQQLETSRMKLAQLELELQRARRQQGAYANGSMGDSALGYTGSIDPGVAAFEIEYRHWVDEQKRHTAELMSALQGHQTSTTSELELRLLVETGLSNYEHLFRIKAVAANADVFHVMSGVWKTPAERFFLWIGGFRPSEVLKILSPQLEPLAEAQRMLVGGLQAHVNAGGGRAVAGHGEATAEPRRDPDRRG

SEQ ID NO: 9839 - protein, 299 aa, Zea mays subsp. mays
  peptide (1)..(299): Ceres Seq. ID no. 12374932
  misc_feature (82)..(139): Pfam Name: bZIP transcription factor Pfam Description: bZIP transcription factor
  misc_feature (17)..(270): Homolog of NCBI NO: 39545747 NR Description: OSJNBb0034I13.13 [Oryza sativa (japonica
  misc_feature (4)..(269): Homolog of NCBI NO: 7488719 NR Description: transcription factor STGA1 - soybean
  misc_feature (4)..(264): Homolog of NCBI NO: 15148922 NR Description: TGA-type basic leucine zipper protein TGA1.1
  misc_feature (10)..(270): Homolog of NCBI NO: 15238046 NR Description: bZIP transcription factor, OBF4; protein id:
  misc_feature (5)..(270): Homolog of NCBI NO: 15238367 NR Description: bZIP transcription factor, TGA1; protein id: supported by cDNA: 31032., supported by cDNA: gi_20466253 thaliana] >gi|10178183|dbj|BAB11657.1| DNA binding protein TGA1a
  misc_feature (10)..(270): Homolog of NCBI NO: 1076422 NR Description: transcription factor OBF4 - Arabidopsis thaliana
  misc_feature (5)..(270): Homolog of NCBI NO: 320563 NR Description: transcription factor tga1 - Arabidopsis thaliana
  misc_feature (28)..(270): Homolog of NCBI NO: 21592661 NR Description: DNA binding protein TGA1a homolog [Arabidopsis
  misc_feature (17)..(270): Homolog of NCBI NO: 18395068 NR Description: bZIP transcription factor, TGA3; protein id: supported by cDNA: 33016., supported by cDNA: gi_304112
  misc_feature (17)..(270): Homolog of NCBI NO: 21592831 NR Description: transcription factor [Arabidopsis thaliana]
MTPAASPAQFAPAPLRMGYGRPAPVTGMWSSEPFKVDSGGHATCSASTVMEADTKLETSRLQDDVPQVALEPERSTDQETSRPPERVMRRLAQNREAARKSRLRKKAYIQQLETSRMKLAQLELELQRARRQQGAYANGSMGDSALGYTGSIDPGVAAFEIEYRHWVDEQKRHTAELMSALQGHQTSTTSELELRLLVETGLSNYEHLFRIKAVAANADVFHVMSGVWKTPAERFFLWIGGFRPSEVLKILSPQLEPLAEAQRMLVGGLQAHVNAGGGRAVAGHGEATAEPRRDPDRRG

SEQ ID NO: 9840 - protein, 283 aa, Zea mays subsp. mays
  peptide (1)..(283): Ceres Seq. ID no. 12374933
  misc_feature (66)..(123): Pfam Name: bZIP transcription factor Pfam Description: bZIP transcription factor
  misc_feature (1)..(254): Homolog of NCBI NO: 39545747 NR Description: OSJNBb0034I13.13 [Oryza sativa (japonica
  misc_feature (1)..(253): Homolog of NCBI NO: 7488719 NR Description: transcription factor STGA1 - soybean
  misc_feature (1)..(248): Homolog of NCBI NO: 15148922 NR Description: TGA-type basic leucine zipper protein TGA1.1
  misc_feature (1)..(254): Homolog of NCBI NO: 15238046 NR Description: bZIP transcription factor, OBF4; protein id:
  misc_feature (1)..(254): Homolog of NCBI NO: 15238367 NR Description: bZIP transcription factor, TGA1; protein id: supported by cDNA: 31032., supported by cDNA: gi_20466253 thaliana] >gi|10178183|dbj|BAB11657.1| DNA binding protein TGA1a
  misc_feature (1)..(254): Homolog of NCBI NO: 1076422 NR Description: transcription factor OBF4 - Arabidopsis thaliana
  misc_feature (1)..(254): Homolog of NCBI NO: 320563 NR Description: transcription factor tga1 - Arabidopsis thaliana
  misc_feature (12)..(254): Homolog of NCBI NO: 21592661 NR Description: DNA binding protein TGA1a homolog [Arabidopsis
  misc_feature (1)..(254): Homolog of NCBI NO: 18395068 NR Description: bZIP transcription factor, TGA3; protein id: supported by cDNA: 33016., supported by cDNA: gi_304112
  misc_feature (1)..(254): Homolog of NCBI NO: 21592831 NR Description: transcription factor [Arabidopsis thaliana]
MGYGRPAPVTGMWSSEPFKVDSGGHATCSASTVMEADTKLETSRLQDDVPQVALEPERSTDQETSRPPERVMRRLAQNREAARKSRLRKKAYIQQLETSRMKLAQLELELQRARRQQGAYANGSMGDSALGYTGSIDPGVAAFEIEYRHWVDEQKRHTAELMSALQGHQTSTTSELELRLLVETGLSNYEHLFRIKAVAANADVFHVMSGVWKTPAERFFLWIGGFRPSEVLKILSPQLEPLAEAQRMLVGGLQAHVNAGGGRAVAGHGEATAEPRRDPDRRG

SEQ ID NO: 9841 - DNA, 737 bp, Zea mays subsp. mays
  misc_feature (1)..(737): Ceres Seq. ID no. 12387469
  misc_feature: MA Experiment ID: 108528 Result: Up-regulated in Transcription
  misc_feature: MA Experiment 108528 PARAMETER Experiment Name: Zm_Imbibed_Seeds_P Parameter: Age (day) Value: 5 vs. 2
  misc_feature: MA Experiment 108528 PARAMETER Experiment Name: Zm_Imbibed_Seeds_P Parameter: Organism Value: Zea mays
  misc_feature: MA Experiment 108528 PARAMETER Experiment Name: Zm_Imbibed_Seeds_P Parameter: Plant Line Value: 35A19
  misc_feature: MA Experiment 108528 PARAMETER Experiment Name: Zm_Imbibed_Seeds_P Parameter: Tissue Value: Aerial vs. Embryo
  misc_feature: MA Experiment ID: 108529 Result: Down-regulated in Transcription
  misc_feature: MA Experiment 108529 PARAMETER Experiment Name: Zm_Imbibed_Seeds_P Parameter: Age (day) Value: 5 vs. 2
  misc_feature: MA Experiment 108529 PARAMETER Experiment Name: Zm_Imbibed_Seeds_P Parameter: Organism Value: Zea mays
  misc_feature: MA Experiment 108529 PARAMETER Experiment Name: Zm_Imbibed_Seeds_P Parameter: Plant Line Value: 35A19
  misc_feature: MA Experiment 108529 PARAMETER Experiment Name: Zm_Imbibed_Seeds_P Parameter: Tissue Value: Roots vs. Embryo
  misc_feature: MA Experiment ID: 108530 Result: Up-regulated in Transcription
  misc_feature: MA Experiment 108530 PARAMETER Experiment Name: Zm_Imbibed_Seeds_P Parameter: Age (day) Value: 6 vs. 2
  misc_feature: MA Experiment 108530 PARAMETER Experiment Name: Zm_Imbibed_Seeds_P Parameter: Organism Value: Zea mays
  misc_feature: MA Experiment 108530 PARAMETER Experiment Name: Zm_Imbibed_Seeds_P Parameter: Plant Line Value: 35A19
  misc_feature: MA Experiment 108530 PARAMETER Experiment Name: Zm_Imbibed_Seeds_P Parameter: Tissue Value: Aerial vs. Embryo
  misc_feature: MA Experiment ID: 108535 Result: Up-regulated in Transcription
  misc_feature: MA Experiment 108535 PARAMETER Experiment Name: Zm_Meristem_P Parameter: Age (day) Value: 8
  misc_feature: MA Experiment 108535 PARAMETER Experiment Name: Zm_Meristem_P Parameter: Organism Value: Zea mays
  misc_feature: MA Experiment 108535 PARAMETER Experiment Name: Zm_Meristem_P Parameter: Plant Line Value: 35A19
  misc_feature: MA Experiment 108535 PARAMETER Experiment Name: Zm_Meristem_P Parameter: Tissue Value: Root Meristem vs. Above Root Meristem
  misc_feature: MA Experiment ID: 108536 Result: Down-regulated in Transcription
  misc_feature: MA Experiment 108536 PARAMETER Experiment Name: Zm_Meristem_P Parameter: Age (day) Value: 8
  misc_feature: MA Experiment 108536 PARAMETER Experiment Name: Zm_Meristem_P Parameter: Organism Value: Zea mays
  misc_feature: MA Experiment 108536 PARAMETER Experiment Name: Zm_Meristem_P Parameter: Plant Line Value: 35A19
  misc_feature: MA Experiment 108536 PARAMETER Experiment Name: Zm_Meristem_P Parameter: Tissue Value: Shoot Meristem vs. Above Shoot Meristem
  misc_feature: MA Experiment ID: 108544 Result: Down-regulated in Transcription
  misc_feature: MA Experiment ID: 108545 Result: Up-regulated in Transcription
  misc_feature: MA Experiment 108545 PARAMETER Experiment Name: Zm_Imbibed_Seeds_P Parameter: Age (day) Value: 3 vs. 2
  misc_feature: MA Experiment 108545 PARAMETER Experiment Name: Zm_Imbibed_Seeds_P Parameter: Organism Value: Zea mays
  misc_feature: MA Experiment 108545 PARAMETER Experiment Name: Zm_Imbibed_Seeds_P Parameter: Plant Line Value: 35A19
  misc_feature: MA Experiment 108545 PARAMETER Experiment Name: Zm_Imbibed_Seeds_P Parameter: Tissue Value: Aerial vs. Embryo
  misc_feature: MA Experiment ID: 108546 Result: Down-regulated in Transcription
  misc_feature: MA Experiment 108546 PARAMETER Experiment Name: Zm_Imbibed_Seeds_P Parameter: Age (day) Value: 3 vs. 2
  misc_feature: MA Experiment 108546 PARAMETER Experiment Name: Zm_Imbibed_Seeds_P Parameter: Organism Value: Zea mays
  misc_feature: MA Experiment 108546 PARAMETER Experiment Name: Zm_Imbibed_Seeds_P Parameter: Plant Line Value: 35A19
  misc_feature: MA Experiment 108546 PARAMETER Experiment Name: Zm_Imbibed_Seeds_P Parameter: Tissue Value: Roots vs. Embryo
  misc_feature: MA Experiment ID: 108547 Result: Up-regulated in Transcription
  misc_feature: MA Experiment 108547 PARAMETER Experiment Name: Zm_Imbibed_Seeds_P Parameter: Age (day) Value: 4 vs. 2
  misc_feature: MA Experiment 108547 PARAMETER Experiment Name: Zm_Imbibed_Seeds_P Parameter: Organism Value: Zea mays
  misc_feature: MA Experiment 108547 PARAMETER Experiment Name: Zm_Imbibed_Seeds_P Parameter: Plant Line Value: 35A19
  misc_feature: MA Experiment 108547 PARAMETER Experiment Name: Zm_Imbibed_Seeds_P Parameter: Tissue Value: Aerial vs. Embryo
  misc_feature: MA Experiment ID: 108556 Result: Down-regulated in Transcription
  misc_feature: MA Experiment 108556 PARAMETER Experiment Name: Zm_Drought_P Parameter: Age (day) Value: 9
  misc_feature: MA Experiment 108556 PARAMETER Experiment Name: Zm_Drought_P Parameter: Organism Value: Zea mays
  misc_feature: MA Experiment 108556 PARAMETER Experiment Name: Zm_Drought_P Parameter: Plant Line Value: 35A19
  misc_feature: MA Experiment 108556 PARAMETER Experiment Name: Zm_Drought_P Parameter: Timepoint (hr) Value: 24
  misc_feature: MA Experiment 108556 PARAMETER Experiment Name: Zm_Drought_P Parameter: Tissue Value: Aerial
  misc_feature: MA Experiment 108556 PARAMETER Experiment Name: Zm_Drought_P Parameter: Treatment Value: Drought vs. No Drought
  misc_feature: MA Experiment ID: 20000626 Result: Down-regulated in Transcription
  misc_feature: MA Experiment 20000626 PARAMETER Experiment Name: Zm_Herbicide-Treatments_P Parameter: Timepoint (hr) Value: 12
  misc_feature: MA Experiment 20000626 PARAMETER Experiment Name: Zm_Herbicide-Treatments_P Parameter: Tissue Value: Aerial
  misc_feature: MA Experiment 20000626 PARAMETER Experiment Name: Zm_Herbicide-Treatments_P Parameter: Treatment Value: Roundup vs. No Treatment
attttcttgttctctactcgggaaacagacaggacagggacggaggccaaacccaacccaaagcccaagccgaagaggaaaggataggagacggatagggtacccgcgatgaggcccgccgccgccagtaccggcgggttccatctcgtgctccccgcggcgcacaggctgcctcctagtcttcctagcatcagtagccgaagaggtgtaaggatacgagcggcggcggcagcaggcggtggcggcgcgctgctggggcgtcccatggaggacgtgtacaaggtgcgcgtggagcgaggcgaggtggcgcgggcacggatggaggcgctgcgggtcatggagacgtggtcgtcgtggcgcacgggtggccggtgccggatgccgtgggactggcaggtcgaccagctcgtgtacatcgtgtccggggaggtgaaggtcatccccgccggcgctgtccacggcgacgactacatgcacttcgtggccggggatctggtcaggtacccgcgctggttcgaggccgacctctacttcgacggcccgtacgaggagcgctaccggtttctcgcctacggagacgacaactagttagtacatctgcatttcaagcagctttgcctagaccctagagtatccatctaccggcaatgcatgcgttgtaatgttcctctgtaatgtattggtgtggcgtagtcaggcaccgaaataaaccaatcattccaatgtttgcgaatttt

SEQ ID NO: 9842 - protein, 159 aa, Zea mays subsp. mays
  peptide (1)..(159): Ceres Seq. ID no. 12387470
  misc_feature (70)..(149): Pfam Name: Protein of unknown function (DUF861) Pfam Description: Protein of unknown function (DUF861)
  misc_feature (51)..(158): Homolog of NCBI NO: 15225202 NR Description: hypothetical protein; protein id: At2g32180.1
  misc_feature (51)..(158): Homolog of NCBI NO: 18403036 NR Description: expressed protein; protein id: At2g32650.1, by cDNA: 23742. [Arabidopsis thaliana] >gi|7487436|pir||T02564
  misc_feature (51)..(158): Homolog of NCBI NO: 21592432 NR Description: unknown [Arabidopsis thaliana]
MRPAAASTGGFHLVLPAAHRLPPSLPSISSRRGVRIRAAAAAGGGGALLGRPMEDVYKVRVERGEVARARMEALRVMETWSSWRTGGRCRMPWDWQVDQLVYIVSGEVKVIPAGAVHGDDYMHFVAGDLVRYPRWFEADLYFDGPYEERYRFLAYGDDN

SEQ ID NO: 9843 - protein, 107 aa, Zea mays subsp. mays
  peptide (1)..(107): Ceres Seq. ID no. 12387471
  misc_feature (18)..(97): Pfam Name: Protein of unknown function (DUF861) Pfam Description: Protein of unknown function (DUF861)
  misc_feature (1)..(106): Homolog of NCBI NO: 15225202 NR Description: hypothetical protein; protein id: At2g32180.1
  misc_feature (1)..(106): Homolog of NCBI NO: 18403036 NR Description: expressed protein; protein id: At2g32650.1, by cDNA: 23742. [Arabidopsis thaliana] >gi|7487436|pir||T02564
  misc_feature (1)..(106): Homolog of NCBI NO: 21592432 NR Description: unknown [Arabidopsis thaliana]
MEDVYKVRVERGEVARARMEALRVMETWSSWRTGGRCRMPWDWQVDQLVYIVSGEVKVIPAGAVHGDDYMHFVAGDLVRYPRWFEADLYFDGPYEERYRFLAYGDDN

SEQ ID NO: 9844 - protein, 89 aa, Zea mays subsp. mays
  peptide (1)..(89): Ceres Seq. ID no. 12387472
  misc_feature (1)..(79): Pfam Name: Protein of unknown function (DUF861) Pfam Description: Protein of unknown function (DUF861)
  misc_feature (1)..(88): Homolog of NCBI NO: 15225202 NR Description: hypothetical protein; protein id: At2g32180.1
  misc_feature (1)..(88): Homolog of NCBI NO: 18403036 NR Description: expressed protein; protein id: At2g32650.1, by cDNA: 23742. [Arabidopsis thaliana] >gi|7487436|pir||T02564
  misc_feature (1)..(88): Homolog of NCBI NO: 21592432 NR Description: unknown [Arabidopsis thaliana]
MEALRVMETWSSWRTGGRCRMPWDWQVDQLVYIVSGEVKVIPAGAVHGDDYMHFVAGDLVRYPRWFEADLYFDGPYEERYRFLAYGDDN

SEQ ID NO: 9845 - DNA, 1121 bp, Zea mays subsp. mays
  misc_feature (1)..(1121): Ceres Seq. ID no. 12367994
  misc_feature: MA Experiment ID: 108522 Result: Up-regulated in Transcription
  misc_feature: MA Experiment 108522 PARAMETER Experiment Name: Zm_42deg_Heat_P Parameter: Age (day) Value: 8
  misc_feature: MA Experiment 108522 PARAMETER Experiment Name: Zm_42deg_Heat_P Parameter: Organism Value: Zea mays
  misc_feature: MA Experiment 108522 PARAMETER Experiment Name: Zm_42deg_Heat_P Parameter: Plant Line Value: 35A19
  misc_feature: MA Experiment 108522 PARAMETER Experiment Name: Zm_42deg_Heat_P Parameter: Temperature (deg C) Value: 42 vs. 22
  misc_feature: MA Experiment 108522 PARAMETER Experiment Name: Zm_42deg_Heat_P Parameter: Timepoint (hr) Value: 1
  misc_feature: MA Experiment 108522 PARAMETER Experiment Name: Zm_42deg_Heat_P Parameter: Tissue Value: Aerial
  misc_feature: MA Experiment ID: 108523 Result: Up-regulated in Transcription
  misc_feature: MA Experiment 108523 PARAMETER Experiment Name: Zm_42deg_Heat_P Parameter: Age (day) Value: 8
  misc_feature: MA Experiment 108523 PARAMETER Experiment Name: Zm_42deg_Heat_P Parameter: Organism Value: Zea mays
  misc_feature: MA Experiment 108523 PARAMETER Experiment Name: Zm_42deg_Heat_P Parameter: Plant Line Value: 35A19
  misc_feature: MA Experiment 108523 PARAMETER Experiment Name: Zm_42deg_Heat_P Parameter: Temperature (deg C) Value: 42 vs. 22
  misc_feature: MA Experiment 108523 PARAMETER Experiment Name: Zm_42deg_Heat_P Parameter: Timepoint (hr) Value: 6
  misc_feature: MA Experiment 108523 PARAMETER Experiment Name: Zm_42deg_Heat_P Parameter: Tissue Value: Aerial
  misc_feature: MA Experiment ID: 108535 Result: Up-regulated in Transcription
  misc_feature: MA Experiment 108535 PARAMETER Experiment Name: Zm_Meristem_P Parameter: Age (day) Value: 8
  misc_feature: MA Experiment 108535 PARAMETER Experiment Name: Zm_Meristem_P Parameter: Organism Value: Zea mays
  misc_feature: MA Experiment 108535 PARAMETER Experiment Name: Zm_Meristem_P Parameter: Plant Line Value: 35A19
  misc_feature: MA Experiment 108535 PARAMETER Experiment Name: Zm_Meristem_P Parameter: Tissue Value: Root Meristem vs. Above Root Meristem
  misc_feature: MA Experiment ID: 108543 Result: Down-regulated in Transcription
  misc_feature: MA Experiment ID: 108544 Result: Down-regulated in Transcription
gcacgagaccattacctagaacatcctaatcgaaaacctcagtttacgccgcacgaaccgacgcactagaccgacccgcgaatcccccgcgcgcgcgccgtgcggtcaccgtccgaggccacggcaccgccggcccccgcccccgccccggccgccaagagcaaaggcaaggccgacgcttcctcctcgtcgtcctcctcctccactccaccgaggtcgcgccgcgcgcttgccgtcgtgatggccgcgtcgctgctcgtgctcgccgtggcgttcttggttggctctggctccggggggatcgatgggggcgcagcggctcccgtcgaggtggagggcaccgaggtggcctacggtagtgtgatcaagctgatgcacgagaagacgaagcaccgtctgcactcgcacgatgtgccctacggctcaggcagcggtcagcagtctgtcaccgggtttcctgaaggcgatgactcaaatagctactggatcataaggcccactccagattcatcgtctaagcaaggtgatgccatcgaaactggtggcatcatcaggttgcaacacatgaggacacggaggtggttgcacagtcacctgcacgcttcaccgttgtctggtaaccttgaggttagctgtttcggcggggatgaattgtcagatagtggtgaccattggaggctagaaattgaaggaagtggaaaagtatggaaaagagatcaaaaggtgcgacttagacatgttgacaccggaggttatctgcatagtcacaacaagaagtacaatcgccttggcggtgggcagcaagaggtctgcggtgtccgagagaagcgagctgagaacatttggttgacagcagagggtgtttatctcccagttaacgggagcaagtgaaaaagcactttctagcatttactatttttaatgttaatcagtataggatcagatattttgccagctttcattcgtccttgtcttaagaaaaacgaacatgggacctgaccccctagtgatatgtttaagttggaatgtttggatatcgatgatgtcgacaagaccaggacagcgcatgcttgtaattgatatttataatccatatatgaccgtgtagatacccagaggcc

SEQ ID NO: 9846 - protein, 216 aa, Zea mays subsp. mays
  peptide (1)..(216): Ceres Seq. ID no. 12367995
  misc_feature (153)..(207): Pfam Name: MIR domain Pfam Description: MIR domain
  misc_feature (1)..(215): Homolog of NCBI NO: 18400721 NR Description: expressed protein; protein id: At2g25110.1, by cDNA: 40987., supported by cDNA: gi_16209644 [Arabidopsis
  misc_feature (1)..(215): Homolog of NCBI NO: 21593658 NR Description: unknown [Arabidopsis thaliana]
  misc_feature (45)..(215): Homolog of NCBI NO: 25412278 NR Description: hypothetical protein At2g25110 [imported] -
  misc_feature (5)..(210): Homolog of NCBI NO: 24644197 NR Description: CG11999-PA [Drosophila melanogaster]
  misc_feature (36)..(216): Homolog of NCBI NO: 29840881 NR Description: similar to GenBank Accession Number AE003603
  misc_feature (36)..(210): Homolog of NCBI NO: 33416393 NR Description: Unknown (protein for MGC:66291) [Danio rerio]
  misc_feature (1)..(210): Homolog of NCBI NO: 11275391 NR Description: SDF2 like protein 1 [Mus musculus]
  misc_feature (1)..(210): Homolog of NCBI NO: 11612505 NR Description: stromal cell-derived factor 2-like 1 [Mus
  misc_feature (21)..(210): Homolog of NCBI NO: 11545743 NR Description: stromal cell-derived factor 2-like 1 [Homo
  misc_feature (21)..(210): Homolog of NCBI NO: 13623295 NR Description: stromal cell-derived factor 2-like 1 [Homo
MAASLLVLAVAFLVGSGSGGIDGGAAAPVEVEGTEVAYGSVIKLMHEKTKHRLHSHDVPYGSGSGQQSVTGFPEGDDSNSYWIIRPTPDSSSKQGDAIETGGIIRLQHMRTRRWLHSHLHASPLSGNLEVSCFGGDELSDSGDHWRLEIEGSGKVWKRDQKVRLRHVDTGGYLHSHNKKYNRLGGGQQEVCGVREKRAENIWLTAEGVYLPVNGSK

SEQ ID NO: 9847 - protein, 172 aa, Zea mays subsp. mays
  peptide (1)..(172): Ceres Seq. ID no. 12367996
  misc_feature (109)..(163): Pfam Name: MIR domain Pfam Description: MIR domain
  misc_feature (1)..(171): Homolog of NCBI NO: 18400721 NR Description: expressed protein; protein id: At2g25110.1, by cDNA: 40987., supported by cDNA: gi_16209644 [Arabidopsis
  misc_feature (1)..(171): Homolog of NCBI NO: 21593658 NR Description: unknown [Arabidopsis thaliana]
  misc_feature (1)..(171): Homolog of NCBI NO: 25412278 NR Description: hypothetical protein At2g25110 [imported] -
  misc_feature (1)..(166): Homolog of NCBI NO: 24644197 NR Description: CG11999-PA [Drosophila melanogaster]
  misc_feature (1)..(172): Homolog of NCBI NO: 29840881 NR Description: similar to GenBank Accession Number AE003603
  misc_feature (1)..(166): Homolog of NCBI NO: 33416393 NR Description: Unknown (protein for MGC:66291) [Danio rerio]
  misc_feature (1)..(166): Homolog of NCBI NO: 11275391 NR Description: SDF2 like protein 1 [Mus musculus]
  misc_feature (1)..(166): Homolog of NCBI NO: 11612505 NR Description: stromal cell-derived factor 2-like 1 [Mus
  misc_feature (1)..(166): Homolog of NCBI NO: 11545743 NR Description: stromal cell-derived factor 2-like 1 [Homo
  misc_feature (1)..(166): Homolog of NCBI NO: 13623295 NR Description: stromal cell-derived factor 2-like 1 [Homo
MHEKTKHRLHSHDVPYGSGSGQQSVTGFPEGDDSNSYWIIRPTPDSSSKQGDAIETGGIIRLQHMRTRRWLHSHLHASPLSGNLEVSCFGGDELSDSGDHWRLEIEGSGKVWKRDQKVRLRHVDTGGYLHSHNKKYNRLGGGQQEVCGVREKRAENIWLTAEGVYLPVNGSK

SEQ ID NO: 9848 - protein, 108 aa, Zea mays subsp. mays
  peptide (1)..(108): Ceres Seq. ID no. 12367997
  misc_feature (45)..(99): Pfam Name: MIR domain Pfam Description: MIR domain
  misc_feature (1)..(107): Homolog of NCBI NO: 18400721 NR Description: expressed protein; protein id: At2g25110.1, by cDNA: 40987., supported by cDNA: gi_16209644 [Arabidopsis
  misc_feature (1)..(107): Homolog of NCBI NO: 21593658 NR Description: unknown [Arabidopsis thaliana]
  misc_feature (1)..(107): Homolog of NCBI NO: 25412278 NR Description: hypothetical protein At2g25110 [imported] -
  misc_feature (1)..(102): Homolog of NCBI NO: 24644197 NR Description: CG11999-PA [Drosophila melanogaster]
  misc_feature (1)..(108): Homolog of NCBI NO: 29840881 NR Description: similar to GenBank Accession Number AE003603
  misc_feature (1)..(102): Homolog of NCBI NO: 33416393 NR Description: Unknown (protein for MGC:66291) [Danio rerio]
  misc_feature (1)..(102): Homolog of NCBI NO: 11275391 NR Description: SDF2 like protein 1 [Mus musculus]
  misc_feature (1)..(102): Homolog of NCBI NO: 11612505 NR Description: stromal cell-derived factor 2-like 1 [Mus
  misc_feature (1)..(102): Homolog of NCBI NO: 11545743 NR Description: stromal cell-derived factor 2-like 1 [Homo
  misc_feature (1)..(102): Homolog of NCBI NO: 13623295 NR Description: stromal cell-derived factor 2-like 1 [Homo
MRTRRWLHSHLHASPLSGNLEVSCFGGDELSDSGDHWRLEIEGSGKVWKRDQKVRLRHVDTGGYLHSHNKKYNRLGGGQQEVCGVREKRAENIWLTAEGVYLPVNGSK

SEQ ID NO: 9849 - DNA, 1135 bp, Zea mays subsp. mays
  misc_feature (1)..(1135): Ceres Seq. ID no. 13496182
  misc_feature: MA Experiment ID: 108535 Result: Down-regulated in Transcription
  misc_feature: MA Experiment 108535 PARAMETER Experiment Name: Zm_Meristem_P Parameter: Age (day) Value: 8
  misc_feature: MA Experiment 108535 PARAMETER Experiment Name: Zm_Meristem_P Parameter: Organism Value: Zea mays
  misc_feature: MA Experiment 108535 PARAMETER Experiment Name: Zm_Meristem_P Parameter: Plant Line Value: 35A19
  misc_feature: MA Experiment 108535 PARAMETER Experiment Name: Zm_Meristem_P Parameter: Tissue Value: Root Meristem vs. Above Root Meristem
  misc_feature: MA Experiment ID: 108540 Result: Down-regulated in Transcription
  misc_feature: MA Experiment 108540 PARAMETER Experiment Name: Zm_20percent_PEG_P Parameter: Age (day) Value: 8
  misc_feature: MA Experiment 108540 PARAMETER Experiment Name: Zm_20percent_PEG_P Parameter: Organism Value: Zea mays
  misc_feature: MA Experiment 108540 PARAMETER Experiment Name: Zm_20percent_PEG_P Parameter: Plant Line Value: 35A19
  misc_feature: MA Experiment 108540 PARAMETER Experiment Name: Zm_20percent_PEG_P Parameter: Timepoint (hr) Value: 6
  misc_feature: MA Experiment 108540 PARAMETER Experiment Name: Zm_20percent_PEG_P Parameter: Tissue Value: Aerial
  misc_feature: MA Experiment 108540 PARAMETER Experiment Name: Zm_20percent_PEG_P Parameter: Treatment Value: 20percent PEG vs. No Treatment
  misc_feature: MA Experiment ID: 108543 Result: Up-regulated in Transcription
  misc_feature: MA Experiment ID: 108556 Result: Down-regulated in Transcription
  misc_feature: MA Experiment 108556 PARAMETER Experiment Name: Zm_Drought_P Parameter: Age (day) Value: 9
  misc_feature: MA Experiment 108556 PARAMETER Experiment Name: Zm_Drought_P Parameter: Organism Value: Zea mays
  misc_feature: MA Experiment 108556 PARAMETER Experiment Name: Zm_Drought_P Parameter: Plant Line Value: 35A19
  misc_feature: MA Experiment 108556 PARAMETER Experiment Name: Zm_Drought_P Parameter: Timepoint (hr) Value: 24
  misc_feature: MA Experiment 108556 PARAMETER Experiment Name: Zm_Drought_P Parameter: Tissue Value: Aerial
  misc_feature: MA Experiment 108556 PARAMETER Experiment Name: Zm_Drought_P Parameter: Treatment Value: Drought vs. No Drought
  misc_feature: MA Experiment ID: 20000477 Result: Down-regulated in Transcription
  misc_feature: MA Experiment 20000477 PARAMETER Experiment Name: Zm_5mM_SA_P Parameter: Age (day) Value: 10
  misc_feature: MA Experiment 20000477 PARAMETER Experiment Name: Zm_5mM_SA_P Parameter: Organism Value: Zea mays
  misc_feature: MA Experiment 20000477 PARAMETER Experiment Name: Zm_5mM_SA_P Parameter: Plant Line Value: 35A19
  misc_feature: MA Experiment 20000477 PARAMETER Experiment Name: Zm_5mM_SA_P Parameter: Timepoint (hr) Value: 48
  misc_feature: MA Experiment 20000477 PARAMETER Experiment Name: Zm_5mM_SA_P Parameter: Tissue Value: Aerial
  misc_feature: MA Experiment 20000477 PARAMETER Experiment Name: Zm_5mM_SA_P Parameter: Treatment Value: 5mM SA vs. No Treatment
  misc_feature: MA Experiment ID: 20000492 Result: Up-regulated in Transcription
  misc_feature: MA Experiment 20000492 PARAMETER Experiment Name: Zm_Hybrid_Seed_Dev_P Parameter: DAP Value: 12
  misc_feature: MA Experiment 20000492 PARAMETER Experiment Name: Zm_Hybrid_Seed_Dev_P Parameter: Organism Value: Zea mays
  misc_feature: MA Experiment 20000492 PARAMETER Experiment Name: Zm_Hybrid_Seed_Dev_P Parameter: Plant Line Value: 35A19
  misc_feature: MA Experiment 20000492 PARAMETER Experiment Name: Zm_Hybrid_Seed_Dev_P Parameter: Tissue Value: Fert Kernel vs. Unfert Floret
gtacgacaggctgtaccgaggttcagttcggtagtgtagttgtaggttgcgatcgcgaggcggctgctggcggcggtcgccatagtagtcgtggccgccgcgctcgcgtgcggcgcgggcgcgcagctctcggcggggttctactcgtcgagctgccccgccgtgcacagcatcgtgcgccaggccatgtcgcaggccgtcacgaacaacacgcgcagcgccgccgccgtgctccgcgtcttcttccacgactgcttcgtcaatggctgcgacgcctcgctgctgctggacgacacgcccacgacgcccggcgagaagggcgccggccccaacgccggcggctccaccgtcggcttcgacctcatcgacaccatcaaggcgcaggtcgaggccgcctgccccgccaccgtctcctgcgccgacatcctggcgctcaccgcgcgcgacggcgtcaacctgctcggcggcccgagctgggccgtgccgctgggccggcgcgacgcgacgttccccaacagcacgggcgcggcgacggacctcccgggcccggactccgacctggccggcctggtggccgggttcgccgccaagggcctgagcccgcgcgacctcgcggcgctgtcgggcgcgcacacggtggggatggcgcgctgcgccagcttccgcacccgcgtctactgcgacgacaacgtgagcccggcgttcgccgcgcagcagcgccaggcctgcccgtcggccgacgccgacgacgcgctcgcgccgctcgactcgctcacccccgaccagttcgacaacggctactaccggagcctcatggccggcgccggcctgctgcactcggaccaggagctcttcagcaacggcgcactcgactcgctcgtgcgcctctacggcaccaacgccgacgccttctcgtcggacttcgccgcgtccatggtcaagctcggcaacatcggcccgctcacgggttccgcgggggaggtcaggctcaactgcaggacggtgaattcgaattcgtgacttcaggacggtgaatgccaccatttttaattctttttccctacaaggagttgtagaatttgcattccttcaacgatttcgaatttcgaatttgctgtgagtcagctgaagtggc

SEQ ID NO: 9850 - protein, 343 aa, Zea mays subsp. mays
  peptide (1)..(343): Ceres Seq. ID no. 13496183
  misc_feature (10)..(299): Homolog of NCBI NO: 23018055 NR Description: hypothetical protein [Thermobifida fusca]
TTGCTEVQFGSVVVGCDREAAAGGGRHSSRGRRARVRRGRAALGGVLLVELPRRAQHRAPGHVAGRHEQHAQRRRRAPRLLPRLLRQWLRRLAAAGRHAHDARREGRRPQRRRLHRRLRPHRHHQGAGRGRLPRHRLLRRHPGAHRARRRQPARRPELGRAAGPARRDVPQQHGRGDGPPGPGLRPGRPGGRVRRQGPEPARPRGAVGRAHGGDGALRQLPHPRLLRRQREPGVRRAAAPGLPVGRRRRRARAARLAHPRPVRQRLLPEPHGRRRPAALGPGALQQRRTRLARAPLRHQRRRLLVGLRRVHGQARQHRPAHGFRGGGQAQLQDGEFEFVTSGR

SEQ ID NO: 9851 - protein, 277 aa, Zea mays subsp. mays
  peptide (1)..(277): Ceres Seq. ID no. 13496184
  misc_feature (1)..(238): Pfam Name: Peroxidase Pfam Description: Peroxidase
  misc_feature (1)..(274): Homolog of NCBI NO: 577503 NR Description: cationic peroxidase
  misc_feature (1)..(274): Homolog of NCBI NO: 5453379 NR Description: bacterial-induced peroxidase precursor [Gossypium
  misc_feature (1)..(274): Homolog of NCBI NO: 7433049 NR Description: peroxidase (EC 1.11.1.7) - flax (fragment)
  misc_feature (1)..(276): Homolog of NCBI NO: 34903770 NR Description: unnamed protein product [Oryza sativa (japonica group)] >gi|7340877|dbj|BAA92967.1| unnamed protein product
  misc_feature (1)..(274): Homolog of NCBI NO: 7433047 NR Description: probable peroxidase (EC 1.11.1.7) (clone PC23) - (fragment) >gi|1781332|emb|CAA71493.1| peroxidase [Spinacia
  misc_feature (1)..(274): Homolog of NCBI NO: 2117619 NR Description: peroxidase (EC 1.11.1.7) 4 precursor - wheat
  misc_feature (1)..(274): Homolog of NCBI NO: 4760704 NR Description: peroxidase 3 [Scutellaria baicalensis]
  misc_feature (1)..(274): Homolog of NCBI NO: 7433048 NR Description: probable peroxidase (EC 1.11.1.7) (clone PC44) -
  misc_feature (1)..(274): Homolog of NCBI NO: 5381253 NR Description: peroxidase [Nicotiana tabacum]
  misc_feature (1)..(274): Homolog of NCBI NO: 34393249 NR Description: putative peroxidase precursor [Oryza sativa
MSQAVTNNTRSAAAVLRVFFHDCFVNGCDASLLLDDTPTTPGEKGAGPNAGGSTVGFDLIDTIKAQVEAACPATVSCADILALTARDGVNLLGGPSWAVPLGRRDATFPNSTGAATDLPGPDSDLAGLVAGFAAKGLSPRDLAALSGAHTVGMARCASFRTRVYCDDNVSPAFAAQQRQACPSADADDALAPLDSLTPDQFDNGYYRSLMAGAGLLHSDQELFSNGALDSLVRLYGTNADAFSSDFAASMVKLGNIGPLTGSAGEVRLNCRTVNSNS

SEQ ID NO: 9852 - DNA, 1391 bp, Zea mays subsp. mays
  misc_feature (1)..(1391): Ceres Seq. ID no. 13504058
  misc_feature: MA Experiment ID: 108535 Result: Up-regulated in Transcription
  misc_feature: MA Experiment 108535 PARAMETER Experiment Name: Zm_Meristem_P Parameter: Age (day) Value: 8
  misc_feature: MA Experiment 108535 PARAMETER Experiment Name: Zm_Meristem_P Parameter: Organism Value: Zea mays
  misc_feature: MA Experiment 108535 PARAMETER Experiment Name: Zm_Meristem_P Parameter: Plant Line Value: 35A19
  misc_feature: MA Experiment 108535 PARAMETER Experiment Name: Zm_Meristem_P Parameter: Tissue Value: Root Meristem vs. Above Root Meristem
  misc_feature: MA Experiment ID: 20000535 Result: Up-regulated in Transcription
  misc_feature: MA Experiment 20000535 PARAMETER Experiment Name: Zm_Hybrid_Seed_Dev_P Parameter: DAP Value: 30 vs. 12
  misc_feature: MA Experiment 20000535 PARAMETER Experiment Name: Zm_Hybrid_Seed_Dev_P Parameter: Organism Value: Zea mays
  misc_feature: MA Experiment 20000535 PARAMETER Experiment Name: Zm_Hybrid_Seed_Dev_P Parameter: Plant Line Value: 35A19
  misc_feature: MA Experiment 20000535 PARAMETER Experiment Name: Zm_Hybrid_Seed_Dev_P Parameter: Tissue Value: Embryo vs. Unfert Floret
agcgcagggtcaggagaggcagaggcctcagagatacgccgggacgcaacacgtcgtgccgcgcggagggttttgccgagattttccctcaaaagggtattgccacccgcaccgagaaaagaaaacgatacacaccgagataaaaacataccctctccatcctctcctcttcttcctcctcccgtagcggcttcccccgatttgcatccgggcgcggccccatccccacctggccgccgcgcgccgccatggacggcctgcacggtacggacgcatgcttctcccccgcgagggctatctcgccgcaggtgaggccccccgggccgccggacgtaggcagtcagtacctggcggagctgctgcaggagcaccagaagctggggcccttcatgcaggtgctcccaatctgcagcaggctgctgaatcaagaaatagtgcgggtgtcgaatatacggcgccaacatggtgttgctggcgactttgagaggtttccagccgcaagccccaaccagatgcatccggcaccccccatgacaaacttttgtggaaacggttttagtccatggaatgggatgcattcagagagagtaggtgttccgcaaggagctatgggttggcaaggacccccacagagcccctcttcttatattgtcaagaagattttgcggttggaagtaccgacagaagcataccctaatttcaattttatcggccgtcttcttggaccaaggggaaactctttaaagatgattgaagcctccacaggctgtcgtgttttcatcagagggaaaggctcaattaaagattctggcaaggaggaacaactcaagggaagacctggctatgaacacttgagtgaacccctccatatcttgattgaagctgagttacctgctaatgtgattgatgcaagacttgcaaaggcacaagagatccttgaagagctgttgaaaccagtggacgaatcacaagactactacaagagacagcaactgcgagaacttgcaatgctaaattcgccactccgagaggagagtccacatccaggtggtgctcctcctagtcccttcagtaacggcggcatgaaaagagtgaaacaatgacaccgccgaggctcgttcctccatcttgactccccagcaaccccaatgcagtccataccttcacaccctatttttcaatgagcaagctttcatgacggtgttggtagtgtgtgacattcttcactgtactagcaggtgaattttgatctcccatcccatgttacattaaccttgagtgacagatgactatgcgtagtgtatcctctatggcagtataactagaacatttgatttatttgttactggtaatgctgagatatagtactgtgcagattntgagttacggtg

SEQ ID NO: 9853 - protein, 284 aa, Zea mays subsp. mays
  peptide (1)..(284): Ceres Seq. ID no. 13504059
  misc_feature (140)..(193): Pfam Name: KH domain Pfam Description: KH domain
  misc_feature (140)..(193): Pfam Name: KH domain Pfam Description: KH domain
  misc_feature (1)..(284): Homolog of NCBI NO: 34909270 NR Description: P0454H12.18 [Oryza sativa (japonica
  misc_feature (3)..(284): Homolog of NCBI NO: 34900448 NR Description: contains EST C27129(C51039)~similar to
  misc_feature (1)..(283): Homolog of NCBI NO: 12322716 NR Description: unknown protein; 28504-31237 [Arabidopsis
  misc_feature (1)..(283): Homolog of NCBI NO: 30680583 NR Description: KH domain protein [Arabidopsis thaliana]
  misc_feature (1)..(283): Homolog of NCBI NO: 40645104 NR Description: hypothetical protein [Nicotiana tabacum]
  misc_feature (3)..(284): Homolog of NCBI NO: 34900448 NR Description: contains EST C27129(C51039)~similar to
  misc_feature (1)..(283): Homolog of NCBI NO: 30680583 NR Description: KH domain protein [Arabidopsis thaliana]
  misc_feature (1)..(283): Homolog of NCBI NO: 15236738 NR Description: KH domain protein [Arabidopsis thaliana]
  misc_feature (61)..(283): Homolog of NCBI NO: 34907446 NR Description: P0434C04.5 [Oryza sativa (japonica
  misc_feature (18)..(283): Homolog of NCBI NO: 22329449 NR Description: KH domain quaking protein, putative [Arabidopsis >gi|26452384|dbj|BAC43277.1| putative elongation factor
  misc_feature (18)..(283): Homolog of NCBI NO: 16930473 NR Description: At1g09660/F21M12_5 [Arabidopsis thaliana]
  misc_feature (1)..(283): Homolog of NCBI NO: 15224909 NR Description: KH domain protein [Arabidopsis thaliana]
  misc_feature (1)..(283): Homolog of NCBI NO: 40645104 NR Description: hypothetical protein [Nicotiana tabacum]
  misc_feature (1)..(283): Homolog of NCBI NO: 12322716 NR Description: unknown protein; 28504-31237 [Arabidopsis
  misc_feature (1)..(284): Homolog of NCBI NO: 34909270 NR Description: P0454H12.18 [Oryza sativa (japonica
  misc_feature (1)..(283): Homolog of NCBI NO: 15224909 NR Description: KH domain protein [Arabidopsis thaliana]
  misc_feature (18)..(283): Homolog of NCBI NO: 16930473 NR Description: At1g09660/F21M12_5 [Arabidopsis thaliana]
  misc_feature (18)..(283): Homolog of NCBI NO: 22329449 NR Description: KH domain quaking protein, putative [Arabidopsis >gi|26452384|dbj|BAC43277.1| putative elongation factor
  misc_feature (61)..(283): Homolog of NCBI NO: 34907446 NR Description: P0434C04.5 [Oryza sativa (japonica
  misc_feature (1)..(283): Homolog of NCBI NO: 15236738 NR Description: KH domain protein [Arabidopsis thaliana]
MDGLHGTDACFSPARAISPQVRPPGPPDVGSQYLAELLQEHQKLGPFMQVLPICSRLLNQEIVRVSNIRRQHGVAGDFERFPAASPNQMHPAPPMTNFCGNGFSPWNGMHSERVGVPQGAMGWQGPPQSPSSYIVKKILRLEVPTEAYPNFNFIGRLLGPRGNSLKMIEASTGCRVFIRGKGSIKDSGKEEQLKGRPGYEHLSEPLHILIEAELPANVIDARLAKAQEILEELLKPVDESQDYYKRQQLRELAMLNSPLREESPHPGGAPPSPFSNGGMKRVKQ

SEQ ID NO: 9854 - protein, 237 aa, Zea mays subsp. mays
  peptide (1)..(237): Ceres Seq. ID no. 13504060
  misc_feature (93)..(146): Pfam Name: KH domain Pfam Description: KH domain
  misc_feature (93)..(146): Pfam Name: KH domain Pfam Description: KH domain
  misc_feature (1)..(237): Homolog of NCBI NO: 34909270 NR Description: P0454H12.18 [Oryza sativa (japonica
  misc_feature (1)..(237): Homolog of NCBI NO: 34900448 NR Description: contains EST C27129(C51039)~similar to
  misc_feature (1)..(236): Homolog of NCBI NO: 12322716 NR Description: unknown protein; 28504-31237 [Arabidopsis
  misc_feature (1)..(236): Homolog of NCBI NO: 30680583 NR Description: KH domain protein [Arabidopsis thaliana]
  misc_feature (1)..(236): Homolog of NCBI NO: 40645104 NR Description: hypothetical protein [Nicotiana tabacum]
  misc_feature (1)..(237): Homolog of NCBI NO: 34900448 NR Description: contains EST C27129(C51039)~similar to
  misc_feature (1)..(236): Homolog of NCBI NO: 30680583 NR Description: KH domain protein [Arabidopsis thaliana]
  misc_feature (1)..(236): Homolog of NCBI NO: 15236738 NR Description: KH domain protein [Arabidopsis thaliana]
  misc_feature (14)..(236): Homolog of NCBI NO: 34907446 NR Description: P0434C04.5 [Oryza sativa (japonica
  misc_feature (1)..(236): Homolog of NCBI NO: 22329449 NR Description: KH domain quaking protein, putative [Arabidopsis >gi|26452384|dbj|BAC43277.1| putative elongation factor
  misc_feature (1)..(236): Homolog of NCBI NO: 16930473 NR Description: At1g09660/F21M12_5 [Arabidopsis thaliana]
  misc_feature (1)..(236): Homolog of NCBI NO: 15224909 NR Description: KH domain protein [Arabidopsis thaliana]
  misc_feature (1)..(236): Homolog of NCBI NO: 40645104 NR Description: hypothetical protein [Nicotiana tabacum]
  misc_feature (1)..(236): Homolog of NCBI NO: 12322716 NR Description: unknown protein; 28504-31237 [Arabidopsis
  misc_feature (1)..(237): Homolog of NCBI NO: 34909270 NR Description: P0454H12.18 [Oryza sativa (japonica
  misc_feature (1)..(236): Homolog of NCBI NO: 15224909 NR Description: KH domain protein [Arabidopsis thaliana]
  misc_feature (1)..(236): Homolog of NCBI NO: 16930473 NR Description: At1g09660/F21M12_5 [Arabidopsis thaliana]
  misc_feature (1)..(236): Homolog of NCBI NO: 22329449 NR Description: KH domain quaking protein, putative [Arabidopsis >gi|26452384|dbj|BAC43277.1| putative elongation factor
  misc_feature (14)..(236): Homolog of NCBI NO: 34907446 NR Description: P0434C04.5 [Oryza sativa (japonica
  misc_feature (1)..(236): Homolog of NCBI NO: 15236738 NR Description: KH domain protein [Arabidopsis thaliana]
MQVLPICSRLLNQEIVRVSNIRRQHGVAGDFERFPAASPNQMHPAPPMTNFCGNGFSPWNGMHSERVGVPQGAMGWQGPPQSPSSYIVKKILRLEVPTEAYPNFNFIGRLLGPRGNSLKMIEASTGCRVFIRGKGSIKDSGKEEQLKGRPGYEHLSEPLHILIEAELPANVIDARLAKAQEILEELLKPVDESQDYYKRQQLRELAMLNSPLREESPHPGGAPPSPFSNGGMKRVKQ

SEQ ID NO: 9855 - protein, 196 aa, Zea mays subsp. mays
  peptide (1)..(196): Ceres Seq. ID no. 13504061
  misc_feature (52)..(105): Pfam Name: KH domain Pfam Description: KH domain
  misc_feature (52)..(105): Pfam Name: KH domain Pfam Description: KH domain
  misc_feature (1)..(196): Homolog of NCBI NO: 34909270 NR Description: P0454H12.18 [Oryza sativa (japonica
  misc_feature (1)..(196): Homolog of NCBI NO: 34900448 NR Description: contains EST C27129(C51039)~similar to
  misc_feature (1)..(195): Homolog of NCBI NO: 12322716 NR Description: unknown protein; 28504-31237 [Arabidopsis
  misc_feature (1)..(195): Homolog of NCBI NO: 30680583 NR Description: KH domain protein [Arabidopsis thaliana]
  misc_feature (1)..(195): Homolog of NCBI NO: 40645104 NR Description: hypothetical protein [Nicotiana tabacum]
  misc_feature (1)..(196): Homolog of NCBI NO: 34900448 NR Description: contains EST C27129(C51039)~similar to
  misc_feature (1)..(195): Homolog of NCBI NO: 30680583 NR Description: KH domain protein [Arabidopsis thaliana]
  misc_feature (1)..(195): Homolog of NCBI NO: 15236738 NR Description: KH domain protein [Arabidopsis thaliana]
  misc_feature (1)..(195): Homolog of NCBI NO: 34907446 NR Description: P0434C04.5 [Oryza sativa (japonica
  misc_feature (1)..(195): Homolog of NCBI NO: 22329449 NR Description: KH domain quaking protein, putative [Arabidopsis >gi|26452384|dbj|BAC43277.1| putative elongation factor
  misc_feature (1)..(195): Homolog of NCBI NO: 16930473 NR Description: At1g09660/F21M12_5 [Arabidopsis thaliana]
  misc_feature (1)..(195): Homolog of NCBI NO: 15224909 NR Description: KH domain protein [Arabidopsis thaliana]
  misc_feature (1)..(195): Homolog of NCBI NO: 40645104 NR Description: hypothetical protein [Nicotiana tabacum]
  misc_feature (1)..(195): Homolog of NCBI NO: 12322716 NR Description: unknown protein; 28504-31237 [Arabidopsis
  misc_feature (1)..(196): Homolog of NCBI NO: 34909270 NR Description: P0454H12.18 [Oryza sativa (japonica
  misc_feature (1)..(195): Homolog of NCBI NO: 15224909 NR Description: KH domain protein [Arabidopsis thaliana]
  misc_feature (1)..(195): Homolog of NCBI NO: 16930473 NR Description: At1g09660/F21M12_5 [Arabidopsis thaliana]
  misc_feature (1)..(195): Homolog of NCBI NO: 22329449 NR Description: KH domain quaking protein, putative [Arabidopsis >gi|26452384|dbj|BAC43277.1| putative elongation factor
  misc_feature (1)..(195): Homolog of NCBI NO: 34907446 NR Description: P0434C04.5 [Oryza sativa (japonica
  misc_feature (1)..(195): Homolog of NCBI NO: 15236738 NR Description: KH domain protein [Arabidopsis thaliana]
MHPAPPMTNFCGNGFSPWNGMHSERVGVPQGAMGWQGPPQSPSSYIVKKILRLEVPTEAYPNFNFIGRLLGPRGNSLKMIEASTGCRVFIRGKGSIKDSGKEEQLKGRPGYEHLSEPLHILIEAELPANVIDARLAKAQEILEELLKPVDESQDYYKRQQLRELAMLNSPLREESPHPGGAPPSPFSNGGMKRVKQ

SEQ ID NO: 9856 - DNA, 1365 bp, Zea mays subsp. mays
  misc_feature (1)..(1365): Ceres Seq. ID no. 12374978
  misc_feature: MA Experiment ID: 108544 Result: Down-regulated in Transcription
  misc_feature: MA Experiment ID: 108556 Result: Down-regulated in Transcription
  misc_feature: MA Experiment 108556 PARAMETER Experiment Name: Zm_Drought_P Parameter: Age (day) Value: 9
  misc_feature: MA Experiment 108556 PARAMETER Experiment Name: Zm_Drought_P Parameter: Organism Value: Zea mays
  misc_feature: MA Experiment 108556 PARAMETER Experiment Name: Zm_Drought_P Parameter: Plant Line Value: 35A19
  misc_feature: MA Experiment 108556 PARAMETER Experiment Name: Zm_Drought_P Parameter: Timepoint (hr) Value: 24
  misc_feature: MA Experiment 108556 PARAMETER Experiment Name: Zm_Drought_P Parameter: Tissue Value: Aerial
  misc_feature: MA Experiment 108556 PARAMETER Experiment Name: Zm_Drought_P Parameter: Treatment Value: Drought vs. No Drought
  misc_feature: MA Experiment ID: 20000478 Result: Down-regulated in Transcription
  misc_feature: MA Experiment 20000478 PARAMETER Experiment Name: Zm_5mM_SA_P Parameter: Age (day) Value: 11
  misc_feature: MA Experiment 20000478 PARAMETER Experiment Name: Zm_5mM_SA_P Parameter: Organism Value: Zea mays
  misc_feature: MA Experiment 20000478 PARAMETER Experiment Name: Zm_5mM_SA_P Parameter: Plant Line Value: 35A19
  misc_feature: MA Experiment 20000478 PARAMETER Experiment Name: Zm_5mM_SA_P Parameter: Timepoint (hr) Value: 72
  misc_feature: MA Experiment 20000478 PARAMETER Experiment Name: Zm_5mM_SA_P Parameter: Tissue Value: Aerial
  misc_feature: MA Experiment 20000478 PARAMETER Experiment Name: Zm_5mM_SA_P Parameter: Treatment Value: 5mM SA vs. No Treatment
  misc_feature: MA Experiment ID: 20000480 Result: Down-regulated in Transcription
  misc_feature: MA Experiment 20000480 PARAMETER Experiment Name: Zm_Drought_P Parameter: Age (day) Value: 11
  misc_feature: MA Experiment 20000480 PARAMETER Experiment Name: Zm_Drought_P Parameter: Organism Value: Zea mays
  misc_feature: MA Experiment 20000480 PARAMETER Experiment Name: Zm_Drought_P Parameter: Plant Line Value: 35A19
  misc_feature: MA Experiment 20000480 PARAMETER Experiment Name: Zm_Drought_P Parameter: Timepoint (hr) Value: 72
  misc_feature: MA Experiment 20000480 PARAMETER Experiment Name: Zm_Drought_P Parameter: Tissue Value: Aerial
  misc_feature: MA Experiment 20000480 PARAMETER Experiment Name: Zm_Drought_P Parameter: Treatment Value: Drought vs. No Drought
aacagtggtacttgaagtcgaaggcagcgcagcaggtacgccaggacgccattagcagcggttggccaccacccgacgccggaggcccggaggaggaggcggcgatggcggggaagcacgggcgcaacggcttcgacgacgacaacgtcaaccctttcgcgggaggaagtgttccacctgccaccaattctcgtctctcacctctatcacatgaaccggctgatttctacaatgtggacattcctctcgactcatcaaaggatctgaagaaaaaggagaaagaactccaggctatggaggctgagctaaacaaaagagaacgggaattgaaaaggaaggaagaggcggcatcccgagctggcgttgtgatagaagagaaaaactggcctccctttttccccctcatccaccacgacatttccaatgaaatacctatccatctacaaaggatgcagtaccttgcattctcatcattcttgggattgatagcgtgtctcttttggaatgtcatagcaactacaacagcatggattaaaggggaaggtgttatgatctggctgcttgccattatctacttcatatctggtgcgcctggggcttatgtgctatggtatcgacctctttataatgcaatgagaactgagagcgctttgaagtttgggtggtttttcctattttacatgattcatataatcttctgtgtgtgggcagctgtggctcctccatttcctttcaaaggaaaatctttggctgggattttaccagcaattgatgtcataagcaagaatgctattgttgggatattttacttcgttggatttggcttgttctgccttgaatcacttctgagcatcggtgtcattcagcaagtctacatgtatttccgtggaagtggaaaaagctgcagagatgaaacgtgaggcagcacgtagtgctctaagttcagccttctgatgaacatagggcggtctgattagagcagtagatggataagggaagggaacgagatgtgccaattaagccacgcggtcttgtacatcactgcagtacgtggatttggatcgctgaaagcgtacagctgatcgtctttttgctcttctgtaaaatatgaacaatcatcatatggtccggatgcgtcagggtgttgtttcatttcttgccatggtttagatgtggttgatagggaaaacggtgaagtattttttggagcagctaatataatgtatcttcatcatacttttacatgtgagtgtaatagcttatttcttgtggtaggaatacagctttgctgtgttttcgggaatgacatttgttgtgtaaggctattcacaatggctatttcataatactcttttcaatactgcc

SEQ ID NO: 9857 - protein, 305 aa, Zea mays subsp. mays
  peptide (1)..(305): Ceres Seq. ID no. 12374979
  misc_feature (124)..(298): Pfam Name: SCAMP family Pfam Description: SCAMP family
  misc_feature (35)..(300): Homolog of NCBI NO: 7109232 NR Description: secretory carrier membrane protein [Oryza sativa]
  misc_feature (56)..(305): Homolog of NCBI NO: 34899754 NR Description: putative secretory carrier membrane protein
  misc_feature (35)..(299): Homolog of NCBI NO: 15219893 NR Description: secretory carrier membrane protein; protein id: supported by cDNA: 27197., supported by cDNA: gi_15027862, by cDNA: gi_19310672, supported by cDNA: gi_7109227 [Arabidopsis
  misc_feature (35)..(300): Homolog of NCBI NO: 15220305 NR Description: secretory carrier membrane protein, putative;
  misc_feature (38)..(300): Homolog of NCBI NO: 15226410 NR Description: putative secretory carrier-associated membrane protein id: At2g20840.1 [Arabidopsis thaliana]
  misc_feature (35)..(300): Homolog of NCBI NO: 3941289 NR Description: similarity to SCAMP37 [Pisum sativum]
  misc_feature (38)..(300): Homolog of NCBI NO: 18379111 NR Description: expressed protein; protein id: At1g03550.1, by cDNA: 30006. [Arabidopsis thaliana] F21B7.17 [Arabidopsis thaliana] >gi|21592580|gb|AAM64529.1|
  misc_feature (35)..(300): Homolog of NCBI NO: 25402653 NR Description: hypothetical protein [imported] - Arabidopsis >gi|5734732|gb|AAD49997.1|AC007259_10 Hypothetical protein
  misc_feature (39)..(297): Homolog of NCBI NO: 15222550 NR Description: secretory carrier membrane protein, putative; id: At1g32050.1, supported by cDNA: 34837. [Arabidopsis thaliana]
  misc_feature (39)..(297): Homolog of NCBI NO: 38347080 NR Description: OSJNBa0006A01.21 [Oryza sativa (japonica
QWYLKSKAAQQVRQDAISSGWPPPDAGGPEEEAAMAGKHGRNGFDDDNVNPFAGGSVPPATNSRLSPLSHEPADFYNVDIPLDSSKDLKKKEKELQAMEAELNKRERELKRKEEAASRAGVVIEEKNWPPFFPLIHHDISNEIPIHLQRMQYLAFSSFLGLIACLFWNVIATTTAWIKGEGVMIWLLAIIYFISGAPGAYVLWYRPLYNAMRTESALKFGWFFLFYMIHIIFCVWAAVAPPFPFKGKSLAGILPAIDVISKNAIVGIFYFVGFGLFCLESLLSIGVIQQVYMYFRGSGKSCRDET

SEQ ID NO: 9858 - protein, 271 aa, Zea mays subsp. mays
  peptide (1)..(271): Ceres Seq. ID no. 12374980
  misc_feature (90)..(264): Pfam Name: SCAMP family Pfam Description: SCAMP family
  misc_feature (1)..(266): Homolog of NCBI NO: 7109232 NR Description: secretory carrier membrane protein [Oryza sativa]
  misc_feature (22)..(271): Homolog of NCBI NO: 34899754 NR Description: putative secretory carrier membrane protein
  misc_feature (1)..(265): Homolog of NCBI NO: 15219893 NR Description: secretory carrier membrane protein; protein id: supported by cDNA: 27197., supported by cDNA: gi_15027862, by cDNA: gi_19310672, supported by cDNA: gi_7109227 [Arabidopsis
  misc_feature (1)..(266): Homolog of NCBI NO: 15220305 NR Description: secretory carrier membrane protein, putative;
  misc_feature (4)..(266): Homolog of NCBI NO: 15226410 NR Description: putative secretory carrier-associated membrane protein id: At2g20840.1 [Arabidopsis thaliana]
  misc_feature (1)..(266): Homolog of NCBI NO: 3941289 NR Description: similarity to SCAMP37 [Pisum sativum]
  misc_feature (4)..(266): Homolog of NCBI NO: 18379111 NR Description: expressed protein; protein id: At1g03550.1, by cDNA: 30006. [Arabidopsis thaliana] F21B7.17 [Arabidopsis thaliana] >gi|21592580|gb|AAM64529.1|
  misc_feature (1)..(266): Homolog of NCBI NO: 25402653 NR Description: hypothetical protein [imported] - Arabidopsis >gi|5734732|gb|AAD49997.1|AC007259_10 Hypothetical protein
  misc_feature (5)..(263): Homolog of NCBI NO: 15222550 NR Description: secretory carrier membrane protein, putative; id: At1g32050.1, supported by cDNA: 34837. [Arabidopsis thaliana]
  misc_feature (5)..(263): Homolog of NCBI NO: 38347080 NR Description: OSJNBa0006A01.21 [Oryza sativa (japonica
MAGKHGRNGFDDDNVNPFAGGSVPPATNSRLSPLSHEPADFYNVDIPLDSSKDLKKKEKELQAMEAELNKRERELKRKEEAASRAGVVIEEKNWPPFFPLIHHDISNEIPIHLQRMQYLAFSSFLGLIACLFWNVIATTTAWIKGEGVMIWLLAIIYFISGAPGAYVLWYRPLYNAMRTESALKFGWFFLFYMIHIIFCVWAAVAPPFPFKGKSLAGILPAIDVISKNAIVGIFYFVGFGLFCLESLLSIGVIQQVYMYFRGSGKSCRDET

SEQ ID NO: 9859 - protein, 208 aa, Zea mays subsp. mays
  peptide (1)..(208): Ceres Seq. ID no. 12374981
  misc_feature (27)..(201): Pfam Name: SCAMP family Pfam Description: SCAMP family
  misc_feature (1)..(203): Homolog of NCBI NO: 7109232 NR Description: secretory carrier membrane protein [Oryza sativa]
  misc_feature (1)..(208): Homolog of NCBI NO: 34899754 NR Description: putative secretory carrier membrane protein
  misc_feature (1)..(202): Homolog of NCBI NO: 15219893 NR Description: secretory carrier membrane protein; protein id: supported by cDNA: 27197., supported by cDNA: gi_15027862, by cDNA: gi_19310672, supported by cDNA: gi_7109227 [Arabidopsis
  misc_feature (1)..(203): Homolog of NCBI NO: 15220305 NR Description: secretory carrier membrane protein, putative;
  misc_feature (1)..(203): Homolog of NCBI NO: 15226410 NR Description: putative secretory carrier-associated membrane protein id: At2g20840.1 [Arabidopsis thaliana]
  misc_feature (1)..(203): Homolog of NCBI NO: 3941289 NR Description: similarity to SCAMP37 [Pisum sativum]
  misc_feature (1)..(203): Homolog of NCBI NO: 18379111 NR Description: expressed protein; protein id: At1g03550.1, by cDNA: 30006. [Arabidopsis thaliana] F21B7.17 [Arabidopsis thaliana] >gi|21592580|gb|AAM64529.1|
  misc_feature (1)..(203): Homolog of NCBI NO: 25402653 NR Description: hypothetical protein [imported] - Arabidopsis >gi|5734732|gb|AAD49997.1|AC007259_10 Hypothetical protein
  misc_feature (1)..(200): Homolog of NCBI NO: 15222550 NR Description: secretory carrier membrane protein, putative; id: At1g32050.1, supported by cDNA: 34837. [Arabidopsis thaliana]
  misc_feature (1)..(200): Homolog of NCBI NO: 38347080 NR Description: OSJNBa0006A01.21 [Oryza sativa (japonica
MEAELNKRERELKRKEEAASRAGVVIEEKNWPPFFPLIHHDISNEIPIHLQRMQYLAFSSFLGLIACLFWNVIATTTAWIKGEGVMIWLLAIIYFISGAPGAYVLWYRPLYNAMRTESALKFGWFFLFYMIHIIFCVWAAVAPPFPFKGKSLAGILPAIDVISKNAIVGIFYFVGFGLFCLESLLSIGVIQQVYMYFRGSGKSCRDET

SEQ ID NO: 9860 - DNA, 1628 bp, Zea mays subsp. mays
  misc_feature (1)..(1628): Ceres Seq. ID no. 12416798
  misc_feature: MA Experiment ID: 108522 Result: Up-regulated in Transcription
  misc_feature: MA Experiment 108522 PARAMETER Experiment Name: Zm_42deg_Heat_P Parameter: Age (day) Value: 8
  misc_feature: MA Experiment 108522 PARAMETER Experiment Name: Zm_42deg_Heat_P Parameter: Organism Value: Zea mays
  misc_feature: MA Experiment 108522 PARAMETER Experiment Name: Zm_42deg_Heat_P Parameter: Plant Line Value: 35A19
  misc_feature: MA Experiment 108522 PARAMETER Experiment Name: Zm_42deg_Heat_P Parameter: Temperature (deg C) Value: 42 vs. 22
  misc_feature: MA Experiment 108522 PARAMETER Experiment Name: Zm_42deg_Heat_P Parameter: Timepoint (hr) Value: 1
  misc_feature: MA Experiment 108522 PARAMETER Experiment Name: Zm_42deg_Heat_P Parameter: Tissue Value: Aerial
gcacgagaccattacctagaacatcctaatcgaaaaattatttttttaataaatcttcccaggcgtccagcgtcctcccggcgacgacgcttcccgagctctctccttcccgcgaccctctcctctgccccgctccgctagggttttgccgcagacctctcgctcgcttccggttccgcgaggcaaccgtccgaccggtcggaatggtggatgtggaggagaccgggaacaagttgcaatcgcagatgcgcctccacgcggagccggaggacgacgccgccgacctccccctcccggccctcttcgatagggcgtcgcggctccacgccctggcctccagctccgccctcgaccaggatgggatccgcacgggggttgacctgctgcggcgctgcgatgacatggtcagcaagctcgggcctcttctcccccaacgagaccaaggaggacgtctccacagcaaacctcaagtacctactggtcccatattaccttgcagaaatgaccgaaaagatagcacaggaggatcggatcccggttcttaagacgtcacaggaccatctgaaggagttcattgctctatgtgaagtactagagcttatcccagaggatgagctagaattgtctaggcagaagcagccagatactctgacaaacagaagagcgcagaaggttgcccggttcaaacgtcaaaaggctgcagaaacgaagctccaagagatcagagagagaaaagaaaggcgtggacgctcattgagagcagctgctttgtctgccccaattgaagctggagaggaagatgacctggagaatgatggggaggaagaaagagaggcttggttagctaccatctcattggctctctgcaaggcatttgatcttctcgacatgctaaagaaggaagaagaaatgcttcaagctgtaaaggaaaggaaggcaaaggatgggaatgcatttgctcgtgaaatgcttgatgaacgaacgaagaaggccgaaacatggcaccataatgctgccaaccgtgtggcatattccaaaccagcggatcctatcacttgtgcaacatttgctcaagatgtcattgaaggtagagcaagcgtttcacaagctcacgagcacaaacaccagcccctgatatttggacctgcaagtattgttggtggtggtctaacaagtgaaagggaaagaatgacagcgcaagtttttcagcctagttacaggatgccaacaatgagcattgaagaagctggtttgcgcgagatgaaaatgatggagaaatggcaagaaaggaccgctgaggtgatgaaagaatcaacctccgcgtggcacaaggatggcagcagctcggcccaagaggatgaggacgccgaggaggaaaaagcaagagcgtgggacgactggaaggatgacaaccctcgtggcgcaggcaacaagaagctcacgccctgtggttaatttgtgaaacacgctgtgtattgatactccacatggaacatgatgctcatgtagacggtaggatgtttaattttatcattgttgccgtgttttttctgtagtgatgttgagtgtatcgtagcctgtttgtgcaagtgcaatatgtcctccctaatacgacacgtttttctggc

SEQ ID NO: 9861 - protein, 414 aa, Zea mays subsp. mays
  peptide (1)..(414): Ceres Seq. ID no. 12416799
  misc_feature (71)..(402): Pfam Name: TAP42-like family Pfam Description: TAP42-like family
  misc_feature (70)..(414): Homolog of NCBI NO: 29367365 NR Description: PP2A regulatory subunit-like protein [Oryza
  misc_feature (71)..(414): Homolog of NCBI NO: 18423459 NR Description: PP2A regulatory subunit; protein id: At5g53000.1, by cDNA: 19116., supported by cDNA: gi_5107032 [Arabidopsis >gi|25369342|pir||T52307 serine/threonine protein phosphatase
  misc_feature (71)..(414): Homolog of NCBI NO: 21553995 NR Description: PP2A regulatory subunit [Arabidopsis thaliana]
  misc_feature (71)..(414): Homolog of NCBI NO: 8809589 NR Description: PP2A regulatory subunit [Arabidopsis thaliana]
  misc_feature (70)..(244): Homolog of NCBI NO: 7489459 NR Description: chilling-induced protein - rice
  misc_feature (320)..(414): Homolog of NCBI NO: 7489459 NR Description: chilling-induced protein - rice
  misc_feature (71)..(259): Homolog of NCBI NO: 19075479 NR Description: putative phosphatase component pombe] >gi|14286078|sp|Q9Y7T1|YCJ5_SCHPO Hypothetical protein
  misc_feature (320)..(407): Homolog of NCBI NO: 19075479 NR Description: putative phosphatase component pombe] >gi|14286078|sp|Q9Y7T1|YCJ5_SCHPO Hypothetical protein
  misc_feature (54)..(252): Homolog of NCBI NO: 4557663 NR Description: immunoglobulin (CD79A) binding protein 1; binding protein 1; alpha 4 [Homo sapiens]
  misc_feature (54)..(252): Homolog of NCBI NO: 30584781 NR Description: Homo sapiens immunoglobulin (CD79A) binding
MWRRPGTSCNRRCASTRSRRTTPPTSPSRPSSIGRRGSTPWPPAPPSTRMGSARGLTCCGAAMTWSASSGLFSPNETKEDVSTANLKYLLVPYYLAEMTEKIAQEDRIPVLKTSQDHLKEFIALCEVLELIPEDELELSRQKQPDTLTNRRAQKVARFKRQKAAETKLQEIRERKERRGRSLRAAALSAPIEAGEEDDLENDGEEEREAWLATISLALCKAFDLLDMLKKEEEMLQAVKERKAKDGNAFAREMLDERTKKAETWHHNAANRVAYSKPADPITCATFAQDVIEGRASVSQAHEHKHQPLIFGPASIVGGGLTSERERMTAQVFQPSYRMPTMSIEEAGLREMKMMEKWQERTAEVMKESTSAWHKDGSSSAQEDEDAEEEKARAWDDWKDDNPRGAGNKKLTPCG

SEQ ID NO: 9862 - protein, 365 aa, Zea mays subsp. mays
  peptide (1)..(365): Ceres Seq. ID no. 12416800
  misc_feature (22)..(353): Pfam Name: TAP42-like family Pfam Description: TAP42-like family
  misc_feature (21)..(365): Homolog of NCBI NO: 29367365 NR Description: PP2A regulatory subunit-like protein [Oryza
  misc_feature (22)..(365): Homolog of NCBI NO: 18423459 NR Description: PP2A regulatory subunit; protein id: At5g53000.1, by cDNA: 19116., supported by cDNA: gi_5107032 [Arabidopsis >gi|25369342|pir||T52307 serine/threonine protein phosphatase
  misc_feature (22)..(365): Homolog of NCBI NO: 21553995 NR Description: PP2A regulatory subunit [Arabidopsis thaliana]
  misc_feature (22)..(365): Homolog of NCBI NO: 8809589 NR Description: PP2A regulatory subunit [Arabidopsis thaliana]
  misc_feature (21)..(195): Homolog of NCBI NO: 7489459 NR Description: chilling-induced protein - rice
  misc_feature (271)..(365): Homolog of NCBI NO: 7489459 NR Description: chilling-induced protein - rice
  misc_feature (22)..(210): Homolog of NCBI NO: 19075479 NR Description: putative phosphatase component pombe] >gi|14286078|sp|Q9Y7T1|YCJ5_SCHPO Hypothetical protein
  misc_feature (271)..(358): Homolog of NCBI NO: 19075479 NR Description: putative phosphatase component pombe] >gi|14286078|sp|Q9Y7T1|YCJ5_SCHPO Hypothetical protein
  misc_feature (5)..(203): Homolog of NCBI NO: 4557663 NR Description: immunoglobulin (CD79A) binding protein 1; binding protein 1; alpha 4 [Homo sapiens]
  misc_feature (5)..(203): Homolog of NCBI NO: 30584781 NR Description: Homo sapiens immunoglobulin (CD79A) binding
MGSARGLTCCGAAMTWSASSGLFSPNETKEDVSTANLKYLLVPYYLAEMTEKIAQEDRIPVLKTSQDHLKEFIALCEVLELIPEDELELSRQKQPDTLTNRRAQKVARFKRQKAAETKLQEIRERKERRGRSLRAAALSAPIEAGEEDDLENDGEEEREAWLATISLALCKAFDLLDMLKKEEEMLQAVKERKAKDGNAFAREMLDERTKKAETWHHNAANRVAYSKPADPITCATFAQDVIEGRASVSQAHEHKHQPLIFGPASIVGGGLTSERERMTAQVFQPSYRMPTMSIEEAGLREMKMMEKWQERTAEVMKESTSAWHKDGSSSAQEDEDAEEEKARAWDDWKDDNPRGAGNKKLTPCG

SEQ ID NO: 9863 - protein, 352 aa, Zea mays subsp. mays
  peptide (1)..(352): Ceres Seq. ID no. 12416801
  misc_feature (9)..(340): Pfam Name: TAP42-like family Pfam Description: TAP42-like family
  misc_feature (8)..(352): Homolog of NCBI NO: 29367365 NR Description: PP2A regulatory subunit-like protein [Oryza
  misc_feature (9)..(352): Homolog of NCBI NO: 18423459 NR Description: PP2A regulatory subunit; protein id: At5g53000.1, by cDNA: 19116., supported by cDNA: gi_5107032 [Arabidopsis >gi|25369342|pir||T52307 serine/threonine protein phosphatase
  misc_feature (9)..(352): Homolog of NCBI NO: 21553995 NR Description: PP2A regulatory subunit [Arabidopsis thaliana]
  misc_feature (9)..(352): Homolog of NCBI NO: 8809589 NR Description: PP2A regulatory subunit [Arabidopsis thaliana]
  misc_feature (8)..(182): Homolog of NCBI NO: 7489459 NR Description: chilling-induced protein - rice
  misc_feature (258)..(352): Homolog of NCBI NO: 7489459 NR Description: chilling-induced protein - rice
  misc_feature (9)..(197): Homolog of NCBI NO: 19075479 NR Description: putative phosphatase component pombe] >gi|14286078|sp|Q9Y7T1|YCJ5_SCHPO Hypothetical protein
  misc_feature (258)..(345): Homolog of NCBI NO: 19075479 NR Description: putative phosphatase component pombe] >gi|14286078|sp|Q9Y7T1|YCJ5_SCHPO Hypothetical protein
  misc_feature (1)..(190): Homolog of NCBI NO: 4557663 NR Description: immunoglobulin (CD79A) binding protein 1; binding protein 1; alpha 4 [Homo sapiens]
  misc_feature (1)..(190): Homolog of NCBI NO: 30584781 NR Description: Homo sapiens immunoglobulin (CD79A) binding
MTWSASSGLFSPNETKEDVSTANLKYLLVPYYLAEMTEKIAQEDRIPVLKTSQDHLKEFIALCEVLELIPEDELELSRQKQPDTLTNRRAQKVARFKRQKAAETKLQEIRERKERRGRSLRAAALSAPIEAGEEDDLENDGEEEREAWLATISLALCKAFDLLDMLKKEEEMLQAVKERKAKDGNAFAREMLDERTKKAETWHHNAANRVAYSKPADPITCATFAQDVIEGRASVSQAHEHKHQPLIFGPASIVGGGLTSERERMTAQVFQPSYRMPTMSIEEAGLREMKMMEKWQERTAEVMKESTSAWHKDGSSSAQEDEDAEEEKARAWDDWKDDNPRGAGNKKLTPCG

SEQ ID NO: 9864 - DNA, 1536 bp, Zea mays subsp. mays
  misc_feature (1)..(1536): Ceres Seq. ID no. 12416469
  misc_feature: MA Experiment ID: 108522 Result: Up-regulated in Transcription
  misc_feature: MA Experiment 108522 PARAMETER Experiment Name: Zm_42deg_Heat_P Parameter: Age (day) Value: 8
  misc_feature: MA Experiment 108522 PARAMETER Experiment Name: Zm_42deg_Heat_P Parameter: Organism Value: Zea mays
  misc_feature: MA Experiment 108522 PARAMETER Experiment Name: Zm_42deg_Heat_P Parameter: Plant Line Value: 35A19
  misc_feature: MA Experiment 108522 PARAMETER Experiment Name: Zm_42deg_Heat_P Parameter: Temperature (deg C) Value: 42 vs. 22
  misc_feature: MA Experiment 108522 PARAMETER Experiment Name: Zm_42deg_Heat_P Parameter: Timepoint (hr) Value: 1
  misc_feature: MA Experiment 108522 PARAMETER Experiment Name: Zm_42deg_Heat_P Parameter: Tissue Value: Aerial
  misc_feature: MA Experiment ID: 108535 Result: Down-regulated in Transcription
  misc_feature: MA Experiment 108535 PARAMETER Experiment Name: Zm_Meristem_P Parameter: Age (day) Value: 8
  misc_feature: MA Experiment 108535 PARAMETER Experiment Name: Zm_Meristem_P Parameter: Organism Value: Zea mays
  misc_feature: MA Experiment 108535 PARAMETER Experiment Name: Zm_Meristem_P Parameter: Plant Line Value: 35A19
  misc_feature: MA Experiment 108535 PARAMETER Experiment Name: Zm_Meristem_P Parameter: Tissue Value: Root Meristem vs. Above Root Meristem
  misc_feature: MA Experiment ID: 20000108 Result: Down-regulated in Transcription
  misc_feature: MA Experiment 20000108 PARAMETER Experiment Name: Zm_Root-Tips_P Parameter: Age (day) Value: 12
  misc_feature: MA Experiment 20000108 PARAMETER Experiment Name: Zm_Root-Tips_P Parameter: Organism Value: Zea mays
  misc_feature: MA Experiment 20000108 PARAMETER Experiment Name: Zm_Root-Tips_P Parameter: Tissue Value: Root tips vs. Root mid region    35
  misc_feature: MA Experiment 20000108 PARAMETER Experiment Name: Zm_Root-Tips_P Parameter: Tissue Value: Root tips vs. Root mid region   Sequence Listing-Misc Features (4)
  misc_feature: MA Experiment ID: 20000477 Result: Down-regulated in Transcription
  misc_feature: MA Experiment 20000477 PARAMETER Experiment Name: Zm_5mM_SA_P Parameter: Age (day) Value: 10
  misc_feature: MA Experiment 20000477 PARAMETER Experiment Name: Zm_5mM_SA_P Parameter: Organism Value: Zea mays
  misc_feature: MA Experiment 20000477 PARAMETER Experiment Name: Zm_5mM_SA_P Parameter: Plant Line Value: 35A19
  misc_feature: MA Experiment 20000477 PARAMETER Experiment Name: Zm_5mM_SA_P Parameter: Timepoint (hr) Value: 48
  misc_feature: MA Experiment 20000477 PARAMETER Experiment Name: Zm_5mM_SA_P Parameter: Tissue Value: Aerial
  misc_feature: MA Experiment 20000477 PARAMETER Experiment Name: Zm_5mM_SA_P Parameter: Treatment Value: 5mM SA vs. No Treatment
  misc_feature: MA Experiment ID: 20000479 Result: Down-regulated in Transcription
  misc_feature: MA Experiment 20000479 PARAMETER Experiment Name: Zm_Drought_P Parameter: Age (day) Value: 10
  misc_feature: MA Experiment 20000479 PARAMETER Experiment Name: Zm_Drought_P Parameter: Organism Value: Zea mays
  misc_feature: MA Experiment 20000479 PARAMETER Experiment Name: Zm_Drought_P Parameter: Plant Line Value: 35A19
  misc_feature: MA Experiment 20000479 PARAMETER Experiment Name: Zm_Drought_P Parameter: Timepoint (hr) Value: 48
  misc_feature: MA Experiment 20000479 PARAMETER Experiment Name: Zm_Drought_P Parameter: Tissue Value: Aerial
  misc_feature: MA Experiment 20000479 PARAMETER Experiment Name: Zm_Drought_P Parameter: Treatment Value: Drought vs. No Drought
aatccgctccgggcgtcatcgttgtatccaaagcgccgtgctagattccacacctagacaggacgccgcacacggcagccacccccttgtgtgcgtgactgcgtctcgcgcgggcaagagtgcacgggcagagccatggacgtagaagcgcgcaaggccgacgcgccgctcgcgcaaggcaaggcgatgcaccgctttctcgtagcgctcaactgcgggatgctggcggtgggagccatcggcgggccgctcctgagccggctctacttcagcaagggtgggcaccggcagtggctgtccgcgtggctggagaccggcgggtggccgctgctggtgattcccgtggcggcgtcgntcgtggcccgccgcgcgcgcgacaggggcgccccggttcctgctcgcgccgccgcggatcctgctggccgccgcgggcctcggcgtggccacgggcgcggacgacttcatctacgcctacgggctcgcgtacctcccggtgtccacgtccgcgatcctgatctcgacgcagctggcgttcacggtgttcttcgcgttcctcgtggtgcggcagcgcctgacggccgcgtccgtgaacgccgtggcgctgctgacggtgggcaccgtggtgctgggcctgcacgtctcgtcggaccggcccccgggcgtcaccaggggccagtactggctgggcttcgtgctgacgctcggcgccgcggcgctctacggcctcgtcctgccgctcgtggagctcgcctacaggcgcgccgcgggcgccggcggccgcgccgtnacgtacgcgctggtggtgnagatgcagctggtgatgggcttcttcgccaccgcgttctgcaccgtcggcatggtcgtcaacaaggatttccaggcgatcccgagggaggcgaggcggtacgcgctgggggaggcgcggtactacgcggtgctggcgtggtcggcggtgatgtggcagtgcttcttcctgggcgcggtgggcgtcatcttctgcgtgcacacgctgctggcgggcatcctcatcgcggtgttcatcccggtgacggaggtggcggccgtcatcttcctgcgcgagaggttcagcagcgagaaaggcgtggcgctggtgctctcgctctggggcctcgcgtcctactcctacggcgagtggagcgaggccagggccaagaagaggaagaggacgaggacggaggagggcgccgccgccgcggaggccctgcagcaggcgaacccgtgatgctgctgcggactttggcctggcctcttcgatcttccccgttgtgtgtatatcagtatatgttgtgattgtgatcgctgctgtgtgctacgtggatagcgtcctgaatcgtcgtcacctgcagctgtcgcttctggtgtgggtgctcttctgttcggcggtggacgttggccaatantgtgctgcatggtgtgtagatgtaccttggcagtaccacgttcggttcggacagtaagtntggaccggcgcactttgtgggccgatcccagtacaggactgatctaatntgaacg

SEQ ID NO: 9865 - protein, 391 aa, Zea mays subsp. mays
  peptide (1)..(391): Ceres Seq. ID no. 12416470
  misc_feature (32)..(82): Pfam Name: Integral membrane protein DUF6 Pfam Description: Integral membrane protein DUF6
  misc_feature (4)..(66): Homolog of NCBI NO: 38344290 NR Description: OSJNBa0013K16.22 [Oryza sativa (japonica
  misc_feature (18)..(78): Homolog of NCBI NO: 15217872 NR Description: purine permease, putative; protein id: At1g28220.1
  misc_feature (18)..(82): Homolog of NCBI NO: 15217873 NR Description: purine permease; protein id: At1g28230.1, by cDNA: gi_7620006 [Arabidopsis thaliana]
  misc_feature (18)..(82): Homolog of NCBI NO: 7620007 NR Description: purine permease [Arabidopsis thaliana]
  misc_feature (1)..(83): Homolog of NCBI NO: 34902418 NR Description: Hypothetical protein [Oryza sativa (japonica group)] >gi|24756874|gb|AAN64138.1| Hypothetical protein [Oryza
  misc_feature (18)..(78): Homolog of NCBI NO: 25350217 NR Description: hypothetical protein At2g33750 [imported] - thaliana >gi|1707019|gb|AAC69140.1| hypothetical protein
  misc_feature (18)..(78): Homolog of NCBI NO: 30685825 NR Description: purine permease family [Arabidopsis thaliana]
  misc_feature (39)..(69): Homolog of NCBI NO: 15224103 NR Description: hypothetical protein; protein id: At2g24220.1
  misc_feature (30)..(68): Homolog of NCBI NO: 18397682 NR Description: expressed protein; protein id: At1g30840.1, by cDNA: 113990. [Arabidopsis thaliana] T17H7.15 [Arabidopsis thaliana] >gi|21536872|gb|AAM61204.1|
  misc_feature (11)..(70): Homolog of NCBI NO: 15219436 NR Description: hypothetical protein; protein id: At1g44750.1, by cDNA: gi_17065411 [Arabidopsis thaliana]
  misc_feature (74)..(74): Xaa is any aa, unknown or other
  misc_feature (218)..(218): Xaa is any aa, unknown or other
  misc_feature (224)..(224): Xaa is any aa, unknown or other
MDVEARKADAPLAQGKAMHRFLVALNCGMLAVGAIGGPLLSRLYFSKGGHRQWLSAWLETGGWPLLVIPVAASXVARRARDRGAPVPARAAADPAGRRGPRRGHGRGRLHLRLRARVPPGVHVRDPDLDAAGVHGVLRVPRGAAAPDGRVRERRGAADGGHRGAGPARLVGPAPGRHQGPVLAGLRADARRRGALRPRPAARGARLQARRGRRRPRRXVRAGGXDAAGDGLLRHRVLHRRHGRQQGFPGDPEGGEAVRAGGGAVLRGAGVVGGDVAVLLPGRGGRHLLRAHAAGGHPHRGVHPGDGGGGRHLPAREVQQRERRGAGALALGPRVLLLRRVERGQGQEEEEDEDGGGRRRRGGPAAGEPVMLLRTLAWPLRSSPLCVYQYML

SEQ ID NO: 9866 - protein, 374 aa, Zea mays subsp. mays
  peptide (1)..(374): Ceres Seq. ID no. 12416471
  misc_feature (15)..(65): Pfam Name: Integral membrane protein DUF6 Pfam Description: Integral membrane protein DUF6
  misc_feature (1)..(61): Homolog of NCBI NO: 15217872 NR Description: purine permease, putative; protein id: At1g28220.1
  misc_feature (1)..(65): Homolog of NCBI NO: 15217873 NR Description: purine permease; protein id: At1g28230.1, by cDNA: gi_7620006 [Arabidopsis thaliana]
  misc_feature (1)..(65): Homolog of NCBI NO: 7620007 NR Description: purine permease [Arabidopsis thaliana]
  misc_feature (1)..(66): Homolog of NCBI NO: 34902418 NR Description: Hypothetical protein [Oryza sativa (japonica group)] >gi|24756874|gb|AAN64138.1| Hypothetical protein [Oryza
  misc_feature (1)..(61): Homolog of NCBI NO: 25350217 NR Description: hypothetical protein At2g33750 [imported] - thaliana >gi|1707019|gb|AAC69140.1| hypothetical protein
  misc_feature (1)..(61): Homolog of NCBI NO: 30685825 NR Description: purine permease family [Arabidopsis thaliana]
  misc_feature (22)..(52): Homolog of NCBI NO: 15224103 NR Description: hypothetical protein; protein id: At2g24220.1
  misc_feature (13)..(51): Homolog of NCBI NO: 18397682 NR Description: expressed protein; protein id: At1g30840.1, by cDNA: 113990. [Arabidopsis thaliana] T17H7.15 [Arabidopsis thaliana] >gi|21536872|gb|AAM61204.1|
  misc_feature (1)..(53): Homolog of NCBI NO: 15219436 NR Description: hypothetical protein; protein id: At1g44750.1, by cDNA: gi_17065411 [Arabidopsis thaliana]
  misc_feature (1)..(49): Homolog of NCBI NO: 38344290 NR Description: OSJNBa0013K16.22 [Oryza sativa (japonica
  misc_feature (57)..(57): Xaa is any aa, unknown or other
  misc_feature (201)..(201): Xaa is any aa, unknown or other
  misc_feature (207)..(207): Xaa is any aa, unknown or other
MHRFLVALNCGMLAVGAIGGPLLSRLYFSKGGHRQWLSAWLETGGWPLLVIPVAASXVARRARDRGAPVPARAAADPAGRRGPRRGHGRGRLHLRLRARVPPGVHVRDPDLDAAGVHGVLRVPRGAAAPDGRVRERRGAADGGHRGAGPARLVGPAPGRHQGPVLAGLRADARRRGALRPRPAARGARLQARRGRRRPRRXVRAGGXDAAGDGLLRHRVLHRRHGRQQGFPGDPEGGEAVRAGGGAVLRGAGVVGGDVAVLLPGRGGRHLLRAHAAGGHPHRGVHPGDGGGGRHLPAREVQQRERRGAGALALGPRVLLLRRVERGQGQEEEEDEDGGGRRRRGGPAAGEPVMLLRTLAWPLRSSPLCVYQYML

SEQ ID NO: 9867 - protein, 363 aa, Zea mays subsp. mays
  peptide (1)..(363): Ceres Seq. ID no. 12416472
  misc_feature (4)..(54): Pfam Name: Integral membrane protein DUF6 Pfam Description: Integral membrane protein DUF6
  misc_feature (1)..(50): Homolog of NCBI NO: 15217872 NR Description: purine permease, putative; protein id: At1g28220.1
  misc_feature (1)..(54): Homolog of NCBI NO: 15217873 NR Description: purine permease; protein id: At1g28230.1, by cDNA: gi_7620006 [Arabidopsis thaliana]
  misc_feature (1)..(54): Homolog of NCBI NO: 7620007 NR Description: purine permease [Arabidopsis thaliana]
  misc_feature (1)..(55): Homolog of NCBI NO: 34902418 NR Description: Hypothetical protein [Oryza sativa (japonica group)] >gi|24756874|gb|AAN64138.1| Hypothetical protein [Oryza
  misc_feature (1)..(50): Homolog of NCBI NO: 25350217 NR Description: hypothetical protein At2g33750 [imported] - thaliana >gi|1707019|gb|AAC69140.1| hypothetical protein
  misc_feature (1)..(50): Homolog of NCBI NO: 30685825 NR Description: purine permease family [Arabidopsis thaliana]
  misc_feature (11)..(41): Homolog of NCBI NO: 15224103 NR Description: hypothetical protein; protein id: At2g24220.1
  misc_feature (2)..(40): Homolog of NCBI NO: 18397682 NR Description: expressed protein; protein id: At1g30840.1, by cDNA: 113990. [Arabidopsis thaliana] T17H7.15 [Arabidopsis thaliana] >gi|21536872|gb|AAM61204.1|
  misc_feature (1)..(42): Homolog of NCBI NO: 15219436 NR Description: hypothetical protein; protein id: At1g44750.1, by cDNA: gi_17065411 [Arabidopsis thaliana]
  misc_feature (1)..(38): Homolog of NCBI NO: 38344290 NR Description: OSJNBa0013K16.22 [Oryza sativa (japonica
  misc_feature (46)..(46): Xaa is any aa, unknown or other
  misc_feature (190)..(190): Xaa is any aa, unknown or other
  misc_feature (196)..(196): Xaa is any aa, unknown or other
MLAVGAIGGPLLSRLYFSKGGHRQWLSAWLETGGWPLLVIPVAASXVARRARDRGAPVPARAAADPAGRRGPRRGHGRGRLHLRLRARVPPGVHVRDPDLDAAGVHGVLRVPRGAAAPDGRVRERRGAADGGHRGAGPARLVGPAPGRHQGPVLAGLRADARRRGALRPRPAARGARLQARRGRRRPRRXVRAGGXDAAGDGLLRHRVLHRRHGRQQGFPGDPEGGEAVRAGGGAVLRGAGVVGGDVAVLLPGRGGRHLLRAHAAGGHPHRGVHPGDGGGGRHLPAREVQQRERRGAGALALGPRVLLLRRVERGQGQEEEEDEDGGGRRRRGGPAAGEPVMLLRTLAWPLRSSPLCVYQYML

SEQ ID NO: 9868 - DNA, 1242 bp, Zea mays subsp. mays
  misc_feature (1)..(1242): Ceres Seq. ID no. 12356776
  misc_feature: MA Experiment ID: 108529 Result: Up-regulated in Transcription
  misc_feature: MA Experiment 108529 PARAMETER Experiment Name: Zm_Imbibed_Seeds_P Parameter: Age (day) Value: 5 vs. 2
  misc_feature: MA Experiment 108529 PARAMETER Experiment Name: Zm_Imbibed_Seeds_P Parameter: Organism Value: Zea mays
  misc_feature: MA Experiment 108529 PARAMETER Experiment Name: Zm_Imbibed_Seeds_P Parameter: Plant Line Value: 35A19
  misc_feature: MA Experiment 108529 PARAMETER Experiment Name: Zm_Imbibed_Seeds_P Parameter: Tissue Value: Roots vs. Embryo
  misc_feature: MA Experiment ID: 108535 Result: Down-regulated in Transcription
  misc_feature: MA Experiment 108535 PARAMETER Experiment Name: Zm_Meristem_P Parameter: Age (day) Value: 8
  misc_feature: MA Experiment 108535 PARAMETER Experiment Name: Zm_Meristem_P Parameter: Organism Value: Zea mays
  misc_feature: MA Experiment 108535 PARAMETER Experiment Name: Zm_Meristem_P Parameter: Plant Line Value: 35A19
  misc_feature: MA Experiment 108535 PARAMETER Experiment Name: Zm_Meristem_P Parameter: Tissue Value: Root Meristem vs. Above Root Meristem
atattgcaactttgccaaacacgcacacagcagatccgtctagtgcactagggctcacaatctcgaaggtagctatatcttctcttagtttgctcgtcaccaccggcaatggctacggcgacgactaagccggcggcggggcgcggcgggaggcgctacgcgctgctgctggcgctctgggactcggagtacgcgaaggaggtgtacggcgggtactacaacgtctttgtcgccgctttcggcgccgacgacgtcgtcgtcggcggtggggagggcccggccggcgataggtggcactgcttccgtgtgatcgccggcgagttccctgcgccggaggacctggcgtcgtacgacggcttcgtggtgagcggcagcccgcaggacgcgcacggcgacgaaacatggatccggcgcctctgcgcgctcatccagaccgtccacgccatgaggaagcgggtgctcggcgtctgcttcggccaccaggttctgtgccgagcactgggcgggagggtcggcagggctaggaacggctgggacgtcggggtgaggaaggtgacgtttgcgcgagaccgcctggagagccttgagttcctcggggacctcgtccaggagcttccccggaggcgcctccctcatcgaggttcaccaggacgaggtgtgggagatcccgcctgcggcgacggtgctggcctactcggagaagacgcgcgtggaggtgttcgcggtcggggagcacgcgctgggcatccagggccacccggagtacaccgtcgacatccttcacaacctcatcgaccgcctcaccaagcagaacgacatccggaggagcgtcggcgaggaggcgcggcggacggtcgccgagaccggcgggccggaccgcgctttctggaccgcgctctgcaaaggttttctcggagggggaggggcgggaggagaccgtccgcagccgtctgctgctctgcctgcggtgcgggagacggcgccgccggaggtgacgactagctgcgccgtcgctggttgcttcgccagcgccgcaggtgcaatggtccagatggcgcgcagcaactagttatggctagggctgcccaaaatcttgagtacctggttcctttttgctgcaggattgcactctgtactgcagttcgattttctgttgacagaaagatgtactctagttctcctctaaattattggtgatgtactatactagctagaaactactgcctttgattgatcagtgcc

SEQ ID NO: 9869 - protein, 297 aa, Zea mays subsp. mays
  peptide (1)..(297): Ceres Seq. ID no. 12356777
  misc_feature (28)..(170): Pfam Name: Glutamine amidotransferase class-I Pfam Description: Glutamine amidotransferase class-I
  misc_feature (15)..(170): Homolog of NCBI NO: 15234767 NR Description: putative protein; protein id: At4g30550.1, by cDNA: 29388., supported by cDNA: gi_17381293 [Arabidopsis >gi|25407659|pir||D85357 hypothetical protein AT4g30550
  misc_feature (15)..(166): Homolog of NCBI NO: 15224079 NR Description: unknown protein; protein id: At2g23970.1
  misc_feature (15)..(170): Homolog of NCBI NO: 17381294 NR Description: AT4g30550/F17I23_110 [Arabidopsis thaliana]
  misc_feature (15)..(170): Homolog of NCBI NO: 21555885 NR Description: unknown [Arabidopsis thaliana]
  misc_feature (15)..(169): Homolog of NCBI NO: 15234765 NR Description: putative protein; protein id: At4g30540.1
  misc_feature (15)..(168): Homolog of NCBI NO: 15234763 NR Description: putative protein; protein id: At4g30530.1, by cDNA: 37987., supported by cDNA: gi_15294151, supported by gi_20147268 [Arabidopsis thaliana] >gi|25407655|pir||B85357
  misc_feature (15)..(168): Homolog of NCBI NO: 21593315 NR Description: defense-related protein [Arabidopsis thaliana]
  misc_feature (15)..(168): Homolog of NCBI NO: 14009290 NR Description: defense-related protein [Brassica carinata]
  misc_feature (15)..(166): Homolog of NCBI NO: 15224078 NR Description: unknown protein; protein id: At2g23960.1
  misc_feature (1)..(197): Homolog of NCBI NO: 13174241 NR Description: putative glutamine synthetase [Oryza sativa]
MATATTKPAAGRGGRRYALLLALWDSEYAKEVYGGYYNVFVAAFGADDVVVGGGEGPAGDRWHCFRVIAGEFPAPEDLASYDGFVVSGSPQDAHGDETWIRRLCALIQTVHAMRKRVLGVCFGHQVLCRALGGRVGRARNGWDVGVRKVTFARDRLESLEFLGDLVQELPRRRLPHRGSPGRGVGDPACGDGAGLLGEDARGGVRGRGARAGHPGPPGVHRRHPSQPHRPPHQAERHPEERRRGGAADGRRDRRAGPRFLDRALQRFSRRGRGGRRPSAAVCCSACGAGDGAAGGDD

SEQ ID NO: 9870 - protein, 185 aa, Zea mays subsp. mays
  peptide (1)..(185): Ceres Seq. ID no. 12356778
  misc_feature (1)..(58): Pfam Name: Glutamine amidotransferase class-I Pfam Description: Glutamine amidotransferase class-I
  misc_feature (1)..(58): Homolog of NCBI NO: 15234767 NR Description: putative protein; protein id: At4g30550.1, by cDNA: 29388., supported by cDNA: gi_17381293 [Arabidopsis >gi|25407659|pir||D85357 hypothetical protein AT4g30550
  misc_feature (1)..(54): Homolog of NCBI NO: 15224079 NR Description: unknown protein; protein id: At2g23970.1
  misc_feature (1)..(58): Homolog of NCBI NO: 17381294 NR Description: AT4g30550/F17I23_110 [Arabidopsis thaliana]
  misc_feature (1)..(58): Homolog of NCBI NO: 21555885 NR Description: unknown [Arabidopsis thaliana]
  misc_feature (1)..(57): Homolog of NCBI NO: 15234765 NR Description: putative protein; protein id: At4g30540.1
  misc_feature (1)..(56): Homolog of NCBI NO: 15234763 NR Description: putative protein; protein id: At4g30530.1, by cDNA: 37987., supported by cDNA: gi_15294151, supported by gi_20147268 [Arabidopsis thaliana] >gi|25407655|pir||B85357
  misc_feature (1)..(56): Homolog of NCBI NO: 21593315 NR Description: defense-related protein [Arabidopsis thaliana]
  misc_feature (1)..(56): Homolog of NCBI NO: 14009290 NR Description: defense-related protein [Brassica carinata]
  misc_feature (1)..(54): Homolog of NCBI NO: 15224078 NR Description: unknown protein; protein id: At2g23960.1
  misc_feature (1)..(85): Homolog of NCBI NO: 13174241 NR Description: putative glutamine synthetase [Oryza sativa]
MRKRVLGVCFGHQVLCRALGGRVGRARNGWDVGVRKVTFARDRLESLEFLGDLVQELPRRRLPHRGSPGRGVGDPACGDGAGLLGEDARGGVRGRGARAGHPGPPGVHRRHPSQPHRPPHQAERHPEERRRGGAADGRRDRRAGPRFLDRALQRFSRRGRGGRRPSAAVCCSACGAGDGAAGGDD

SEQ ID NO: 9871 - DNA, 1534 bp, Zea mays subsp. mays
  misc_feature (1)..(1534): Ceres Seq. ID no. 12416465
  misc_feature: MA Experiment ID: 108523 Result: Up-regulated in Transcription
  misc_feature: MA Experiment 108523 PARAMETER Experiment Name: Zm_42deg_Heat_P Parameter: Age (day) Value: 8
  misc_feature: MA Experiment 108523 PARAMETER Experiment Name: Zm_42deg_Heat_P Parameter: Organism Value: Zea mays
  misc_feature: MA Experiment 108523 PARAMETER Experiment Name: Zm_42deg_Heat_P Parameter: Plant Line Value: 35A19
  misc_feature: MA Experiment 108523 PARAMETER Experiment Name: Zm_42deg_Heat_P Parameter: Temperature (deg C) Value: 42 vs. 22
  misc_feature: MA Experiment 108523 PARAMETER Experiment Name: Zm_42deg_Heat_P Parameter: Timepoint (hr) Value: 6
  misc_feature: MA Experiment 108523 PARAMETER Experiment Name: Zm_42deg_Heat_P Parameter: Tissue Value: Aerial
  misc_feature: MA Experiment ID: 108527 Result: Up-regulated in Transcription
  misc_feature: MA Experiment 108527 PARAMETER Experiment Name: Zm_5mM_NO_P Parameter: Age (day) Value: 8
  misc_feature: MA Experiment 108527 PARAMETER Experiment Name: Zm_5mM_NO_P Parameter: Organism Value: Zea mays
  misc_feature: MA Experiment 108527 PARAMETER Experiment Name: Zm_5mM_NO_P Parameter: Plant Line Value: 35A19
  misc_feature: MA Experiment 108527 PARAMETER Experiment Name: Zm_5mM_NO_P Parameter: Timepoint (hr) Value: 6
  misc_feature: MA Experiment 108527 PARAMETER Experiment Name: Zm_5mM_NO_P Parameter: Tissue Value: Aerial
  misc_feature: MA Experiment 108527 PARAMETER Experiment Name: Zm_5mM_NO_P Parameter: Treatment Value: 5mM NO vs. No Treatment
agaacgccccagccttccacctcgaactccgcggtgcccagcgccctcggtaaccgccctccgccctgccacagagacaggtcgacgagacagacaaaggccggccgccatgggagaggacaagaaggcgggcaacaaggacgccgccggcggcgacaagaagaaggacgccggcgccggggccgcgccgcagcccatcgtgctgaaggtcgacttgcactgcgccggctgcgccaacaaggtccgcaaggccatcaagcacgccccaggtgtggagtcggtgacgccggacatggcggngggtaaggtggtcgtgaccggtccggcggacgcggtggagctcaaggagcgcatcgaggccagggcgaagaagcccgtgcagatcgtctccgccggcgccggcccacccaagtaaggagaaggataagaaagcggacggcggcgagaagaaggcggacaaagagaagggcggcggcggcggagagaagaaggccgacaaggagaagggcggcggagagaagaaggccgacaaggagaagggcggcggagagaagaaggccgacaaggagaagggcggcggcgagaagaaggccgacaaggagaagggtgccgacaagcccaaggaggagaagaagaagcccaaggaggagactgtgacgctgaagatccggctgcactgtgacggctgcatcgagcgcatcaagcgccgcatctccaagatcaaaggcgtgaaggacgtggcgttcgacgccgccaaggacctggtgaaggtgaccggcaccatggacggcgccgctctgccggcgtacctcagggagaagctcagccgggacgtggaagtggtggcgcccggcaagaaggacggcggcggcggcggtggtgacaagaaggacaagggcgcaggagacgggggagagaagaagaaggacggtggcggcggcggcggcggcggcggcgccgaggaaaagaaggacaaggccggggccgcggccgcctccgcgtcggtggcgccgacgcccctggccgacgccggcatgtaccaggtgccgccgcactacgggtacgcgccgtaccaccagccggctccaggcggctactacggtgccgccccaccgcccatccaccacgccggcttctaccccaacggcggcgtccattacccgcccgcgccagcctacgcgtacggccccacccacctccacgcgccccagatgttcagcgacgagaaccccaacgcntgctccgtcatgtgaactcgctcgcttcgccggtttgccgccgccgccgccgccgcgcctaggctcccccttcctccgtgtgagaccaagaaccatgggcttggcctgggattagcggtgtctttagttaaaattatcagtgagtagtagctagcttaagcagtgctccgatccgagatcagttccagcagacctgtgtaaatgagagtcccgccgctccgcgccggcccatcccggtgtaacgaatcgtcatgtgtaaaatgtatccggacccgataaagttttgcccttctgcc

SEQ ID NO: 9872 - protein, 156 aa, Zea mays subsp. mays
  peptide (1)..(156): Ceres Seq. ID no. 12416466
  misc_feature (1)..(131): Pfam Name: MARCKS family Pfam Description: MARCKS family
  misc_feature (1)..(156): Homolog of NCBI NO: 37534752 NR Description: putative metal-binding protein [Oryza sativa
  misc_feature (1)..(156): Homolog of NCBI NO: 38344582 NR Description: OSJNBa0053B21.14 [Oryza sativa (japonica
  misc_feature (1)..(114): Homolog of NCBI NO: 18404283 NR Description: expressed protein; protein id: At2g36950.1, by cDNA: 19570. [Arabidopsis thaliana]
  misc_feature (152)..(152): Xaa is any aa, unknown or other
MDGAALPAYLREKLSRDVEVVAPGKKDGGGGGGDKKDKGAGDGGEKKKDGGGGGGGGGAEEKKDKAGAAAASASVAPTPLADAGMYQVPPHYGYAPYHQPAPGGYYGAAPPPIHHAGFYPNGGVHYPPAPAYAYGPTHLHAPQMFSDENPNXCSVM

SEQ ID NO: 9873 - protein, 137 aa, Zea mays subsp. mays
  peptide (1)..(137): Ceres Seq. ID no. 12416467
  misc_feature (66)..(128): Pfam Name: Heavy-metal-associated domain Pfam Description: Heavy-metal-associated domain
  misc_feature (25)..(137): Homolog of NCBI NO: 38344582 NR Description: OSJNBa0053B21.14 [Oryza sativa (japonica
  misc_feature (32)..(137): Homolog of NCBI NO: 18404283 NR Description: expressed protein; protein id: At2g36950.1, by cDNA: 19570. [Arabidopsis thaliana]
  misc_feature (72)..(137): Homolog of NCBI NO: 25408515 NR Description: probable farnesylated protein [imported] -
  misc_feature (37)..(137): Homolog of NCBI NO: 37534752 NR Description: putative metal-binding protein [Oryza sativa
  misc_feature (37)..(137): Homolog of NCBI NO: 22327990 NR Description: expressed protein; protein id: At5g60800.1 thaliana] >gi|10176908|dbj|BAB10101.1| to unknown protein [Arabidopsis thaliana]
  misc_feature (37)..(137): Homolog of NCBI NO: 37532382 NR Description: putative ATFP3 [Oryza sativa (japonica
  misc_feature (39)..(130): Homolog of NCBI NO: 15241256 NR Description: copper chaperone (CCH)-related; protein id: [Arabidopsis thaliana] >gi|8777397|dbj|BAA96987.1| contains
  misc_feature (113)..(137): Homolog of NCBI NO: 9837379 NR Description: retinitis pigmentosa GTPase regulator [Homo
  misc_feature (90)..(137): Homolog of NCBI NO: 29367499 NR Description: unknown [Oryza sativa (japonica cultivar-group)]
  misc_feature (29)..(137): Homolog of NCBI NO: 22327990 NR Description: expressed protein; protein id: At5g60800.1 thaliana] >gi|10176908|dbj|BAB10101.1| to unknown protein [Arabidopsis thaliana]
  misc_feature (100)..(100): Xaa is any aa, unknown or other
ERPSLPPRTPRCPAPSVTALRPATETGRRDRQRPAAMGEDKKAGNKDAAGGDKKKDAGAGAAPQPIVLKVDLHCAGCANKVRKAIKHAPGVESVTPDMAXGKVVVTGPADAVELKERIEARAKKPVQIVSAGAGPPK

SEQ ID NO: 9874 - protein, 101 aa, Zea mays subsp. mays
  peptide (1)..(101): Ceres Seq. ID no. 12416468
  misc_feature (30)..(92): Pfam Name: Heavy-metal-associated domain Pfam Description: Heavy-metal-associated domain
  misc_feature (1)..(101): Homolog of NCBI NO: 38344582 NR Description: OSJNBa0053B21.14 [Oryza sativa (japonica
  misc_feature (1)..(101): Homolog of NCBI NO: 18404283 NR Description: expressed protein; protein id: At2g36950.1, by cDNA: 19570. [Arabidopsis thaliana]
  misc_feature (36)..(101): Homolog of NCBI NO: 25408515 NR Description: probable farnesylated protein [imported] -
  misc_feature (1)..(101): Homolog of NCBI NO: 37534752 NR Description: putative metal-binding protein [Oryza sativa
  misc_feature (1)..(101): Homolog of NCBI NO: 22327990 NR Description: expressed protein; protein id: At5g60800.1 thaliana] >gi|10176908|dbj|BAB10101.1| to unknown protein [Arabidopsis thaliana]
  misc_feature (1)..(101): Homolog of NCBI NO: 37532382 NR Description: putative ATFP3 [Oryza sativa (japonica
  misc_feature (3)..(94): Homolog of NCBI NO: 15241256 NR Description: copper chaperone (CCH)-related; protein id: [Arabidopsis thaliana] >gi|8777397|dbj|BAA96987.1| contains
  misc_feature (77)..(101): Homolog of NCBI NO: 9837379 NR Description: retinitis pigmentosa GTPase regulator [Homo
  misc_feature (54)..(101): Homolog of NCBI NO: 29367499 NR Description: unknown [Oryza sativa (japonica cultivar-group)]
  misc_feature (1)..(101): Homolog of NCBI NO: 22327990 NR Description: expressed protein; protein id: At5g60800.1 thaliana] >gi|10176908|dbj|BAB10101.1| to unknown protein [Arabidopsis thaliana]
  misc_feature (64)..(64): Xaa is any aa, unknown or other
MGEDKKAGNKDAAGGDKKKDAGAGAAPQPIVLKVDLHCAGCANKVRKAIKHAPGVESVTPDMAXGKVVVTGPADAVELKERIEARAKKPVQIVSAGAGPPK

SEQ ID NO: 9875 - DNA, 1432 bp, Zea mays subsp. mays
  misc_feature (1)..(1432): Ceres Seq. ID no. 12382187
  misc_feature: MA Experiment ID: 108528 Result: Down-regulated in Transcription
  misc_feature: MA Experiment 108528 PARAMETER Experiment Name: Zm_Imbibed_Seeds_P Parameter: Age (day) Value: 5 vs. 2
  misc_feature: MA Experiment 108528 PARAMETER Experiment Name: Zm_Imbibed_Seeds_P Parameter: Organism Value: Zea mays
  misc_feature: MA Experiment 108528 PARAMETER Experiment Name: Zm_Imbibed_Seeds_P Parameter: Plant Line Value: 35A19
  misc_feature: MA Experiment 108528 PARAMETER Experiment Name: Zm_Imbibed_Seeds_P Parameter: Tissue Value: Aerial vs. Embryo
  misc_feature: MA Experiment ID: 108530 Result: Down-regulated in Transcription
  misc_feature: MA Experiment 108530 PARAMETER Experiment Name: Zm_Imbibed_Seeds_P Parameter: Age (day) Value: 6 vs. 2
  misc_feature: MA Experiment 108530 PARAMETER Experiment Name: Zm_Imbibed_Seeds_P Parameter: Organism Value: Zea mays
  misc_feature: MA Experiment 108530 PARAMETER Experiment Name: Zm_Imbibed_Seeds_P Parameter: Plant Line Value: 35A19
  misc_feature: MA Experiment 108530 PARAMETER Experiment Name: Zm_Imbibed_Seeds_P Parameter: Tissue Value: Aerial vs. Embryo
  misc_feature: MA Experiment ID: 108535 Result: Up-regulated in Transcription
  misc_feature: MA Experiment 108535 PARAMETER Experiment Name: Zm_Meristem_P Parameter: Age (day) Value: 8
  misc_feature: MA Experiment 108535 PARAMETER Experiment Name: Zm_Meristem_P Parameter: Organism Value: Zea mays
  misc_feature: MA Experiment 108535 PARAMETER Experiment Name: Zm_Meristem_P Parameter: Plant Line Value: 35A19
  misc_feature: MA Experiment 108535 PARAMETER Experiment Name: Zm_Meristem_P Parameter: Tissue Value: Root Meristem vs. Above Root Meristem
  misc_feature: MA Experiment ID: 108544 Result: Down-regulated in Transcription
  misc_feature: MA Experiment ID: 108545 Result: Down-regulated in Transcription
  misc_feature: MA Experiment 108545 PARAMETER Experiment Name: Zm_Imbibed_Seeds_P Parameter: Age (day) Value: 3 vs. 2
  misc_feature: MA Experiment 108545 PARAMETER Experiment Name: Zm_Imbibed_Seeds_P Parameter: Organism Value: Zea mays
  misc_feature: MA Experiment 108545 PARAMETER Experiment Name: Zm_Imbibed_Seeds_P Parameter: Plant Line Value: 35A19
  misc_feature: MA Experiment 108545 PARAMETER Experiment Name: Zm_Imbibed_Seeds_P Parameter: Tissue Value: Aerial vs. Embryo
  misc_feature: MA Experiment ID: 108547 Result: Down-regulated in Transcription
  misc_feature: MA Experiment 108547 PARAMETER Experiment Name: Zm_Imbibed_Seeds_P Parameter: Age (day) Value: 4 vs. 2
  misc_feature: MA Experiment 108547 PARAMETER Experiment Name: Zm_Imbibed_Seeds_P Parameter: Organism Value: Zea mays
  misc_feature: MA Experiment 108547 PARAMETER Experiment Name: Zm_Imbibed_Seeds_P Parameter: Plant Line Value: 35A19
  misc_feature: MA Experiment 108547 PARAMETER Experiment Name: Zm_Imbibed_Seeds_P Parameter: Tissue Value: Aerial vs. Embryo
  misc_feature: MA Experiment ID: 20000108 Result: Up-regulated in Transcription
  misc_feature: MA Experiment 20000108 PARAMETER Experiment Name: Zm_Root-Tips_P Parameter: Age (day) Value: 12
  misc_feature: MA Experiment 20000108 PARAMETER Experiment Name: Zm_Root-Tips_P Parameter: Organism Value: Zea mays
  misc_feature: MA Experiment 20000108 PARAMETER Experiment Name: Zm_Root-Tips_P Parameter: Tissue Value: Root tips vs. Root mid region    35
  misc_feature: MA Experiment 20000108 PARAMETER Experiment Name: Zm_Root-Tips_P Parameter: Tissue Value: Root tips vs. Root mid region   Sequence Listing-Misc Features (4)
atgacaagtaaattagagattgatgcacgcagtagtaattaagacaggaatcgtaatccccccttgtttttggtttagtagtaaatctgcctgctgctccaagtagtagttaaaaaaacccagagaagcgcggtgggctgcgtataaatagccggccggccggaaagggggaaacgggcaggcaaacaaacaacacacactcgcgaggagcaggagcaggagcgatcaggacaacgctttggactcctggactggacctaccccgatggcgccagcctcctctccgatgagacagtaatccagcgagcgcgagtgagaggcaaccagcaaccatgaggccagacacggcggcctccgcctctccgactccgaagaagaaacccgacagtaaagccgcgctggacctcgcgtcgtggagcttcaacgtcaccacgtccgtcgggctcatcatggtcaacaaggctctaatggcgacgtacgggttcacgttcgccacgacgttaacggggctgcatttcgcgaccaccaccgtgatgaccctcgtgttccggtgggtcggcctgagccagccgtcgcagcttccgttaccggacctagccaagttcgtggtgttctccaacctgtccatcgtggggatgaacgtcagcctgatgtggaactccgtcggcttctaccaggtagccaagctgtgcatgatcccggcgtcgtgcctcctggaggtggtcttggaccgcgtgcactactcccgggacaccaggctcagcatcgcggtcgtgctcgctggagtggcggtgtgcaccgtcactgacgtgagcgtcaacgccagaggcctggtcgcggccgtcgtggctgtctggagcacggctctgcagcagtattatgttcatttcctccagcgcaagcactctctcaactcgttcagcctgctgggccacacggcgccggcgcaggcagggtcgctgctgctggcagggccgttcgttgactacctgctgacagggcaaagggtggaccacttcagcttctcgtctctcgctctgttgttcctcgcgctgtcgtgcttcatcgcgatcggggtcaacctgagccagttcatctgcatcggccgcttctccgccgtgtccttccaggtcctgggccacatgaagaccgtgctcgtcctctccctcggcttcctcttcttcggcaaggaaggcctcagcctccaggtcgtcgtcgggatggccctcgccgtcctcgggatggtgtggtacgggaacgcgtccgctaaaccgggcggcaaggagcgccgcggcaaagacctgccggtgagcctcaaacaagacaaggacgacactgacaaataatcatttgttatagttacaggtatacgtgtaatcgtttaatcacatggtgcaattgtttgccaaatcattgaacaatttcctgtggt

SEQ ID NO: 9876 - protein, 337 aa, Zea mays subsp. mays
  peptide (1)..(337): Ceres Seq. ID no. 12382188
  misc_feature (16)..(337): Homolog of NCBI NO: 18420440 NR Description: putative protein; protein id: At4g39390.1, by cDNA: 35002., supported by cDNA: gi_20259515 [Arabidopsis >gi|20259516|gb|AAM13878.1| unknown protein [Arabidopsis
  misc_feature (16)..(337): Homolog of NCBI NO: 21593003 NR Description: unknown [Arabidopsis thaliana]
  misc_feature (16)..(337): Homolog of NCBI NO: 7486049 NR Description: hypothetical protein F23K16.20 - Arabidopsis >gi|5042155|emb|CAB44674.1| putative protein [Arabidopsis >gi|7270923|emb|CAB80602.1| putative protein [Arabidopsis
  misc_feature (13)..(336): Homolog of NCBI NO: 30313364 NR Description: putative transmembrane protein [Oryza sativa]
  misc_feature (13)..(336): Homolog of NCBI NO: 18399097 NR Description: expressed protein; protein id: At1g34020.1, by cDNA: 7642. [Arabidopsis thaliana] >gi|25354483|pir||A86464
  misc_feature (13)..(330): Homolog of NCBI NO: 15234794 NR Description: hypothetical protein; protein id: At4g09810.1
  misc_feature (13)..(336): Homolog of NCBI NO: 21595054 NR Description: unknown [Arabidopsis thaliana]
  misc_feature (14)..(325): Homolog of NCBI NO: 18394949 NR Description: expressed protein; protein id: At1g21070.1, by cDNA: 108746. [Arabidopsis thaliana] >gi|25354485|pir||G86343
  misc_feature (14)..(325): Homolog of NCBI NO: 21536703 NR Description: unknown [Arabidopsis thaliana]
  misc_feature (15)..(336): Homolog of NCBI NO: 18411172 NR Description: expressed protein; protein id: At1g76670.1, by cDNA: gi_14532697, supported by cDNA: gi_16604379, supported cDNA: gi_18491194 [Arabidopsis thaliana] >gi|25354481|pir||A96795
MRPDTAASASPTPKKKPDSKAALDLASWSFNVTTSVGLIMVNKALMATYGFTFATTLTGLHFATTTVMTLVFRWVGLSQPSQLPLPDLAKFVVFSNLSIVGMNVSLMWNSVGFYQVAKLCMIPASCLLEVVLDRVHYSRDTRLSIAVVLAGVAVCTVTDVSVNARGLVAAVVAVWSTALQQYYVHFLQRKHSLNSFSLLGHTAPAQAGSLLLAGPFVDYLLTGQRVDHFSFSSLALLFLALSCFIAIGVNLSQFICIGRFSAVSFQVLGHMKTVLVLSLGFLFFGKEGLSLQVVVGMALAVLGMVWYGNASAKPGGKERRGKDLPVSLKQDKDDTDK

SEQ ID NO: 9877 - protein, 298 aa, Zea mays subsp. mays
  peptide (1)..(298): Ceres Seq. ID no. 12382189
  misc_feature (1)..(298): Homolog of NCBI NO: 18420440 NR Description: putative protein; protein id: At4g39390.1, by cDNA: 35002., supported by cDNA: gi_20259515 [Arabidopsis >gi|20259516|gb|AAM13878.1| unknown protein [Arabidopsis
  misc_feature (1)..(298): Homolog of NCBI NO: 21593003 NR Description: unknown [Arabidopsis thaliana]
  misc_feature (1)..(298): Homolog of NCBI NO: 7486049 NR Description: hypothetical protein F23K16.20 - Arabidopsis >gi|5042155|emb|CAB44674.1| putative protein [Arabidopsis >gi|7270923|emb|CAB80602.1| putative protein [Arabidopsis
  misc_feature (1)..(297): Homolog of NCBI NO: 30313364 NR Description: putative transmembrane protein [Oryza sativa]
  misc_feature (1)..(297): Homolog of NCBI NO: 18399097 NR Description: expressed protein; protein id: At1g34020.1, by cDNA: 7642. [Arabidopsis thaliana] >gi|25354483|pir||A86464
  misc_feature (1)..(291): Homolog of NCBI NO: 15234794 NR Description: hypothetical protein; protein id: At4g09810.1
  misc_feature (1)..(297): Homolog of NCBI NO: 21595054 NR Description: unknown [Arabidopsis thaliana]
  misc_feature (1)..(286): Homolog of NCBI NO: 18394949 NR Description: expressed protein; protein id: At1g21070.1, by cDNA: 108746. [Arabidopsis thaliana] >gi|25354485|pir||G86343
  misc_feature (1)..(286): Homolog of NCBI NO: 21536703 NR Description: unknown [Arabidopsis thaliana]
  misc_feature (1)..(297): Homolog of NCBI NO: 18411172 NR Description: expressed protein; protein id: At1g76670.1, by cDNA: gi_14532697, supported by cDNA: gi_16604379, supported cDNA: gi_18491194 [Arabidopsis thaliana] >gi|25354481|pir||A96795
MVNKALMATYGFTFATTLTGLHFATTTVMTLVFRWVGLSQPSQLPLPDLAKFVVFSNLSIVGMNVSLMWNSVGFYQVAKLCMIPASCLLEVVLDRVHYSRDTRLSIAVVLAGVAVCTVTDVSVNARGLVAAVVAVWSTALQQYYVHFLQRKHSLNSFSLLGHTAPAQAGSLLLAGPFVDYLLTGQRVDHFSFSSLALLFLALSCFIAIGVNLSQFICIGRFSAVSFQVLGHMKTVLVLSLGFLFFGKEGLSLQVVVGMALAVLGMVWYGNASAKPGGKERRGKDLPVSLKQDKDDTDK

SEQ ID NO: 9878 - protein, 292 aa, Zea mays subsp. mays
  peptide (1)..(292): Ceres Seq. ID no. 12382190
  misc_feature (1)..(292): Homolog of NCBI NO: 18420440 NR Description: putative protein; protein id: At4g39390.1, by cDNA: 35002., supported by cDNA: gi_20259515 [Arabidopsis >gi|20259516|gb|AAM13878.1| unknown protein [Arabidopsis
  misc_feature (1)..(292): Homolog of NCBI NO: 21593003 NR Description: unknown [Arabidopsis thaliana]
  misc_feature (1)..(292): Homolog of NCBI NO: 7486049 NR Description: hypothetical protein F23K16.20 - Arabidopsis >gi|5042155|emb|CAB44674.1| putative protein [Arabidopsis >gi|7270923|emb|CAB80602.1| putative protein [Arabidopsis
  misc_feature (1)..(291): Homolog of NCBI NO: 30313364 NR Description: putative transmembrane protein [Oryza sativa]
  misc_feature (1)..(291): Homolog of NCBI NO: 18399097 NR Description: expressed protein; protein id: At1g34020.1, by cDNA: 7642. [Arabidopsis thaliana] >gi|25354483|pir||A86464
  misc_feature (1)..(285): Homolog of NCBI NO: 15234794 NR Description: hypothetical protein; protein id: At4g09810.1
  misc_feature (1)..(291): Homolog of NCBI NO: 21595054 NR Description: unknown [Arabidopsis thaliana]
  misc_feature (1)..(280): Homolog of NCBI NO: 18394949 NR Description: expressed protein; protein id: At1g21070.1, by cDNA: 108746. [Arabidopsis thaliana] >gi|25354485|pir||G86343
  misc_feature (1)..(280): Homolog of NCBI NO: 21536703 NR Description: unknown [Arabidopsis thaliana]
  misc_feature (1)..(291): Homolog of NCBI NO: 18411172 NR Description: expressed protein; protein id: At1g76670.1, by cDNA: gi_14532697, supported by cDNA: gi_16604379, supported cDNA: gi_18491194 [Arabidopsis thaliana] >gi|25354481|pir||A96795
MATYGFTFATTLTGLHFATTTVMTLVFRWVGLSQPSQLPLPDLAKFVVFSNLSIVGMNVSLMWNSVGFYQVAKLCMIPASCLLEVVLDRVHYSRDTRLSIAVVLAGVAVCTVTDVSVNARGLVAAVVAVWSTALQQYYVHFLQRKHSLNSFSLLGHTAPAQAGSLLLAGPFVDYLLTGQRVDHFSFSSLALLFLALSCFIAIGVNLSQFICIGRFSAVSFQVLGHMKTVLVLSLGFLFFGKEGLSLQVVVGMALAVLGMVWYGNASAKPGGKERRGKDLPVSLKQDKDDTDK

SEQ ID NO: 9879 - DNA, 1499 bp, Zea mays subsp. mays
  misc_feature (1)..(1499): Ceres Seq. ID no. 12356783
  misc_feature: MA Experiment ID: 108527 Result: Up-regulated in Transcription
  misc_feature: MA Experiment 108527 PARAMETER Experiment Name: Zm_5mM_NO_P Parameter: Age (day) Value: 8
  misc_feature: MA Experiment 108527 PARAMETER Experiment Name: Zm_5mM_NO_P Parameter: Organism Value: Zea mays
  misc_feature: MA Experiment 108527 PARAMETER Experiment Name: Zm_5mM_NO_P Parameter: Plant Line Value: 35A19
  misc_feature: MA Experiment 108527 PARAMETER Experiment Name: Zm_5mM_NO_P Parameter: Timepoint (hr) Value: 6
  misc_feature: MA Experiment 108527 PARAMETER Experiment Name: Zm_5mM_NO_P Parameter: Tissue Value: Aerial
  misc_feature: MA Experiment 108527 PARAMETER Experiment Name: Zm_5mM_NO_P Parameter: Treatment Value: 5mM NO vs. No Treatment
  misc_feature: MA Experiment ID: 108529 Result: Up-regulated in Transcription
  misc_feature: MA Experiment 108529 PARAMETER Experiment Name: Zm_Imbibed_Seeds_P Parameter: Age (day) Value: 5 vs. 2
  misc_feature: MA Experiment 108529 PARAMETER Experiment Name: Zm_Imbibed_Seeds_P Parameter: Organism Value: Zea mays
  misc_feature: MA Experiment 108529 PARAMETER Experiment Name: Zm_Imbibed_Seeds_P Parameter: Plant Line Value: 35A19
  misc_feature: MA Experiment 108529 PARAMETER Experiment Name: Zm_Imbibed_Seeds_P Parameter: Tissue Value: Roots vs. Embryo
  misc_feature: MA Experiment ID: 108535 Result: Down-regulated in Transcription
  misc_feature: MA Experiment 108535 PARAMETER Experiment Name: Zm_Meristem_P Parameter: Age (day) Value: 8
  misc_feature: MA Experiment 108535 PARAMETER Experiment Name: Zm_Meristem_P Parameter: Organism Value: Zea mays
  misc_feature: MA Experiment 108535 PARAMETER Experiment Name: Zm_Meristem_P Parameter: Plant Line Value: 35A19
  misc_feature: MA Experiment 108535 PARAMETER Experiment Name: Zm_Meristem_P Parameter: Tissue Value: Root Meristem vs. Above Root Meristem
  misc_feature: MA Experiment ID: 20000478 Result: Up-regulated in Transcription
  misc_feature: MA Experiment 20000478 PARAMETER Experiment Name: Zm_5mM_SA_P Parameter: Age (day) Value: 11
  misc_feature: MA Experiment 20000478 PARAMETER Experiment Name: Zm_5mM_SA_P Parameter: Organism Value: Zea mays
  misc_feature: MA Experiment 20000478 PARAMETER Experiment Name: Zm_5mM_SA_P Parameter: Plant Line Value: 35A19
  misc_feature: MA Experiment 20000478 PARAMETER Experiment Name: Zm_5mM_SA_P Parameter: Timepoint (hr) Value: 72
  misc_feature: MA Experiment 20000478 PARAMETER Experiment Name: Zm_5mM_SA_P Parameter: Tissue Value: Aerial
  misc_feature: MA Experiment 20000478 PARAMETER Experiment Name: Zm_5mM_SA_P Parameter: Treatment Value: 5mM SA vs. No Treatment
agggccagttccgtccgacgcgtcgcaacaacccccagggctcaattgacgcgcgggggcgtttcggtcatccagtcatccccctcccctgccaaaggcgaagagcagaagcagaagcagcagcagcaggcgaagaggcagtggtagacatgccaaggtcatcagccggggcgtcatgcacagcagttgaccattctgagcagagcagaaaggatgatgaatatgagaggctggttacaagagctcaacatgcaacatctgatgttggcacgacaattttatctgagcaaccaaagtcaagatctttcatttggtggatgaaagttctgcttggctgcttccttcttatattagtgggctatgtcttcgtgaaatggggggtcccctttgtctttgagaaggttctcttgccaatcatgcaatgggaagccagtgcttttgggcgtccagtattagctattgttctcgttgcatctttggctctctttccagttattctagttccttctggaccttctatgtggttagcaggaatgatctttggatatggttggggtttcttgattataatggccgggagtactattggcatggtggttccatattggattggttcattgttccgtgaacgtctgcatgtatggctgacaaagtggcctcagcagatagcactaataaaactcgcgggtgaaggaaattggttccagcagtttcgggttgtcgcgcttttcagaatctcaccattcccatatacaatttttaattatgccgtgactgtgacagaaattaagttcaacccttatctatgtggttctgttgctggaatggtacctgaggccttcatttatatctacagtgggcgtttaatacgtacattggctgacatgaagtacggcaactataaaatgacaccagtggaaatagcatacaacgccatttccttcgtcatcgctatcgccctcacggtcgccttcacggtgtacgcgaagagagctctgggtgacataaaaagtccggacgatggcatcggtaaagacgaagaagatcacggcccaaatggctcaggggtgcgtatgaatcgtcgtcaggagcgtgccgacgcacgttacatagaactagatgatatgtgatggtgtgttggcccggatcttgcttggaaggaggcaccagtaggtcattaggtgcacggctacggtaggtagctagctatagtttacaagaggaggctaaaataatccacacccagctgacgtggtttgcgtgattcgtttcgtgtgctttgcccactgcactgccatactgtctgaatctgaaggtgcagggctactcactactgagttactgaccgagcgatgctgctctcaacgatgtttctgtgaccatcagcgtatcatccagtccttgatctgaagcctacactggagcttcatgttgaagcatacattggacttgagtagtacatttgtatataacgtaactgctaatagagttagcatatg

SEQ ID NO: 9880 - protein, 375 aa, Zea mays subsp. mays
  peptide (1)..(375): Ceres Seq. ID no. 12356784
  misc_feature (99)..(373): Homolog of NCBI NO: 34913316 NR Description: P0519E12.36 [Oryza sativa (japonica >gi|22093829|dbj|BAC07116.1| hypothetical protein [Oryza sativa
  misc_feature (95)..(342): Homolog of NCBI NO: 30685958 NR Description: expressed protein [Arabidopsis thaliana] unknown protein [Arabidopsis thaliana]
  misc_feature (66)..(339): Homolog of NCBI NO: 15221330 NR Description: hypothetical protein; protein id: At1g12450.1
  misc_feature (64)..(342): Homolog of NCBI NO: 15234386 NR Description: putative protein; protein id: At4g12000.1, by cDNA: gi_18176120, supported by cDNA: gi_20465310 [Arabidopsis
  misc_feature (214)..(347): Homolog of NCBI NO: 25410981 NR Description: hypothetical protein At2g02370 [imported] -
  misc_feature (66)..(213): Homolog of NCBI NO: 8778630 NR Description: F5O11.19 [Arabidopsis thaliana]
  misc_feature (283)..(339): Homolog of NCBI NO: 8778630 NR Description: F5O11.19 [Arabidopsis thaliana]
  misc_feature (186)..(342): Homolog of NCBI NO: 7486891 NR Description: hypothetical protein T12H17.240 - Arabidopsis >gi|2832606|emb|CAA16570.1| predicted protein [Arabidopsis >gi|3292810|emb|CAA19800.1| putative protein [Arabidopsis
  misc_feature (50)..(370): Homolog of NCBI NO: 31249711 NR Description: hypothetical protein [Oryza sativa (japonica
  misc_feature (62)..(347): Homolog of NCBI NO: 18395356 NR Description: expressed protein; protein id: At2g02370.1, by cDNA: gi_13605570, supported by cDNA: gi_16323325 [Arabidopsis >gi|13605571|gb|AAK32779.1|AF361611_1 At2g02370/T16F16.16
GQFRPTRRNNPQGSIDARGRFGHPVIPLPCQRRRAEAEAAAAGEEAVVDMPRSSAGASCTAVDHSEQSRKDDEYERLVTRAQHATSDVGTTILSEQPKSRSFIWWMKVLLGCFLLILVGYVFVKWGVPFVFEKVLLPIMQWEASAFGRPVLAIVLVASLALFPVILVPSGPSMWLAGMIFGYGWGFLIIMAGSTIGMVVPYWIGSLFRERLHVWLTKWPQQIALIKLAGEGNWFQQFRVVALFRISPFPYTIFNYAVTVTEIKFNPYLCGSVAGMVPEAFIYIYSGRLIRTLADMKYGNYKMTPVEIAYNAISFVIAIALTVAFTVYAKRALGDIKSPDDGIGKDEEDHGPNGSGVRMNRRQERADARYIELDDM

SEQ ID NO: 9881 - protein, 326 aa, Zea mays subsp. mays
  peptide (1)..(326): Ceres Seq. ID no. 12356785
  misc_feature (1)..(321): Homolog of NCBI NO: 31249711 NR Description: hypothetical protein [Oryza sativa (japonica
  misc_feature (13)..(298): Homolog of NCBI NO: 18395356 NR Description: expressed protein; protein id: At2g02370.1, by cDNA: gi_13605570, supported by cDNA: gi_16323325 [Arabidopsis >gi|13605571|gb|AAK32779.1|AF361611_1 At2g02370/T16F16.16
  misc_feature (50)..(324): Homolog of NCBI NO: 34913316 NR Description: P0519E12.36 [Oryza sativa (japonica >gi|22093829|dbj|BAC07116.1| hypothetical protein [Oryza sativa
  misc_feature (46)..(293): Homolog of NCBI NO: 30685958 NR Description: expressed protein [Arabidopsis thaliana] unknown protein [Arabidopsis thaliana]
  misc_feature (17)..(290): Homolog of NCBI NO: 15221330 NR Description: hypothetical protein; protein id: At1g12450.1
  misc_feature (15)..(293): Homolog of NCBI NO: 15234386 NR Description: putative protein; protein id: At4g12000.1, by cDNA: gi_18176120, supported by cDNA: gi_20465310 [Arabidopsis
  misc_feature (165)..(298): Homolog of NCBI NO: 25410981 NR Description: hypothetical protein At2g02370 [imported] -
  misc_feature (17)..(164): Homolog of NCBI NO: 8778630 NR Description: F5O11.19 [Arabidopsis thaliana]
  misc_feature (234)..(290): Homolog of NCBI NO: 8778630 NR Description: F5O11.19 [Arabidopsis thaliana]
  misc_feature (137)..(293): Homolog of NCBI NO: 7486891 NR Description: hypothetical protein T12H17.240 - Arabidopsis >gi|2832606|emb|CAA16570.1| predicted protein [Arabidopsis >gi|3292810|emb|CAA19800.1| putative protein [Arabidopsis
MPRSSAGASCTAVDHSEQSRKDDEYERLVTRAQHATSDVGTTILSEQPKSRSFIWWMKVLLGCFLLILVGYVFVKWGVPFVFEKVLLPIMQWEASAFGRPVLAIVLVASLALFPVILVPSGPSMWLAGMIFGYGWGFLIIMAGSTIGMVVPYWIGSLFRERLHVWLTKWPQQIALIKLAGEGNWFQQFRVVALFRISPFPYTIFNYAVTVTEIKFNPYLCGSVAGMVPEAFIYIYSGRLIRTLADMKYGNYKMTPVEIAYNAISFVIAIALTVAFTVYAKRALGDIKSPDDGIGKDEEDHGPNGSGVRMNRRQERADARYIELDDM

SEQ ID NO: 9882 - protein, 270 aa, Zea mays subsp. mays
  peptide (1)..(270): Ceres Seq. ID no. 12356786
  misc_feature (1)..(265): Homolog of NCBI NO: 31249711 NR Description: hypothetical protein [Oryza sativa (japonica
  misc_feature (1)..(242): Homolog of NCBI NO: 18395356 NR Description: expressed protein; protein id: At2g02370.1, by cDNA: gi_13605570, supported by cDNA: gi_16323325 [Arabidopsis >gi|13605571|gb|AAK32779.1|AF361611_1 At2g02370/T16F16.16
  misc_feature (1)..(268): Homolog of NCBI NO: 34913316 NR Description: P0519E12.36 [Oryza sativa (japonica >gi|22093829|dbj|BAC07116.1| hypothetical protein [Oryza sativa
  misc_feature (1)..(237): Homolog of NCBI NO: 30685958 NR Description: expressed protein [Arabidopsis thaliana] unknown protein [Arabidopsis thaliana]
  misc_feature (1)..(234): Homolog of NCBI NO: 15221330 NR Description: hypothetical protein; protein id: At1g12450.1
  misc_feature (1)..(237): Homolog of NCBI NO: 15234386 NR Description: putative protein; protein id: At4g12000.1, by cDNA: gi_18176120, supported by cDNA: gi_20465310 [Arabidopsis
  misc_feature (109)..(242): Homolog of NCBI NO: 25410981 NR Description: hypothetical protein At2g02370 [imported] -
  misc_feature (1)..(108): Homolog of NCBI NO: 8778630 NR Description: F5O11.19 [Arabidopsis thaliana]
  misc_feature (178)..(234): Homolog of NCBI NO: 8778630 NR Description: F5O11.19 [Arabidopsis thaliana]
  misc_feature (81)..(237): Homolog of NCBI NO: 7486891 NR Description: hypothetical protein T12H17.240 - Arabidopsis >gi|2832606|emb|CAA16570.1| predicted protein [Arabidopsis >gi|3292810|emb|CAA19800.1| putative protein [Arabidopsis
MKVLLGCFLLILVGYVFVKWGVPFVFEKVLLPIMQWEASAFGRPVLAIVLVASLALFPVILVPSGPSMWLAGMIFGYGWGFLIIMAGSTIGMVVPYWIGSLFRERLHVWLTKWPQQIALIKLAGEGNWFQQFRVVALFRISPFPYTIFNYAVTVTEIKFNPYLCGSVAGMVPEAFIYIYSGRLIRTLADMKYGNYKMTPVEIAYNAISFVIAIALTVAFTVYAKRALGDIKSPDDGIGKDEEDHGPNGSGVRMNRRQERADARYIELDDM

SEQ ID NO: 9883 - DNA, 839 bp, Zea mays subsp. mays
  misc_feature (1)..(839): Ceres Seq. ID no. 12354220
  misc_feature: MA Experiment ID: 108528 Result: Down-regulated in Transcription
  misc_feature: MA Experiment 108528 PARAMETER Experiment Name: Zm_Imbibed_Seeds_P Parameter: Age (day) Value: 5 vs. 2
  misc_feature: MA Experiment 108528 PARAMETER Experiment Name: Zm_Imbibed_Seeds_P Parameter: Organism Value: Zea mays
  misc_feature: MA Experiment 108528 PARAMETER Experiment Name: Zm_Imbibed_Seeds_P Parameter: Plant Line Value: 35A19
  misc_feature: MA Experiment 108528 PARAMETER Experiment Name: Zm_Imbibed_Seeds_P Parameter: Tissue Value: Aerial vs. Embryo
  misc_feature: MA Experiment ID: 108529 Result: Down-regulated in Transcription
  misc_feature: MA Experiment 108529 PARAMETER Experiment Name: Zm_Imbibed_Seeds_P Parameter: Age (day) Value: 5 vs. 2
  misc_feature: MA Experiment 108529 PARAMETER Experiment Name: Zm_Imbibed_Seeds_P Parameter: Organism Value: Zea mays
  misc_feature: MA Experiment 108529 PARAMETER Experiment Name: Zm_Imbibed_Seeds_P Parameter: Plant Line Value: 35A19
  misc_feature: MA Experiment 108529 PARAMETER Experiment Name: Zm_Imbibed_Seeds_P Parameter: Tissue Value: Roots vs. Embryo
  misc_feature: MA Experiment ID: 108530 Result: Down-regulated in Transcription
  misc_feature: MA Experiment 108530 PARAMETER Experiment Name: Zm_Imbibed_Seeds_P Parameter: Age (day) Value: 6 vs. 2
  misc_feature: MA Experiment 108530 PARAMETER Experiment Name: Zm_Imbibed_Seeds_P Parameter: Organism Value: Zea mays
  misc_feature: MA Experiment 108530 PARAMETER Experiment Name: Zm_Imbibed_Seeds_P Parameter: Plant Line Value: 35A19
  misc_feature: MA Experiment 108530 PARAMETER Experiment Name: Zm_Imbibed_Seeds_P Parameter: Tissue Value: Aerial vs. Embryo
  misc_feature: MA Experiment ID: 108533 Result: Down-regulated in Transcription
  misc_feature: MA Experiment 108533 PARAMETER Experiment Name: Zm_4deg_Cold_P Parameter: Age (hr) Value: 8
  misc_feature: MA Experiment 108533 PARAMETER Experiment Name: Zm_4deg_Cold_P Parameter: Organism Value: Zea mays
  misc_feature: MA Experiment 108533 PARAMETER Experiment Name: Zm_4deg_Cold_P Parameter: Plant Line Value: 35A19
  misc_feature: MA Experiment 108533 PARAMETER Experiment Name: Zm_4deg_Cold_P Parameter: Temperature (deg C) Value: 4 vs. 22
  misc_feature: MA Experiment 108533 PARAMETER Experiment Name: Zm_4deg_Cold_P Parameter: Timepoint (hr) Value: 1
  misc_feature: MA Experiment 108533 PARAMETER Experiment Name: Zm_4deg_Cold_P Parameter: Tissue Value: Aerial
  misc_feature: MA Experiment ID: 108534 Result: Down-regulated in Transcription
  misc_feature: MA Experiment 108534 PARAMETER Experiment Name: Zm_4deg_Cold_P Parameter: Age (hr) Value: 8
  misc_feature: MA Experiment 108534 PARAMETER Experiment Name: Zm_4deg_Cold_P Parameter: Organism Value: Zea mays
  misc_feature: MA Experiment 108534 PARAMETER Experiment Name: Zm_4deg_Cold_P Parameter: Plant Line Value: 35A19
  misc_feature: MA Experiment 108534 PARAMETER Experiment Name: Zm_4deg_Cold_P Parameter: Temperature (deg C) Value: 4 vs. 22
  misc_feature: MA Experiment 108534 PARAMETER Experiment Name: Zm_4deg_Cold_P Parameter: Timepoint (hr) Value: 6
  misc_feature: MA Experiment 108534 PARAMETER Experiment Name: Zm_4deg_Cold_P Parameter: Tissue Value: Aerial
  misc_feature: MA Experiment ID: 108535 Result: Up-regulated in Transcription
  misc_feature: MA Experiment 108535 PARAMETER Experiment Name: Zm_Meristem_P Parameter: Age (day) Value: 8
  misc_feature: MA Experiment 108535 PARAMETER Experiment Name: Zm_Meristem_P Parameter: Organism Value: Zea mays
  misc_feature: MA Experiment 108535 PARAMETER Experiment Name: Zm_Meristem_P Parameter: Plant Line Value: 35A19
  misc_feature: MA Experiment 108535 PARAMETER Experiment Name: Zm_Meristem_P Parameter: Tissue Value: Root Meristem vs. Above Root Meristem
  misc_feature: MA Experiment ID: 108544 Result: Down-regulated in Transcription
  misc_feature: MA Experiment ID: 20000108 Result: Up-regulated in Transcription
  misc_feature: MA Experiment 20000108 PARAMETER Experiment Name: Zm_Root-Tips_P Parameter: Age (day) Value: 12
  misc_feature: MA Experiment 20000108 PARAMETER Experiment Name: Zm_Root-Tips_P Parameter: Organism Value: Zea mays
  misc_feature: MA Experiment 20000108 PARAMETER Experiment Name: Zm_Root-Tips_P Parameter: Tissue Value: Root tips vs. Root mid region    35
  misc_feature: MA Experiment 20000108 PARAMETER Experiment Name: Zm_Root-Tips_P Parameter: Tissue Value: Root tips vs. Root mid region   Sequence Listing-Misc Features (4)
  misc_feature: MA Experiment ID: 20000487 Result: Up-regulated in Transcription
  misc_feature: MA Experiment 20000487 PARAMETER Experiment Name: Zm_50mM_NH4NO3_L_to_H_P Parameter: Organism Value: Zea mays
  misc_feature: MA Experiment 20000487 PARAMETER Experiment Name: Zm_50mM_NH4NO3_L_to_H_P Parameter: Timepoint (hr) Value: 4
  misc_feature: MA Experiment 20000487 PARAMETER Experiment Name: Zm_50mM_NH4NO3_L_to_H_P Parameter: Tissue Value: Leaves
  misc_feature: MA Experiment 20000487 PARAMETER Experiment Name: Zm_50mM_NH4NO3_L_to_H_P Parameter: Treatment Value: 50mM NH4NO3 vs. 100mM Mannitol
  misc_feature: MA Experiment ID: 20000488 Result: Up-regulated in Transcription
  misc_feature: MA Experiment 20000488 PARAMETER Experiment Name: Zm_50mM_NH4NO3_L_to_H_P Parameter: Organism Value: Zea mays
  misc_feature: MA Experiment 20000488 PARAMETER Experiment Name: Zm_50mM_NH4NO3_L_to_H_P Parameter: Timepoint (hr) Value: 8
  misc_feature: MA Experiment 20000488 PARAMETER Experiment Name: Zm_50mM_NH4NO3_L_to_H_P Parameter: Tissue Value: Leaves
  misc_feature: MA Experiment 20000488 PARAMETER Experiment Name: Zm_50mM_NH4NO3_L_to_H_P Parameter: Treatment Value: 50mM NH4NO3 vs. 100mM Mannitol
  misc_feature: MA Experiment ID: 20000626 Result: Up-regulated in Transcription
  misc_feature: MA Experiment 20000626 PARAMETER Experiment Name: Zm_Herbicide-Treatments_P Parameter: Timepoint (hr) Value: 12
  misc_feature: MA Experiment 20000626 PARAMETER Experiment Name: Zm_Herbicide-Treatments_P Parameter: Tissue Value: Aerial
  misc_feature: MA Experiment 20000626 PARAMETER Experiment Name: Zm_Herbicide-Treatments_P Parameter: Treatment Value: Roundup vs. No Treatment
  misc_feature: MA Experiment ID: 20001606 Result: Up-regulated in Transcription
  misc_feature: MA Experiment 20001606 PARAMETER Experiment Name: Zm_50ppm_KNO3_L-to-H_P Parameter: Age (day) Value: 19
  misc_feature: MA Experiment 20001606 PARAMETER Experiment Name: Zm_50ppm_KNO3_L-to-H_P Parameter: Organism Value: Zea mays
  misc_feature: MA Experiment 20001606 PARAMETER Experiment Name: Zm_50ppm_KNO3_L-to-H_P Parameter: Plant Line Value: 35A19
  misc_feature: MA Experiment 20001606 PARAMETER Experiment Name: Zm_50ppm_KNO3_L-to-H_P Parameter: Timepoint (hr) Value: 8
  misc_feature: MA Experiment 20001606 PARAMETER Experiment Name: Zm_50ppm_KNO3_L-to-H_P Parameter: Tissue Value: Shoots
  misc_feature: MA Experiment 20001606 PARAMETER Experiment Name: Zm_50ppm_KNO3_L-to-H_P Parameter: Treatment Value: 50ppm KNO3 vs. 50ppm KCl
acagtctcgcagccgccgcgatctgctagcccccgaaccctagctcaatgggaaccgccgcttctccttctccctcactttccctagacacagccgcctcccgtcctgatcctccttccccggaggccaccgctacaccagccaaagaagatcaccagcactccgcctccgacgccgcgaccgccgcagctggcggcggcgcagacgatgcggcggcggctccttctgttggaggcggcgcggaagaggctgctgagacggtggtcatcgatgcctccgcggtggccagcggagcaggggagggggaggaggaggaggagcaaggggagtgcgggttctgtctcttcatgaagggcggcggctgcaaggacgagttcgtcgcgtgggagaagtgcgtggaggagacggatgccgcggatgccagcattgacgtcgtggagcggtgccaagacgtcacggccgcgctgcggaagtgcatggacgcgcacgccgcctactacgagcctatcctccgggccgagcgcgccatggctgcggacctcgaggcctttcaggcccaagaagccgcctccgactccgcggcgtcggaggaaggccagaaggaggcggcagcggcggccgaggcagcgccgcgtccgtcagacgaaggccagaataagcaggtggctgaggcggcagttgcggaggagagcagagatcctgcagcctgattgggcgaaaaaaggcagcggcgtcttcaattttttgtgagggatttgaggatatgaattccgtttgtaccttaggagagcatcaattaacattttgtgagggggatagatttctgtccttttctcttt

SEQ ID NO: 9884 - protein, 220 aa, Zea mays subsp. mays
  peptide (1)..(220): Ceres Seq. ID no. 12354221
  misc_feature (40)..(220): Homolog of NCBI NO: 34394883 NR Description: unknown protein [Oryza sativa (japonica
  misc_feature (1)..(194): Homolog of NCBI NO: 8778401 NR Description: F16A14.27 [Arabidopsis thaliana]
  misc_feature (1)..(194): Homolog of NCBI NO: 30683589 NR Description: expressed protein [Arabidopsis thaliana]
  misc_feature (23)..(194): Homolog of NCBI NO: 21592562 NR Description: unknown [Arabidopsis thaliana]
  misc_feature (43)..(172): Homolog of NCBI NO: 15242783 NR Description: putative protein; protein id: At5g57570.1 thaliana] >gi|9758318|dbj|BAB08792.1|
  misc_feature (87)..(215): Homolog of NCBI NO: 15242817 NR Description: putative protein; protein id: At5g57640.1 thaliana] >gi|9758326|dbj|BAB08800.1|
  misc_feature (62)..(166): Homolog of NCBI NO: 15241716 NR Description: putative protein; protein id: At5g02210.1
MGTAASPSPSLSLDTAASRPDPPSPEATATPAKEDHQHSASDAATAAAGGGADDAAAAPSVGGGAEEAAETVVIDASAVASGAGEGEEEEEQGECGFCLFMKGGGCKDEFVAWEKCVEETDAADASIDVVERCQDVTAALRKCMDAHAAYYEPILRAERAMAADLEAFQAQEAASDSAASEEGQKEAAAAAEAAPRPSDEGQNKQVAEAAVAEESRDPAA

SEQ ID NO: 9885 - protein, 120 aa, Zea mays subsp. mays
  peptide (1)..(120): Ceres Seq. ID no. 12354222
  misc_feature (1)..(120): Homolog of NCBI NO: 34394883 NR Description: unknown protein [Oryza sativa (japonica
  misc_feature (1)..(94): Homolog of NCBI NO: 8778401 NR Description: F16A14.27 [Arabidopsis thaliana]
  misc_feature (1)..(94): Homolog of NCBI NO: 30683589 NR Description: expressed protein [Arabidopsis thaliana]
  misc_feature (1)..(94): Homolog of NCBI NO: 21592562 NR Description: unknown [Arabidopsis thaliana]
  misc_feature (1)..(72): Homolog of NCBI NO: 15242783 NR Description: putative protein; protein id: At5g57570.1 thaliana] >gi|9758318|dbj|BAB08792.1|
  misc_feature (1)..(115): Homolog of NCBI NO: 15242817 NR Description: putative protein; protein id: At5g57640.1 thaliana] >gi|9758326|dbj|BAB08800.1|
  misc_feature (1)..(66): Homolog of NCBI NO: 15241716 NR Description: putative protein; protein id: At5g02210.1
MKGGGCKDEFVAWEKCVEETDAADASIDVVERCQDVTAALRKCMDAHAAYYEPILRAERAMAADLEAFQAQEAASDSAASEEGQKEAAAAAEAAPRPSDEGQNKQVAEAAVAEESRDPAA

SEQ ID NO: 9886 - protein, 113 aa, Zea mays subsp. mays
  peptide (1)..(113): Ceres Seq. ID no. 12354223
MPRMPALTSWSGAKTSRPRCGSAWTRTPPTTSLSSGPSAPWLRTSRPFRPKKPPPTPRRRRKARRRRQRRPRQRRVRQTKARISRWLRRQLRRRAEILQPDWAKKGSGVFNFL

SEQ ID NO: 9887 - DNA, 839 bp, Zea mays subsp. mays
  misc_feature (1)..(839): Ceres Seq. ID no. 12359809
  misc_feature: MA Experiment ID: 108523 Result: Down-regulated in Transcription
  misc_feature: MA Experiment 108523 PARAMETER Experiment Name: Zm_42deg_Heat_P Parameter: Age (day) Value: 8
  misc_feature: MA Experiment 108523 PARAMETER Experiment Name: Zm_42deg_Heat_P Parameter: Organism Value: Zea mays
  misc_feature: MA Experiment 108523 PARAMETER Experiment Name: Zm_42deg_Heat_P Parameter: Plant Line Value: 35A19
  misc_feature: MA Experiment 108523 PARAMETER Experiment Name: Zm_42deg_Heat_P Parameter: Temperature (deg C) Value: 42 vs. 22
  misc_feature: MA Experiment 108523 PARAMETER Experiment Name: Zm_42deg_Heat_P Parameter: Timepoint (hr) Value: 6
  misc_feature: MA Experiment 108523 PARAMETER Experiment Name: Zm_42deg_Heat_P Parameter: Tissue Value: Aerial
  misc_feature: MA Experiment ID: 108527 Result: Down-regulated in Transcription
  misc_feature: MA Experiment 108527 PARAMETER Experiment Name: Zm_5mM_NO_P Parameter: Age (day) Value: 8
  misc_feature: MA Experiment 108527 PARAMETER Experiment Name: Zm_5mM_NO_P Parameter: Organism Value: Zea mays
  misc_feature: MA Experiment 108527 PARAMETER Experiment Name: Zm_5mM_NO_P Parameter: Plant Line Value: 35A19
  misc_feature: MA Experiment 108527 PARAMETER Experiment Name: Zm_5mM_NO_P Parameter: Timepoint (hr) Value: 6
  misc_feature: MA Experiment 108527 PARAMETER Experiment Name: Zm_5mM_NO_P Parameter: Tissue Value: Aerial
  misc_feature: MA Experiment 108527 PARAMETER Experiment Name: Zm_5mM_NO_P Parameter: Treatment Value: 5mM NO vs. No Treatment
  misc_feature: MA Experiment ID: 108528 Result: Up-regulated in Transcription
  misc_feature: MA Experiment 108528 PARAMETER Experiment Name: Zm_Imbibed_Seeds_P Parameter: Age (day) Value: 5 vs. 2
  misc_feature: MA Experiment 108528 PARAMETER Experiment Name: Zm_Imbibed_Seeds_P Parameter: Organism Value: Zea mays
  misc_feature: MA Experiment 108528 PARAMETER Experiment Name: Zm_Imbibed_Seeds_P Parameter: Plant Line Value: 35A19
  misc_feature: MA Experiment 108528 PARAMETER Experiment Name: Zm_Imbibed_Seeds_P Parameter: Tissue Value: Aerial vs. Embryo
  misc_feature: MA Experiment ID: 108529 Result: Down-regulated in Transcription
  misc_feature: MA Experiment 108529 PARAMETER Experiment Name: Zm_Imbibed_Seeds_P Parameter: Age (day) Value: 5 vs. 2
  misc_feature: MA Experiment 108529 PARAMETER Experiment Name: Zm_Imbibed_Seeds_P Parameter: Organism Value: Zea mays
  misc_feature: MA Experiment 108529 PARAMETER Experiment Name: Zm_Imbibed_Seeds_P Parameter: Plant Line Value: 35A19
  misc_feature: MA Experiment 108529 PARAMETER Experiment Name: Zm_Imbibed_Seeds_P Parameter: Tissue Value: Roots vs. Embryo
  misc_feature: MA Experiment ID: 108530 Result: Up-regulated in Transcription
  misc_feature: MA Experiment 108530 PARAMETER Experiment Name: Zm_Imbibed_Seeds_P Parameter: Age (day) Value: 6 vs. 2
  misc_feature: MA Experiment 108530 PARAMETER Experiment Name: Zm_Imbibed_Seeds_P Parameter: Organism Value: Zea mays
  misc_feature: MA Experiment 108530 PARAMETER Experiment Name: Zm_Imbibed_Seeds_P Parameter: Plant Line Value: 35A19
  misc_feature: MA Experiment 108530 PARAMETER Experiment Name: Zm_Imbibed_Seeds_P Parameter: Tissue Value: Aerial vs. Embryo
  misc_feature: MA Experiment ID: 108536 Result: Down-regulated in Transcription
  misc_feature: MA Experiment 108536 PARAMETER Experiment Name: Zm_Meristem_P Parameter: Age (day) Value: 8
  misc_feature: MA Experiment 108536 PARAMETER Experiment Name: Zm_Meristem_P Parameter: Organism Value: Zea mays
  misc_feature: MA Experiment 108536 PARAMETER Experiment Name: Zm_Meristem_P Parameter: Plant Line Value: 35A19
  misc_feature: MA Experiment 108536 PARAMETER Experiment Name: Zm_Meristem_P Parameter: Tissue Value: Shoot Meristem vs. Above Shoot Meristem
  misc_feature: MA Experiment ID: 108543 Result: Up-regulated in Transcription
  misc_feature: MA Experiment ID: 108544 Result: Down-regulated in Transcription
  misc_feature: MA Experiment ID: 108545 Result: Up-regulated in Transcription
  misc_feature: MA Experiment 108545 PARAMETER Experiment Name: Zm_Imbibed_Seeds_P Parameter: Age (day) Value: 3 vs. 2
  misc_feature: MA Experiment 108545 PARAMETER Experiment Name: Zm_Imbibed_Seeds_P Parameter: Organism Value: Zea mays
  misc_feature: MA Experiment 108545 PARAMETER Experiment Name: Zm_Imbibed_Seeds_P Parameter: Plant Line Value: 35A19
  misc_feature: MA Experiment 108545 PARAMETER Experiment Name: Zm_Imbibed_Seeds_P Parameter: Tissue Value: Aerial vs. Embryo
  misc_feature: MA Experiment ID: 108546 Result: Down-regulated in Transcription
  misc_feature: MA Experiment 108546 PARAMETER Experiment Name: Zm_Imbibed_Seeds_P Parameter: Age (day) Value: 3 vs. 2
  misc_feature: MA Experiment 108546 PARAMETER Experiment Name: Zm_Imbibed_Seeds_P Parameter: Organism Value: Zea mays
  misc_feature: MA Experiment 108546 PARAMETER Experiment Name: Zm_Imbibed_Seeds_P Parameter: Plant Line Value: 35A19
  misc_feature: MA Experiment 108546 PARAMETER Experiment Name: Zm_Imbibed_Seeds_P Parameter: Tissue Value: Roots vs. Embryo
  misc_feature: MA Experiment ID: 108547 Result: Up-regulated in Transcription
  misc_feature: MA Experiment 108547 PARAMETER Experiment Name: Zm_Imbibed_Seeds_P Parameter: Age (day) Value: 4 vs. 2
  misc_feature: MA Experiment 108547 PARAMETER Experiment Name: Zm_Imbibed_Seeds_P Parameter: Organism Value: Zea mays
  misc_feature: MA Experiment 108547 PARAMETER Experiment Name: Zm_Imbibed_Seeds_P Parameter: Plant Line Value: 35A19
  misc_feature: MA Experiment 108547 PARAMETER Experiment Name: Zm_Imbibed_Seeds_P Parameter: Tissue Value: Aerial vs. Embryo
  misc_feature: MA Experiment ID: 108688 Result: Down-regulated in Transcription
  misc_feature: MA Experiment 108688 PARAMETER Experiment Name: Zm_Embryos-Flowers__P Parameter: Tissue Value: Immature Flowers vs. Aerial+
  misc_feature: MA Experiment ID: 20000535 Result: Down-regulated in Transcription
  misc_feature: MA Experiment 20000535 PARAMETER Experiment Name: Zm_Hybrid_Seed_Dev_P Parameter: DAP Value: 30 vs. 12
  misc_feature: MA Experiment 20000535 PARAMETER Experiment Name: Zm_Hybrid_Seed_Dev_P Parameter: Organism Value: Zea mays
  misc_feature: MA Experiment 20000535 PARAMETER Experiment Name: Zm_Hybrid_Seed_Dev_P Parameter: Plant Line Value: 35A19
  misc_feature: MA Experiment 20000535 PARAMETER Experiment Name: Zm_Hybrid_Seed_Dev_P Parameter: Tissue Value: Embryo vs. Unfert Floret
  misc_feature: MA Experiment ID: 20000626 Result: Down-regulated in Transcription
  misc_feature: MA Experiment 20000626 PARAMETER Experiment Name: Zm_Herbicide-Treatments_P Parameter: Timepoint (hr) Value: 12
  misc_feature: MA Experiment 20000626 PARAMETER Experiment Name: Zm_Herbicide-Treatments_P Parameter: Tissue Value: Aerial
  misc_feature: MA Experiment 20000626 PARAMETER Experiment Name: Zm_Herbicide-Treatments_P Parameter: Treatment Value: Roundup vs. No Treatment
agcctctcgctctcccgccgacgcgcacgtcctccgcgccgagcccagaggcagacagaggacgcggccatggcgtccatcccgtgcaccttccagctgagcacggcggcgtcgaggagggtgtcgccgcgggtggcggcgcaggggagaggccaaggaggagggggagcggtgctgaggacgccgctgctgggcgcggggaggcggggcctggggtggctgcggccgtcgcggttgagccgcgtggtgccggcgagcgagagcgggcgggcgggtcccacctgctggttcaagttcggcaacaaggacgccgagggtgccggcatctacggcagccaggccagggacgacttcgaccgcgacgacgtcgagcagtacttcaactacatggggatgctggcggtggagggcacctacgacaagatggaggcgctgctgaaccaggacatccaccccgtggacatcctcctcatgctggcagcctccgagggcgaccgccccaagatcgaggagctgctccgcgccggcgccaggttcgacgtcaaggacgtcgacggccggacggcgctcgaccgggccaccgacgagaccagagagttcatcctcggcttcgccgccaagaaggcctgaacgaccatgtgcaggtcaatcgtgcccggttcttctggacatttggctgcatgtaactaaattcttcgttttctggaatcggtggagtgttcaaccgggggtgaacaagctgtttgcagaggtagctttccgtagtcagctgtattcttactgaagactgaggggtgtactgcgacctgccaaattgctcaataaggtcatgcttcgtt

SEQ ID NO: 9888 - protein, 227 aa, Zea mays subsp. mays
  peptide (1)..(227): Ceres Seq. ID no. 12359810
  misc_feature (40)..(207): Homolog of NCBI NO: 29367367 NR Description: calmodulin-related protein [Oryza sativa
PLALPPTRTSSAPSPEADRGRGHGVHPVHLPAEHGGVEEGVAAGGGAGERPRRRGSGAEDAAAGRGEAGPGVAAAVAVEPRGAGERERAGGSHLLVQVRQQGRRGCRHLRQPGQGRLRPRRRRAVLQLHGDAGGGGHLRQDGGAAEPGHPPRGHPPHAGSLRGRPPQDRGAAPRRRQVRRQGRRRPDGARPGHRRDQRVHPRLRRQEGLNDHVQVNRARFFWTFGCM

SEQ ID NO: 9889 - protein, 209 aa, Zea mays subsp. mays
  peptide (1)..(209): Ceres Seq. ID no. 12359811
  misc_feature (24)..(209): Homolog of NCBI NO: 34901972 NR Description: hypothetical protein~similar to Arabidopsis
  misc_feature (14)..(209): Homolog of NCBI NO: 25373264 NR Description: unknown protein [imported] - Arabidopsis thaliana
  misc_feature (67)..(209): Homolog of NCBI NO: 18403267 NR Description: expressed protein; protein id: At1g50900.1, by cDNA: 19056., supported by cDNA: gi_18252244 [Arabidopsis >gi|18252245|gb|AAL61955.1| unknown protein [Arabidopsis
  misc_feature (130)..(209): Homolog of NCBI NO: 33146521 NR Description: unknown protein [Oryza sativa (japonica
SLSLSRRRARPPRRAQRQTEDAAMASIPCTFQLSTAASRRVSPRVAAQGRGQGGGGAVLRTPLLGAGRRGLGWLRPSRLSRVVPASESGRAGPTCWFKFGNKDAEGAGIYGSQARDDFDRDDVEQYFNYMGMLAVEGTYDKMEALLNQDIHPVDILLMLAASEGDRPKIEELLRAGARFDVKDVDGRTALDRATDETREFILGFAAKKA

SEQ ID NO: 9890 - protein, 186 aa, Zea mays subsp. mays
  peptide (1)..(186): Ceres Seq. ID no. 12359812
  misc_feature (1)..(186): Homolog of NCBI NO: 34901972 NR Description: hypothetical protein~similar to Arabidopsis
  misc_feature (1)..(186): Homolog of NCBI NO: 25373264 NR Description: unknown protein [imported] - Arabidopsis thaliana
  misc_feature (44)..(186): Homolog of NCBI NO: 18403267 NR Description: expressed protein; protein id: At1g50900.1, by cDNA: 19056., supported by cDNA: gi_18252244 [Arabidopsis >gi|18252245|gb|AAL61955.1| unknown protein [Arabidopsis
  misc_feature (107)..(186): Homolog of NCBI NO: 33146521 NR Description: unknown protein [Oryza sativa (japonica
MASIPCTFQLSTAASRRVSPRVAAQGRGQGGGGAVLRTPLLGAGRRGLGWLRPSRLSRVVPASESGRAGPTCWFKFGNKDAEGAGIYGSQARDDFDRDDVEQYFNYMGMLAVEGTYDKMEALLNQDIHPVDILLMLAASEGDRPKIEELLRAGARFDVKDVDGRTALDRATDETREFILGFAAKKA

SEQ ID NO: 9891 - DNA, 896 bp, Zea mays subsp. mays
  misc_feature (1)..(896): Ceres Seq. ID no. 12354413
  misc_feature: MA Experiment ID: 108535 Result: Down-regulated in Transcription
  misc_feature: MA Experiment 108535 PARAMETER Experiment Name: Zm_Meristem_P Parameter: Age (day) Value: 8
  misc_feature: MA Experiment 108535 PARAMETER Experiment Name: Zm_Meristem_P Parameter: Organism Value: Zea mays
  misc_feature: MA Experiment 108535 PARAMETER Experiment Name: Zm_Meristem_P Parameter: Plant Line Value: 35A19
  misc_feature: MA Experiment 108535 PARAMETER Experiment Name: Zm_Meristem_P Parameter: Tissue Value: Root Meristem vs. Above Root Meristem
  misc_feature: MA Experiment ID: 20000488 Result: Down-regulated in Transcription
  misc_feature: MA Experiment 20000488 PARAMETER Experiment Name: Zm_50mM_NH4NO3_L_to_H_P Parameter: Organism Value: Zea mays
  misc_feature: MA Experiment 20000488 PARAMETER Experiment Name: Zm_50mM_NH4NO3_L_to_H_P Parameter: Timepoint (hr) Value: 8
  misc_feature: MA Experiment 20000488 PARAMETER Experiment Name: Zm_50mM_NH4NO3_L_to_H_P Parameter: Tissue Value: Leaves
  misc_feature: MA Experiment 20000488 PARAMETER Experiment Name: Zm_50mM_NH4NO3_L_to_H_P Parameter: Treatment Value: 50mM NH4NO3 vs. 100mM Mannitol
  misc_feature: MA Experiment ID: 20000492 Result: Down-regulated in Transcription
  misc_feature: MA Experiment 20000492 PARAMETER Experiment Name: Zm_Hybrid_Seed_Dev_P Parameter: DAP Value: 12
  misc_feature: MA Experiment 20000492 PARAMETER Experiment Name: Zm_Hybrid_Seed_Dev_P Parameter: Organism Value: Zea mays
  misc_feature: MA Experiment 20000492 PARAMETER Experiment Name: Zm_Hybrid_Seed_Dev_P Parameter: Plant Line Value: 35A19
  misc_feature: MA Experiment 20000492 PARAMETER Experiment Name: Zm_Hybrid_Seed_Dev_P Parameter: Tissue Value: Fert Kernel vs. Unfert Floret
  misc_feature: MA Experiment ID: 20000535 Result: Down-regulated in Transcription
  misc_feature: MA Experiment 20000535 PARAMETER Experiment Name: Zm_Hybrid_Seed_Dev_P Parameter: DAP Value: 30 vs. 12
  misc_feature: MA Experiment 20000535 PARAMETER Experiment Name: Zm_Hybrid_Seed_Dev_P Parameter: Organism Value: Zea mays
  misc_feature: MA Experiment 20000535 PARAMETER Experiment Name: Zm_Hybrid_Seed_Dev_P Parameter: Plant Line Value: 35A19
  misc_feature: MA Experiment 20000535 PARAMETER Experiment Name: Zm_Hybrid_Seed_Dev_P Parameter: Tissue Value: Embryo vs. Unfert Floret
aaagattacgctgtcagggccctggtcaacgctgtcgaccatcttggcacagtggcctacaagctgacagacctatacgaagagcaggcttcagaaataacaaccctcgagttgaaagtagcatgcttgaaccagcaagtccgtacctgccagacatacacggacaaagaaggcctcagacaacagcagatgatgggggctgccagaagacaccataaccattacatcgtaccatatgcgggaaacaaaagaatgcaggccttctctgttacgcaagccgatgctgatttcgacccaacgccaaggcctttctcttcagcaaggacccttgagtggcatttggtttccgagaagaattccaaaaccagtagaccagatcagtctgaaattgccttaggagaaacaaaaactactaaggcttcgtcaagtggtttccgccttctcggcaaggaatcatctgcatctcccttgtccaggaatgtgcagtccaacataaccagtttggatattgtcagtgccggcatgaaggatcagcccacgaccaggcacttgtcatcgttcagttctttggacaaccccaggggccgacaaatccagaaggctccgcttcgcacaaaaagtatgctagccgctttctttgtcaaacacagatcagcaaagatgaaaaacgtctctgtgcgttgatcaactgcaagccaagcctgtattttgctccagccaaaccgacgtggaagtgttaagggcatgagatgtatacatgtttgtatatggtatttgggtcttgtatgctagtgctctagagataaacctttacggatgcctttcaatctagagtctttggcatcttgctcatgaccttaatgtaatgatttatatggatatatattactagtttt

SEQ ID NO: 9892 - protein, 227 aa, Zea mays subsp. mays
  peptide (1)..(227): Ceres Seq. ID no. 12354414
  misc_feature (1)..(227): Homolog of NCBI NO: 34912804 NR Description: P0501G01.11 [Oryza sativa (japonica
  misc_feature (1)..(222): Homolog of NCBI NO: 18407012 NR Description: expressed protein; protein id: At2g46225.1, by cDNA: 13319. [Arabidopsis thaliana] expressed protein [Arabidopsis thaliana]
  misc_feature (1)..(222): Homolog of NCBI NO: 26452761 NR Description: unknown protein [Arabidopsis thaliana]
  misc_feature (1)..(167): Homolog of NCBI NO: 25408977 NR Description: hypothetical protein At2g46220 [imported] -
  misc_feature (1)..(96): Homolog of NCBI NO: 15229112 NR Description: putative protein; protein id: At3g49290.1
  misc_feature (1)..(84): Homolog of NCBI NO: 30689382 NR Description: expressed protein [Arabidopsis thaliana]
  misc_feature (1)..(84): Homolog of NCBI NO: 10177091 NR Description: emb|CAB66408.1~gene_id:MOP9.13~strong similarity
  misc_feature (1)..(85): Homolog of NCBI NO: 34913914 NR Description: OSJNBa0066C06.8 [Oryza sativa (japonica
  misc_feature (1)..(174): Homolog of NCBI NO: 34904432 NR Description: unnamed protein product [Oryza sativa (japonica group)] >gi|7339712|dbj|BAA92917.1| unnamed protein product
  misc_feature (1)..(89): Homolog of NCBI NO: 15238265 NR Description: putative protein; protein id: At5g42030.1, by cDNA: 106836. [Arabidopsis thaliana] emb|CAB66408.1~gene_id:MJC20.13~similar to unknown protein
KDYAVRALVNAVDHLGTVAYKLTDLYEEQASEITTLELKVACLNQQVRTCQTYTDKEGLRQQQMMGAARRHHNHYIVPYAGNKRMQAFSVTQADADFDPTPRPFSSARTLEWHLVSEKNSKTSRPDQSEIALGETKTTKASSSGFRLLGKESSASPLSRNVQSNITSLDIVSAGMKDQPTTRHLSSFSSLDNPRGRQIQKAPLRTKSMLAAFFVKHRSAKMKNVSVR

SEQ ID NO: 9893 - protein, 164 aa, Zea mays subsp. mays
  peptide (1)..(164): Ceres Seq. ID no. 12354415
  misc_feature (1)..(164): Homolog of NCBI NO: 34912804 NR Description: P0501G01.11 [Oryza sativa (japonica
  misc_feature (1)..(159): Homolog of NCBI NO: 18407012 NR Description: expressed protein; protein id: At2g46225.1, by cDNA: 13319. [Arabidopsis thaliana] expressed protein [Arabidopsis thaliana]
  misc_feature (1)..(159): Homolog of NCBI NO: 26452761 NR Description: unknown protein [Arabidopsis thaliana]
  misc_feature (1)..(104): Homolog of NCBI NO: 25408977 NR Description: hypothetical protein At2g46220 [imported] -
  misc_feature (1)..(33): Homolog of NCBI NO: 15229112 NR Description: putative protein; protein id: At3g49290.1
  misc_feature (1)..(21): Homolog of NCBI NO: 30689382 NR Description: expressed protein [Arabidopsis thaliana]
  misc_feature (1)..(21): Homolog of NCBI NO: 10177091 NR Description: emb|CAB66408.1~gene_id:MOP9.13~strong similarity
  misc_feature (1)..(22): Homolog of NCBI NO: 34913914 NR Description: OSJNBa0066C06.8 [Oryza sativa (japonica
  misc_feature (1)..(111): Homolog of NCBI NO: 34904432 NR Description: unnamed protein product [Oryza sativa (japonica group)] >gi|7339712|dbj|BAA92917.1| unnamed protein product
  misc_feature (1)..(26): Homolog of NCBI NO: 15238265 NR Description: putative protein; protein id: At5g42030.1, by cDNA: 106836. [Arabidopsis thaliana] emb|CAB66408.1~gene_id:MJC20.13~similar to unknown protein
MMGAARRHHNHYIVPYAGNKRMQAFSVTQADADFDPTPRPFSSARTLEWHLVSEKNSKTSRPDQSEIALGETKTTKASSSGFRLLGKESSASPLSRNVQSNITSLDIVSAGMKDQPTTRHLSSFSSLDNPRGRQIQKAPLRTKSMLAAFFVKHRSAKMKNVSVR

SEQ ID NO: 9894 - protein, 163 aa, Zea mays subsp. mays
  peptide (1)..(163): Ceres Seq. ID no. 12354416
  misc_feature (1)..(163): Homolog of NCBI NO: 34912804 NR Description: P0501G01.11 [Oryza sativa (japonica
  misc_feature (1)..(158): Homolog of NCBI NO: 18407012 NR Description: expressed protein; protein id: At2g46225.1, by cDNA: 13319. [Arabidopsis thaliana] expressed protein [Arabidopsis thaliana]
  misc_feature (1)..(158): Homolog of NCBI NO: 26452761 NR Description: unknown protein [Arabidopsis thaliana]
  misc_feature (1)..(103): Homolog of NCBI NO: 25408977 NR Description: hypothetical protein At2g46220 [imported] -
  misc_feature (1)..(32): Homolog of NCBI NO: 15229112 NR Description: putative protein; protein id: At3g49290.1
  misc_feature (1)..(20): Homolog of NCBI NO: 30689382 NR Description: expressed protein [Arabidopsis thaliana]
  misc_feature (1)..(20): Homolog of NCBI NO: 10177091 NR Description: emb|CAB66408.1~gene_id:MOP9.13~strong similarity
  misc_feature (1)..(21): Homolog of NCBI NO: 34913914 NR Description: OSJNBa0066C06.8 [Oryza sativa (japonica
  misc_feature (1)..(110): Homolog of NCBI NO: 34904432 NR Description: unnamed protein product [Oryza sativa (japonica group)] >gi|7339712|dbj|BAA92917.1| unnamed protein product
  misc_feature (1)..(25): Homolog of NCBI NO: 15238265 NR Description: putative protein; protein id: At5g42030.1, by cDNA: 106836. [Arabidopsis thaliana] emb|CAB66408.1~gene_id:MJC20.13~similar to unknown protein
MGAARRHHNHYIVPYAGNKRMQAFSVTQADADFDPTPRPFSSARTLEWHLVSEKNSKTSRPDQSEIALGETKTTKASSSGFRLLGKESSASPLSRNVQSNITSLDIVSAGMKDQPTTRHLSSFSSLDNPRGRQIQKAPLRTKSMLAAFFVKHRSAKMKNVSVR

SEQ ID NO: 9895 - DNA, 1209 bp, Zea mays subsp. mays
  misc_feature (1)..(1209): Ceres Seq. ID no. 12374731
  misc_feature: MA Experiment ID: 108529 Result: Down-regulated in Transcription
  misc_feature: MA Experiment 108529 PARAMETER Experiment Name: Zm_Imbibed_Seeds_P Parameter: Age (day) Value: 5 vs. 2
  misc_feature: MA Experiment 108529 PARAMETER Experiment Name: Zm_Imbibed_Seeds_P Parameter: Organism Value: Zea mays
  misc_feature: MA Experiment 108529 PARAMETER Experiment Name: Zm_Imbibed_Seeds_P Parameter: Plant Line Value: 35A19
  misc_feature: MA Experiment 108529 PARAMETER Experiment Name: Zm_Imbibed_Seeds_P Parameter: Tissue Value: Roots vs. Embryo
  misc_feature: MA Experiment ID: 108535 Result: Up-regulated in Transcription
  misc_feature: MA Experiment 108535 PARAMETER Experiment Name: Zm_Meristem_P Parameter: Age (day) Value: 8
  misc_feature: MA Experiment 108535 PARAMETER Experiment Name: Zm_Meristem_P Parameter: Organism Value: Zea mays
  misc_feature: MA Experiment 108535 PARAMETER Experiment Name: Zm_Meristem_P Parameter: Plant Line Value: 35A19
  misc_feature: MA Experiment 108535 PARAMETER Experiment Name: Zm_Meristem_P Parameter: Tissue Value: Root Meristem vs. Above Root Meristem
  misc_feature: MA Experiment ID: 108536 Result: Up-regulated in Transcription
  misc_feature: MA Experiment 108536 PARAMETER Experiment Name: Zm_Meristem_P Parameter: Age (day) Value: 8
  misc_feature: MA Experiment 108536 PARAMETER Experiment Name: Zm_Meristem_P Parameter: Organism Value: Zea mays
  misc_feature: MA Experiment 108536 PARAMETER Experiment Name: Zm_Meristem_P Parameter: Plant Line Value: 35A19
  misc_feature: MA Experiment 108536 PARAMETER Experiment Name: Zm_Meristem_P Parameter: Tissue Value: Shoot Meristem vs. Above Shoot Meristem
  misc_feature: MA Experiment ID: 108543 Result: Down-regulated in Transcription
  misc_feature: MA Experiment ID: 108544 Result: Down-regulated in Transcription
  misc_feature: MA Experiment ID: 108546 Result: Down-regulated in Transcription
  misc_feature: MA Experiment 108546 PARAMETER Experiment Name: Zm_Imbibed_Seeds_P Parameter: Age (day) Value: 3 vs. 2
  misc_feature: MA Experiment 108546 PARAMETER Experiment Name: Zm_Imbibed_Seeds_P Parameter: Organism Value: Zea mays
  misc_feature: MA Experiment 108546 PARAMETER Experiment Name: Zm_Imbibed_Seeds_P Parameter: Plant Line Value: 35A19
  misc_feature: MA Experiment 108546 PARAMETER Experiment Name: Zm_Imbibed_Seeds_P Parameter: Tissue Value: Roots vs. Embryo
  misc_feature: MA Experiment ID: 108548 Result: Down-regulated in Transcription
  misc_feature: MA Experiment 108548 PARAMETER Experiment Name: Zm_20uM_KNO3_H-to-L_P Parameter: Age (day) Value: 11
  misc_feature: MA Experiment 108548 PARAMETER Experiment Name: Zm_20uM_KNO3_H-to-L_P Parameter: Organism Value: Zea mays
  misc_feature: MA Experiment 108548 PARAMETER Experiment Name: Zm_20uM_KNO3_H-to-L_P Parameter: Plant Line Value: 35A19
  misc_feature: MA Experiment 108548 PARAMETER Experiment Name: Zm_20uM_KNO3_H-to-L_P Parameter: Timepoint (hr) Value: 4
  misc_feature: MA Experiment 108548 PARAMETER Experiment Name: Zm_20uM_KNO3_H-to-L_P Parameter: Tissue Value: Roots
  misc_feature: MA Experiment 108548 PARAMETER Experiment Name: Zm_20uM_KNO3_H-to-L_P Parameter: Treatment Value: 20uM KNO3 vs. 60mM KNO3
  misc_feature: MA Experiment ID: 108597 Result: Down-regulated in Transcription
  misc_feature: MA Experiment 108597 PARAMETER Experiment Name: Zm_100uM_ABA_P Parameter: Age (day) Value: 9
  misc_feature: MA Experiment 108597 PARAMETER Experiment Name: Zm_100uM_ABA_P Parameter: Organism Value: Zea mays
  misc_feature: MA Experiment 108597 PARAMETER Experiment Name: Zm_100uM_ABA_P Parameter: Plant Line Value: 35A19
  misc_feature: MA Experiment 108597 PARAMETER Experiment Name: Zm_100uM_ABA_P Parameter: Timepoint (hr) Value: 24
  misc_feature: MA Experiment 108597 PARAMETER Experiment Name: Zm_100uM_ABA_P Parameter: Tissue Value: Aerial
  misc_feature: MA Experiment 108597 PARAMETER Experiment Name: Zm_100uM_ABA_P Parameter: Treatment Value: 100uM ABA vs. No Treatment
  misc_feature: MA Experiment ID: 108687 Result: Down-regulated in Transcription
  misc_feature: MA Experiment 108687 PARAMETER Experiment Name: Zm_Embryos-Flowers__P Parameter: Tissue Value: Embryo vs. Aerial+
  misc_feature: MA Experiment ID: 20000535 Result: Down-regulated in Transcription
  misc_feature: MA Experiment 20000535 PARAMETER Experiment Name: Zm_Hybrid_Seed_Dev_P Parameter: DAP Value: 30 vs. 12
  misc_feature: MA Experiment 20000535 PARAMETER Experiment Name: Zm_Hybrid_Seed_Dev_P Parameter: Organism Value: Zea mays
  misc_feature: MA Experiment 20000535 PARAMETER Experiment Name: Zm_Hybrid_Seed_Dev_P Parameter: Plant Line Value: 35A19
  misc_feature: MA Experiment 20000535 PARAMETER Experiment Name: Zm_Hybrid_Seed_Dev_P Parameter: Tissue Value: Embryo vs. Unfert Floret
  misc_feature: MA Experiment ID: 20000626 Result: Down-regulated in Transcription
  misc_feature: MA Experiment 20000626 PARAMETER Experiment Name: Zm_Herbicide-Treatments_P Parameter: Timepoint (hr) Value: 12
  misc_feature: MA Experiment 20000626 PARAMETER Experiment Name: Zm_Herbicide-Treatments_P Parameter: Tissue Value: Aerial
  misc_feature: MA Experiment 20000626 PARAMETER Experiment Name: Zm_Herbicide-Treatments_P Parameter: Treatment Value: Roundup vs. No Treatment
  misc_feature: MA Experiment ID: 20000630 Result: Up-regulated in Transcription
  misc_feature: MA Experiment 20000630 PARAMETER Experiment Name: Zm_Herbicide-Treatments_P Parameter: Timepoint (hr) Value: 4
  misc_feature: MA Experiment 20000630 PARAMETER Experiment Name: Zm_Herbicide-Treatments_P Parameter: Tissue Value: Aerial
  misc_feature: MA Experiment 20000630 PARAMETER Experiment Name: Zm_Herbicide-Treatments_P Parameter: Treatment Value: Roundup vs. No Treatment
  misc_feature: MA Experiment ID: 20001610 Result: Up-regulated in Transcription
  misc_feature: MA Experiment 20001610 PARAMETER Experiment Name: Zm_50ppm_KNO3_L-to-H_P Parameter: Age (day) Value: 19
  misc_feature: MA Experiment 20001610 PARAMETER Experiment Name: Zm_50ppm_KNO3_L-to-H_P Parameter: Organism Value: Zea mays
  misc_feature: MA Experiment 20001610 PARAMETER Experiment Name: Zm_50ppm_KNO3_L-to-H_P Parameter: Plant Line Value: 35A19
  misc_feature: MA Experiment 20001610 PARAMETER Experiment Name: Zm_50ppm_KNO3_L-to-H_P Parameter: Timepoint (hr) Value: 2
  misc_feature: MA Experiment 20001610 PARAMETER Experiment Name: Zm_50ppm_KNO3_L-to-H_P Parameter: Tissue Value: Roots
  misc_feature: MA Experiment 20001610 PARAMETER Experiment Name: Zm_50ppm_KNO3_L-to-H_P Parameter: Treatment Value: 50ppm KNO3 vs. 50ppm KCl
  misc_feature: MA Experiment ID: 20001612 Result: Up-regulated in Transcription
  misc_feature: MA Experiment 20001612 PARAMETER Experiment Name: Zm_50ppm_KNO3_L-to-H_P Parameter: Age (day) Value: 19
  misc_feature: MA Experiment 20001612 PARAMETER Experiment Name: Zm_50ppm_KNO3_L-to-H_P Parameter: Organism Value: Zea mays
  misc_feature: MA Experiment 20001612 PARAMETER Experiment Name: Zm_50ppm_KNO3_L-to-H_P Parameter: Plant Line Value: 35A19
  misc_feature: MA Experiment 20001612 PARAMETER Experiment Name: Zm_50ppm_KNO3_L-to-H_P Parameter: Timepoint (hr) Value: 8
  misc_feature: MA Experiment 20001612 PARAMETER Experiment Name: Zm_50ppm_KNO3_L-to-H_P Parameter: Tissue Value: Roots
  misc_feature: MA Experiment 20001612 PARAMETER Experiment Name: Zm_50ppm_KNO3_L-to-H_P Parameter: Treatment Value: 50ppm KNO3 vs. 50ppm KCl
ctcactgccaaccacacgttcccaagccagccattggttggtagcaagccaagctaatcaagttagctttagatacccgctcccgctcttcttccctccgacgaaggcagctgacgacacagcaggctagcttcggagttcggagcactcagccatggccattgccggcgctctcctcctcctgctcggactcctcgcgcgggaggccgctgccggcggggtggcagagcgcgcacgccacgttctacggcggcggggacgcgtccggcacaatgggcggcgcttgcgggtacggcaacctgtacagcacggggtacggcacgagcacggcggcgctgagcacggcgctgttcaacgacggcgcggcgtgcgggtcctgctacgagctgcggtgcgacaacgacgggcggtggtgcctgccgggcaccatcaccgtcacggccaccaacttctgcccgcccaactacggcctccccagcgacgacggcggctggtgcaacccgccgcgcccgcacttcgacatggccgagccggccttcctccgcatcgcgcagtaccgcgccggcatcgtgcccgtcgcgttcaggagagtgccgtgcgtgaagaagggcggcatccggttcaccatcaacgggcactcctacttcaacctggtgctggtgaccaacgtggcgggcgccggcgacgtgcgctccgtctccatccggggctcccgcacggggtggcagcccatgtcccggaactggggccagaactggcagagcaactcgtacctggacaggcaggcgctctcgttccaggtcaccgccagcgacggccgcaccgtcaccagcaacggcgccgtccccgctggctggcagttcagccagaccttcgagggcggccagttctgaggatgaacagctagcgcgcgcgcggctagctattggataattaattacggtactgtcgatttggtttttttgccttgttttttttttgcgcgacgacgacgaagaggaggatgaagacgaagatgaagacgaggcctctcttcgggtatattgaaggaaggagaaggcttttgcgcgcgctatgctgaggctgctaatctagcacccgcctagacgtttcccttttctctggtggattacggactggatcggaccaaagatcgatccagctcctagtactaataatatagttgtacttgagaaaatgaataattgc

SEQ ID NO: 9896 - protein, 250 aa, Zea mays subsp. mays
  peptide (1)..(250): Ceres Seq. ID no. 12374732
MAIAGALLLLLGLLAREAAAGGVAERARHVLRRRGRVRHNGRRLRVRQPVQHGVRHEHGGAEHGAVQRRRGVRVLLRAAVRQRRAVVPAGHHHRHGHQLLPAQLRPPQRRRRLVQPAAPALRHGRAGLPPHRAVPRRHRARRVQESAVREEGRHPVHHQRALLLQPGAGDQRGGRRRRALRLHPGLPHGVAAHVPELGPELAEQLVPGQAGALVPGHRQRRPHRHQQRRRPRWLAVQPDLRGRPVLRMNS

SEQ ID NO: 9897 - protein, 206 aa, Zea mays subsp. mays
  peptide (1)..(206): Ceres Seq. ID no. 12374733
  misc_feature (115)..(192): Pfam Name: Pollen allergen Pfam Description: Pollen allergen
  misc_feature (1)..(206): Homolog of NCBI NO: 14193751 NR Description: alpha-expansin [Zea mays]
  misc_feature (1)..(206): Homolog of NCBI NO: 7489470 NR Description: expansin - rice >gi|1815681|gb|AAB81662.1|
  misc_feature (1)..(206): Homolog of NCBI NO: 16517029 NR Description: alpha-expansin [Oryza sativa]
  misc_feature (1)..(206): Homolog of NCBI NO: 14193759 NR Description: alpha-expansin 5 [Zea mays]
  misc_feature (1)..(206): Homolog of NCBI NO: 34907844 NR Description: alpha-expansin [Oryza sativa (japonica
  misc_feature (1)..(206): Homolog of NCBI NO: 7489471 NR Description: expansin 2 - rice >gi|1041710|gb|AAB38074.1|
  misc_feature (1)..(206): Homolog of NCBI NO: 38710245 NR Description: expansin WEXPA1P [Triticum aestivum]
  misc_feature (1)..(206): Homolog of NCBI NO: 40217880 NR Description: expansin-3 [Petunia x hybrida]
  misc_feature (1)..(206): Homolog of NCBI NO: 38046728 NR Description: alpha-expansin 2 [Populus tremula x Populus
  misc_feature (1)..(206): Homolog of NCBI NO: 29467503 NR Description: expansin [Pyrus communis]
MGGACGYGNLYSTGYGTSTAALSTALFNDGAACGSCYELRCDNDGRWCLPGTITVTATNFCPPNYGLPSDDGGWCNPPRPHFDMAEPAFLRIAQYRAGIVPVAFRRVPCVKKGGIRFTINGHSYFNLVLVTNVAGAGDVRSVSIRGSRTGWQPMSRNWGQNWQSNSYLDRQALSFQVTASDGRTVTSNGAVPAGWQFSQTFEGGQF

SEQ ID NO: 9898 - DNA, 1139 bp, Zea mays subsp. mays
  misc_feature (1)..(1139): Ceres Seq. ID no. 12355294
  misc_feature: MA Experiment ID: 108527 Result: Up-regulated in Transcription
  misc_feature: MA Experiment 108527 PARAMETER Experiment Name: Zm_5mM_NO_P Parameter: Age (day) Value: 8
  misc_feature: MA Experiment 108527 PARAMETER Experiment Name: Zm_5mM_NO_P Parameter: Organism Value: Zea mays
  misc_feature: MA Experiment 108527 PARAMETER Experiment Name: Zm_5mM_NO_P Parameter: Plant Line Value: 35A19
  misc_feature: MA Experiment 108527 PARAMETER Experiment Name: Zm_5mM_NO_P Parameter: Timepoint (hr) Value: 6
  misc_feature: MA Experiment 108527 PARAMETER Experiment Name: Zm_5mM_NO_P Parameter: Tissue Value: Aerial
  misc_feature: MA Experiment 108527 PARAMETER Experiment Name: Zm_5mM_NO_P Parameter: Treatment Value: 5mM NO vs. No Treatment
aacggctcgaccgcactgccagagcagcgtaaagccagggtagggtaacacaatgtcgagcgtcatgacggccgcgaaagaggacgatatggtcgtgcacgacttcgccccgctactccttgtatacaagagcgggcgcctggaacgcccactggccatgccggcggtctcgtccggccgcgacgtcgacacgggcgtcgtgtccaaggacgtggccctctcgcaggactccttatcggtgcgcctgtacctcccgcccgccgctaccacagcgcccgaaaggaggctcccagtggtcgtgtacttccacggcggtggcttcgtcgtcgggtcggccaggtccgccgtgtaccaccgctgcctgaacgacctcgccgccgcttgccccgctgtggccgtttccgtcgactaccgccttgcaccagagcacccggtgcccgccgcgtacgagggactccctggcggccctcaagtgggcgttggcgccgtcgtccgcgaccgactcgtggcttgcagtgcatggcgaccctgcgcgcgtgttcctcgccggcgacagcgcggggggcaacatctgccaccaccttgccatgcacccagacatccgggacgctggcctcaggggcgtcgtgctcatccacccctggttctggggcagggaccccatccctggggagccaccgctgaaccccgcctcaaagcagcagaagggcctatgggagttcgtgtgccccgaggcggtggacggcgcggacgaccccaggatgaacccgacagcgccgagcgccccagggttggacaacctggcgtgccagaaggtgatggtgtgcgtggccgagggggacatccttcgatggcgcgggaagctgtacgcagaggcggtggcgcgggcgaggggcaccgaaaaggacgtggagctattcgaatccgaaggggtcgggcatgtgttctacctgctggagcccgtgcaggagaaggccaaggagctattggacaagatcgcgacgtttgtcaggacggaatgaggagggatgcattggtggtggtggtccggtggacactgtcacactggacatcatgtatcgttaacgtactactactacatactccatccgttctttttatttatcgttgcttagtcc

SEQ ID NO: 9899 - protein, 362 aa, Zea mays subsp. mays
  peptide (1)..(362): Ceres Seq. ID no. 12355295
  misc_feature (11)..(133): Homolog of NCBI NO: 15228426 NR Description: putative protein; protein id: At3g48700.1
  misc_feature (11)..(133): Homolog of NCBI NO: 18086341 NR Description: AT3g48690/T8P19_200 [Arabidopsis thaliana]
  misc_feature (11)..(133): Homolog of NCBI NO: 15228425 NR Description: putative protein; protein id: At3g48690.1, by cDNA: gi_18086340 [Arabidopsis thaliana]
  misc_feature (11)..(133): Homolog of NCBI NO: 15227669 NR Description: putative esterase; protein id: At2g03550.1
  misc_feature (14)..(133): Homolog of NCBI NO: 28393060 NR Description: putative esterase [Arabidopsis thaliana]
  misc_feature (17)..(133): Homolog of NCBI NO: 18401743 NR Description: expressed protein; protein id: At1g47480.1, by cDNA: 111056. [Arabidopsis thaliana] >gi|25405208|pir||A96515
  misc_feature (17)..(133): Homolog of NCBI NO: 21536771 NR Description: unknown [Arabidopsis thaliana]
  misc_feature (14)..(132): Homolog of NCBI NO: 34393323 NR Description: putative cell death associated protein [Oryza
  misc_feature (11)..(133): Homolog of NCBI NO: 34393904 NR Description: putative cell death associated protein [Oryza
  misc_feature (14)..(133): Homolog of NCBI NO: 21537287 NR Description: putative esterase [Arabidopsis thaliana]
MSSVMTAAKEDDMVVHDFAPLLLVYKSGRLERPLAMPAVSSGRDVDTGVVSKDVALSQDSLSVRLYLPPAATTAPERRLPVVVYFHGGGFVVGSARSAVYHRCLNDLAAACPAVAVSVDYRLAPEHPVPAAYEGLPGGPQVGVGAVVRDRLVACSAWRPCARVPRRRQRGGQHLPPPCHAPRHPGRWPQGRRAHPPLVLGQGPHPWGATAEPRLKAAEGPMGVRVPRGGGRRGRPQDEPDSAERPRVGQPGVPEGDGVRGRGGHPSMAREAVRRGGGAGEGHRKGRGAIRIRRGRACVLPAGARAGEGQGAIGQDRDVCQDGMRRDALVVVVRWTLSHWTSCIVNVLLLHTPSVLFIYRCLV

SEQ ID NO: 9900 - protein, 358 aa, Zea mays subsp. mays
  peptide (1)..(358): Ceres Seq. ID no. 12355296
  misc_feature (7)..(129): Homolog of NCBI NO: 15228426 NR Description: putative protein; protein id: At3g48700.1
  misc_feature (7)..(129): Homolog of NCBI NO: 18086341 NR Description: AT3g48690/T8P19_200 [Arabidopsis thaliana]
  misc_feature (7)..(129): Homolog of NCBI NO: 15228425 NR Description: putative protein; protein id: At3g48690.1, by cDNA: gi_18086340 [Arabidopsis thaliana]
  misc_feature (7)..(129): Homolog of NCBI NO: 15227669 NR Description: putative esterase; protein id: At2g03550.1
  misc_feature (10)..(129): Homolog of NCBI NO: 28393060 NR Description: putative esterase [Arabidopsis thaliana]
  misc_feature (13)..(129): Homolog of NCBI NO: 18401743 NR Description: expressed protein; protein id: At1g47480.1, by cDNA: 111056. [Arabidopsis thaliana] >gi|25405208|pir||A96515
  misc_feature (13)..(129): Homolog of NCBI NO: 21536771 NR Description: unknown [Arabidopsis thaliana]
  misc_feature (10)..(128): Homolog of NCBI NO: 34393323 NR Description: putative cell death associated protein [Oryza
  misc_feature (7)..(129): Homolog of NCBI NO: 34393904 NR Description: putative cell death associated protein [Oryza
  misc_feature (10)..(129): Homolog of NCBI NO: 21537287 NR Description: putative esterase [Arabidopsis thaliana]
MTAAKEDDMVVHDFAPLLLVYKSGRLERPLAMPAVSSGRDVDTGVVSKDVALSQDSLSVRLYLPPAATTAPERRLPVVVYFHGGGFVVGSARSAVYHRCLNDLAAACPAVAVSVDYRLAPEHPVPAAYEGLPGGPQVGVGAVVRDRLVACSAWRPCARVPRRRQRGGQHLPPPCHAPRHPGRWPQGRRAHPPLVLGQGPHPWGATAEPRLKAAEGPMGVRVPRGGGRRGRPQDEPDSAERPRVGQPGVPEGDGVRGRGGHPSMAREAVRRGGGAGEGHRKGRGAIRIRRGRACVLPAGARAGEGQGAIGQDRDVCQDGMRRDALVVVVRWTLSHWTSCIVNVLLLHTPSVLFIYRCLV

SEQ ID NO: 9901 - protein, 350 aa, Zea mays subsp. mays
  peptide (1)..(350): Ceres Seq. ID no. 12355297
  misc_feature (2)..(121): Homolog of NCBI NO: 28393060 NR Description: putative esterase [Arabidopsis thaliana]
  misc_feature (5)..(121): Homolog of NCBI NO: 18401743 NR Description: expressed protein; protein id: At1g47480.1, by cDNA: 111056. [Arabidopsis thaliana] >gi|25405208|pir||A96515
  misc_feature (5)..(121): Homolog of NCBI NO: 21536771 NR Description: unknown [Arabidopsis thaliana]
  misc_feature (2)..(120): Homolog of NCBI NO: 34393323 NR Description: putative cell death associated protein [Oryza
  misc_feature (1)..(121): Homolog of NCBI NO: 34393904 NR Description: putative cell death associated protein [Oryza
  misc_feature (2)..(121): Homolog of NCBI NO: 21537287 NR Description: putative esterase [Arabidopsis thaliana]
  misc_feature (1)..(121): Homolog of NCBI NO: 15228426 NR Description: putative protein; protein id: At3g48700.1
  misc_feature (1)..(121): Homolog of NCBI NO: 18086341 NR Description: AT3g48690/T8P19_200 [Arabidopsis thaliana]
  misc_feature (1)..(121): Homolog of NCBI NO: 15228425 NR Description: putative protein; protein id: At3g48690.1, by cDNA: gi_18086340 [Arabidopsis thaliana]
  misc_feature (1)..(121): Homolog of NCBI NO: 15227669 NR Description: putative esterase; protein id: At2g03550.1
MVVHDFAPLLLVYKSGRLERPLAMPAVSSGRDVDTGVVSKDVALSQDSLSVRLYLPPAATTAPERRLPVVVYFHGGGFVVGSARSAVYHRCLNDLAAACPAVAVSVDYRLAPEHPVPAAYEGLPGGPQVGVGAVVRDRLVACSAWRPCARVPRRRQRGGQHLPPPCHAPRHPGRWPQGRRAHPPLVLGQGPHPWGATAEPRLKAAEGPMGVRVPRGGGRRGRPQDEPDSAERPRVGQPGVPEGDGVRGRGGHPSMAREAVRRGGGAGEGHRKGRGAIRIRRGRACVLPAGARAGEGQGAIGQDRDVCQDGMRRDALVVVVRWTLSHWTSCIVNVLLLHTPSVLFIYRCLV

SEQ ID NO: 9902 - DNA, 1330 bp, Zea mays subsp. mays
  misc_feature (1)..(1330): Ceres Seq. ID no. 12354315
  misc_feature: MA Experiment ID: 20000479 Result: Up-regulated in Transcription
  misc_feature: MA Experiment 20000479 PARAMETER Experiment Name: Zm_Drought_P Parameter: Age (day) Value: 10
  misc_feature: MA Experiment 20000479 PARAMETER Experiment Name: Zm_Drought_P Parameter: Organism Value: Zea mays
  misc_feature: MA Experiment 20000479 PARAMETER Experiment Name: Zm_Drought_P Parameter: Plant Line Value: 35A19
  misc_feature: MA Experiment 20000479 PARAMETER Experiment Name: Zm_Drought_P Parameter: Timepoint (hr) Value: 48
  misc_feature: MA Experiment 20000479 PARAMETER Experiment Name: Zm_Drought_P Parameter: Tissue Value: Aerial
  misc_feature: MA Experiment 20000479 PARAMETER Experiment Name: Zm_Drought_P Parameter: Treatment Value: Drought vs. No Drought
attccgggtgctcaatccactagaaccgaacaggccctaaatagatccgtagccgtagcctggcgcgcacattgcagaaagatcgagcggaaggtcggcagcaggcgcatagatgcaggggtgagggcacgggcggcagcgcttgacgggcgacgagtaaaccctaacgctttgattgcgggcgtcgtcgtctgagccagtcccgagtcgatacgctgtcatgcctgtcaatcctcctccgccacctcctgggtcgtcgtctttggctccggcgggggccagctacttcccgctccctttccacctgcagcagcaccagccgccgccgccgcaggtgccgccgcctatggcggcgagcagctatcagcagtatcagcaacagctgcatcaggcccatcagctcttccagcgggacgcgcagaccataacccccgaagcgctgcagagcgtcaaggctgccctcgccaccagcgacgtcctcgaccccgtcgccgccgccaacgccaggctctccgatccctctaccagcaagaagcccatcccccgtcgcgctgccggacaatcctgggaggatcctaccctcactgaatggcccgaaaacgactaccggctgttctgtggagatctaggcaacgaagttaatgatgatgttctctccaaagcattttcacggtttccatcctttaacatggcaagggttgttagagataagaggactggcaaaactaaaggctatggatttgtgagcttttcaaaccctactgacctggctgcagcaataaaagagatgaatggaaagtatgttgggaaccgccctattaaattgcgtaagagtaactggaaggagaggacagatgttgaggctctggaaagacaaaagaatcatgtcaagaggaagcctaaaattcccaagaagactattcttcacaagtagagatacaaaggccctaccgagggtgaatgccagctcatgtgctgccttgggatgatgctaccttctggaatctctttactctctgcaatgctcggggtggaatcacgcaatgctcggggtggaatcacacgcaagggctgttgtttcatgtaaggtgtagtttggaaacttaaattcttttgggatacctgtcttttatcaggatgagtaacccagggatataatttaaataagacatttagttatttaggagatggtttctctctctggtttgacttccccttccaaactaggtctaaggccatcttcagcagatcgtgtaaatggacgtgtaaagtactgttttgcattgtatattgtaactagttgtgtgcccgtgcgttgcaacaggaacat

SEQ ID NO: 9903 - protein, 237 aa, Zea mays subsp. mays
  peptide (1)..(237): Ceres Seq. ID no. 12354316
  misc_feature (131)..(202): Pfam Name: RNA recognition motif. (a.k.a. RRM, RBD, or RNP domain) Pfam Description: RNA recognition motif. (a.k.a. RRM, RBD, or RNP
  misc_feature (1)..(237): Homolog of NCBI NO: 15229308 NR Description: RRM-containing protein; protein id: At3g04500.1 thaliana] >gi|7547109|gb|AAF63781.1| unknown protein [Arabidopsis >gi|26451670|dbj|BAC42931.1| unknown protein [Arabidopsis protein
  misc_feature (16)..(226): Homolog of NCBI NO: 2098575 NR Description: F25451_2 [Homo sapiens]
  misc_feature (16)..(226): Homolog of NCBI NO: 19526864 NR Description: RIKEN cDNA 3100004P22 [Mus musculus] Similar to hypothetical protein MGC10433 [Mus musculus] Unknown (protein for MGC:19415) [Mus musculus]
  misc_feature (16)..(226): Homolog of NCBI NO: 21359951 NR Description: hypothetical protein MGC10433 [Homo sapiens]
  misc_feature (16)..(226): Homolog of NCBI NO: 12804031 NR Description: Unknown (protein for MGC:10433) [Homo sapiens]
  misc_feature (16)..(226): Homolog of NCBI NO: 21594922 NR Description: hypothetical protein MGC10433 [Homo sapiens]
  misc_feature (16)..(226): Homolog of NCBI NO: 34855705 NR Description: similar to RIKEN cDNA 3100004P22 [Rattus
  misc_feature (1)..(224): Homolog of NCBI NO: 39582665 NR Description: Hypothetical protein CBG21313 [Caenorhabditis
  misc_feature (1)..(220): Homolog of NCBI NO: 21357051 NR Description: CG2931-PA [Drosophila melanogaster]
  misc_feature (1)..(224): Homolog of NCBI NO: 17556216 NR Description: RNA recognition motif containing protein elegans] >gi|7332094|gb|AAF60781.1| Hypothetical protein Y54H5A.3
MPVNPPPPPPGSSSLAPAGASYFPLPFHLQQHQPPPPQVPPPMAASSYQQYQQQLHQAHQLFQRDAQTITPEALQSVKAALATSDVLDPVAAANARLSDPSTSKKPIPRRAAGQSWEDPTLTEWPENDYRLFCGDLGNEVNDDVLSKAFSRFPSFNMARVVRDKRTGKTKGYGFVSFSNPTDLAAAIKEMNGKYVGNRPIKLRKSNWKERTDVEALERQKNHVKRKPKIPKKTILHK

SEQ ID NO: 9904 - protein, 195 aa, Zea mays subsp. mays
  peptide (1)..(195): Ceres Seq. ID no. 12354317
  misc_feature (89)..(160): Pfam Name: RNA recognition motif. (a.k.a. RRM, RBD, or RNP domain) Pfam Description: RNA recognition motif. (a.k.a. RRM, RBD, or RNP
  misc_feature (1)..(195): Homolog of NCBI NO: 15229308 NR Description: RRM-containing protein; protein id: At3g04500.1 thaliana] >gi|7547109|gb|AAF63781.1| unknown protein [Arabidopsis >gi|26451670|dbj|BAC42931.1| unknown protein [Arabidopsis protein
  misc_feature (1)..(184): Homolog of NCBI NO: 2098575 NR Description: F25451_2 [Homo sapiens]
  misc_feature (1)..(184): Homolog of NCBI NO: 21594922 NR Description: hypothetical protein MGC10433 [Homo sapiens]
  misc_feature (1)..(184): Homolog of NCBI NO: 21359951 NR Description: hypothetical protein MGC10433 [Homo sapiens]
  misc_feature (1)..(184): Homolog of NCBI NO: 19526864 NR Description: RIKEN cDNA 3100004P22 [Mus musculus] Similar to hypothetical protein MGC10433 [Mus musculus] Unknown (protein for MGC:19415) [Mus musculus]
  misc_feature (1)..(184): Homolog of NCBI NO: 12804031 NR Description: Unknown (protein for MGC:10433) [Homo sapiens]
  misc_feature (1)..(184): Homolog of NCBI NO: 34855705 NR Description: similar to RIKEN cDNA 3100004P22 [Rattus
  misc_feature (1)..(182): Homolog of NCBI NO: 39582665 NR Description: Hypothetical protein CBG21313 [Caenorhabditis
  misc_feature (1)..(178): Homolog of NCBI NO: 21357051 NR Description: CG2931-PA [Drosophila melanogaster]
  misc_feature (1)..(182): Homolog of NCBI NO: 17556216 NR Description: RNA recognition motif containing protein elegans] >gi|7332094|gb|AAF60781.1| Hypothetical protein Y54H5A.3
MAASSYQQYQQQLHQAHQLFQRDAQTITPEALQSVKAALATSDVLDPVAAANARLSDPSTSKKPIPRRAAGQSWEDPTLTEWPENDYRLFCGDLGNEVNDDVLSKAFSRFPSFNMARVVRDKRTGKTKGYGFVSFSNPTDLAAAIKEMNGKYVGNRPIKLRKSNWKERTDVEALERQKNHVKRKPKIPKKTILHK

SEQ ID NO: 9905 - DNA, 1031 bp, Zea mays subsp. mays
  misc_feature (1)..(1031): Ceres Seq. ID no. 12367726
  misc_feature: MA Experiment ID: 108535 Result: Up-regulated in Transcription
  misc_feature: MA Experiment 108535 PARAMETER Experiment Name: Zm_Meristem_P Parameter: Age (day) Value: 8
  misc_feature: MA Experiment 108535 PARAMETER Experiment Name: Zm_Meristem_P Parameter: Organism Value: Zea mays
  misc_feature: MA Experiment 108535 PARAMETER Experiment Name: Zm_Meristem_P Parameter: Plant Line Value: 35A19
  misc_feature: MA Experiment 108535 PARAMETER Experiment Name: Zm_Meristem_P Parameter: Tissue Value: Root Meristem vs. Above Root Meristem
  misc_feature: MA Experiment ID: 108546 Result: Down-regulated in Transcription
  misc_feature: MA Experiment 108546 PARAMETER Experiment Name: Zm_Imbibed_Seeds_P Parameter: Age (day) Value: 3 vs. 2
  misc_feature: MA Experiment 108546 PARAMETER Experiment Name: Zm_Imbibed_Seeds_P Parameter: Organism Value: Zea mays
  misc_feature: MA Experiment 108546 PARAMETER Experiment Name: Zm_Imbibed_Seeds_P Parameter: Plant Line Value: 35A19
  misc_feature: MA Experiment 108546 PARAMETER Experiment Name: Zm_Imbibed_Seeds_P Parameter: Tissue Value: Roots vs. Embryo
  misc_feature: MA Experiment ID: 20000535 Result: Up-regulated in Transcription
  misc_feature: MA Experiment 20000535 PARAMETER Experiment Name: Zm_Hybrid_Seed_Dev_P Parameter: DAP Value: 30 vs. 12
  misc_feature: MA Experiment 20000535 PARAMETER Experiment Name: Zm_Hybrid_Seed_Dev_P Parameter: Organism Value: Zea mays
  misc_feature: MA Experiment 20000535 PARAMETER Experiment Name: Zm_Hybrid_Seed_Dev_P Parameter: Plant Line Value: 35A19
  misc_feature: MA Experiment 20000535 PARAMETER Experiment Name: Zm_Hybrid_Seed_Dev_P Parameter: Tissue Value: Embryo vs. Unfert Floret
gtcggacgaggtaaccatggccgcggggggcaccgccgacttcttctaccgcgagtcgcagcgtctgggctacgtcgccccgctctgcgtttaagctgatccagatgcagaagcagcacaagctcatcgcgccgggcgccgctgtactcgacctcggctgcgcccccggcgcgtggcttcaggtggcttgtcagaacctgggtcccctcgagaagggtggcatcgtcgtcggcgtcgatgttaagaaggtgaaagtgccctctgcgcactgtgactcacgggtcaggacggtctgtgcagatgtcatgacgctgatgaagcggcaggctcgggcaatgtcgccacaggaacgaggattctctgtgatactgtcagacatgtgccccccagtttcagggatcacgactaaagatggagctatatcttgtgagttgggcatgcacgctctctcgttggcagtagggaagataaagttaaaagattctaattacagtgataccctagagaagtatctgagctccactgagcctgagtctgacgaggatggcgttcttcgacgtggaggcaacctggtagtgaagtttcttgagaatgaggacatatcagggtttggcaaattctgcaaggtgaagttcaagaaagtatcgttgttgagacccaaggcgactcgacctagctcgagggagatctacatgatctgcgaaggtttgcggtagaaaggagggctcttcagaaggcaagcgaagactccaagaagctaggtcagttgagttgccctgaactgggcgctgttagttctagcctgctggtgcaggtgctggctgattggcaatgtgatacagctgtttgatgctgatagcctcccagagcaagttaccacaaagctttgtgtgattgaaccatgctagtagttcgtctagatgttacctgtaataattttgttgaactgtgatactagttcgtctaggagaaacaagcatttgacttgagccctttctgagaacctgaaacacccttgctttttatgttgc

SEQ ID NO: 9906 - protein, 203 aa, Zea mays subsp. mays
  peptide (1)..(203): Ceres Seq. ID no. 12367727
  misc_feature (1)..(203): Pfam Name: FtsJ-like methyltransferase Pfam Description: FtsJ-like methyltransferase
  misc_feature (1)..(201): Homolog of NCBI NO: 34897416 NR Description: putative FtsJ cell division protein [Oryza sativa
  misc_feature (1)..(203): Homolog of NCBI NO: 15240727 NR Description: FtsJ (dbj|BAA83750.1); protein id: At5g13830.1 thaliana] >gi|5821280|dbj|BAA83750.1| FtsJ [Arabidopsis thaliana]
  misc_feature (1)..(123): Homolog of NCBI NO: 11499633 NR Description: cell division protein (ftsJ) [Archaeoglobus >gi|9911012|sp|O28228|YK51_ARCFU Putative ribosomal RNA
  misc_feature (149)..(203): Homolog of NCBI NO: 11499633 NR Description: cell division protein (ftsJ) [Archaeoglobus >gi|9911012|sp|O28228|YK51_ARCFU Putative ribosomal RNA
  misc_feature (1)..(138): Homolog of NCBI NO: 15669566 NR Description: cell division protein FtsJ [Methanococcus >gi|3023819|sp|Q58771|YD76_METJA Putative ribosomal RNA
  misc_feature (1)..(118): Homolog of NCBI NO: 23057977 NR Description: hypothetical protein [Pseudomonas fluorescens
  misc_feature (149)..(203): Homolog of NCBI NO: 23057977 NR Description: hypothetical protein [Pseudomonas fluorescens
  misc_feature (1)..(122): Homolog of NCBI NO: 23470949 NR Description: hypothetical protein [Pseudomonas syringae pv.
  misc_feature (149)..(203): Homolog of NCBI NO: 23470949 NR Description: hypothetical protein [Pseudomonas syringae pv.
  misc_feature (1)..(122): Homolog of NCBI NO: 15599946 NR Description: cell division protein FtsJ [Pseudomonas PA01] >gi|12230965|sp|P95454|RRMJ_PSEAE Ribosomal RNA large
MQKQHKLIAPGAAVLDLGCAPGAWLQVACQNLGPLEKGGIVVGVDVKKVKVPSAHCDSRVRTVCADVMTLMKRQARAMSPQERGFSVILSDMCPPVSGITTKDGAISCELGMHALSLAVGKIKLKDSNYSDTLEKYLSSTEPESDEDGVLRRGGNLVVKFLENEDISGFGKFCKVKFKKVSLLRPKATRPSSREIYMICEGLR

SEQ ID NO: 9907 - protein, 136 aa, Zea mays subsp. mays
  peptide (1)..(136): Ceres Seq. ID no. 12367728
  misc_feature (1)..(136): Pfam Name: FtsJ-like methyltransferase Pfam Description: FtsJ-like methyltransferase
  misc_feature (1)..(134): Homolog of NCBI NO: 34897416 NR Description: putative FtsJ cell division protein [Oryza sativa
  misc_feature (1)..(136): Homolog of NCBI NO: 15240727 NR Description: FtsJ (dbj|BAA83750.1); protein id: At5g13830.1 thaliana] >gi|5821280|dbj|BAA83750.1| FtsJ [Arabidopsis thaliana]
  misc_feature (1)..(56): Homolog of NCBI NO: 11499633 NR Description: cell division protein (ftsJ) [Archaeoglobus >gi|9911012|sp|O28228|YK51_ARCFU Putative ribosomal RNA
  misc_feature (82)..(136): Homolog of NCBI NO: 11499633 NR Description: cell division protein (ftsJ) [Archaeoglobus >gi|9911012|sp|O28228|YK51_ARCFU Putative ribosomal RNA
  misc_feature (1)..(71): Homolog of NCBI NO: 15669566 NR Description: cell division protein FtsJ [Methanococcus >gi|3023819|sp|Q58771|YD76_METJA Putative ribosomal RNA
  misc_feature (1)..(51): Homolog of NCBI NO: 23057977 NR Description: hypothetical protein [Pseudomonas fluorescens
  misc_feature (82)..(136): Homolog of NCBI NO: 23057977 NR Description: hypothetical protein [Pseudomonas fluorescens
  misc_feature (1)..(55): Homolog of NCBI NO: 23470949 NR Description: hypothetical protein [Pseudomonas syringae pv.
  misc_feature (82)..(136): Homolog of NCBI NO: 23470949 NR Description: hypothetical protein [Pseudomonas syringae pv.
  misc_feature (1)..(55): Homolog of NCBI NO: 15599946 NR Description: cell division protein FtsJ [Pseudomonas PA01] >gi|12230965|sp|P95454|RRMJ_PSEAE Ribosomal RNA large
MTLMKRQARAMSPQERGFSVILSDMCPPVSGITTKDGAISCELGMHALSLAVGKIKLKDSNYSDTLEKYLSSTEPESDEDGVLRRGGNLVVKFLENEDISGFGKFCKVKFKKVSLLRPKATRPSSREIYMICEGLR

SEQ ID NO: 9908 - protein, 133 aa, Zea mays subsp. mays
  peptide (1)..(133): Ceres Seq. ID no. 12367729
  misc_feature (1)..(133): Pfam Name: FtsJ-like methyltransferase Pfam Description: FtsJ-like methyltransferase
  misc_feature (1)..(131): Homolog of NCBI NO: 34897416 NR Description: putative FtsJ cell division protein [Oryza sativa
  misc_feature (1)..(133): Homolog of NCBI NO: 15240727 NR Description: FtsJ (dbj|BAA83750.1); protein id: At5g13830.1 thaliana] >gi|5821280|dbj|BAA83750.1| FtsJ [Arabidopsis thaliana]
  misc_feature (1)..(53): Homolog of NCBI NO: 11499633 NR Description: cell division protein (ftsJ) [Archaeoglobus >gi|9911012|sp|O28228|YK51_ARCFU Putative ribosomal RNA
  misc_feature (79)..(133): Homolog of NCBI NO: 11499633 NR Description: cell division protein (ftsJ) [Archaeoglobus >gi|9911012|sp|O28228|YK51_ARCFU Putative ribosomal RNA
  misc_feature (1)..(68): Homolog of NCBI NO: 15669566 NR Description: cell division protein FtsJ [Methanococcus >gi|3023819|sp|Q58771|YD76_METJA Putative ribosomal RNA
  misc_feature (1)..(48): Homolog of NCBI NO: 23057977 NR Description: hypothetical protein [Pseudomonas fluorescens
  misc_feature (79)..(133): Homolog of NCBI NO: 23057977 NR Description: hypothetical protein [Pseudomonas fluorescens
  misc_feature (1)..(52): Homolog of NCBI NO: 23470949 NR Description: hypothetical protein [Pseudomonas syringae pv.
  misc_feature (79)..(133): Homolog of NCBI NO: 23470949 NR Description: hypothetical protein [Pseudomonas syringae pv.
  misc_feature (1)..(52): Homolog of NCBI NO: 15599946 NR Description: cell division protein FtsJ [Pseudomonas PA01] >gi|12230965|sp|P95454|RRMJ_PSEAE Ribosomal RNA large
MKRQARAMSPQERGFSVILSDMCPPVSGITTKDGAISCELGMHALSLAVGKIKLKDSNYSDTLEKYLSSTEPESDEDGVLRRGGNLVVKFLENEDISGFGKFCKVKFKKVSLLRPKATRPSSREIYMICEGLR

SEQ ID NO: 9909 - DNA, 1112 bp, Zea mays subsp. mays
  misc_feature (1)..(1112): Ceres Seq. ID no. 13493585
  misc_feature: MA Experiment ID: 20000492 Result: Down-regulated in Transcription
  misc_feature: MA Experiment 20000492 PARAMETER Experiment Name: Zm_Hybrid_Seed_Dev_P Parameter: DAP Value: 12
  misc_feature: MA Experiment 20000492 PARAMETER Experiment Name: Zm_Hybrid_Seed_Dev_P Parameter: Organism Value: Zea mays
  misc_feature: MA Experiment 20000492 PARAMETER Experiment Name: Zm_Hybrid_Seed_Dev_P Parameter: Plant Line Value: 35A19
  misc_feature: MA Experiment 20000492 PARAMETER Experiment Name: Zm_Hybrid_Seed_Dev_P Parameter: Tissue Value: Fert Kernel vs. Unfert Floret
  misc_feature: MA Experiment ID: 20000535 Result: Down-regulated in Transcription
  misc_feature: MA Experiment 20000535 PARAMETER Experiment Name: Zm_Hybrid_Seed_Dev_P Parameter: DAP Value: 30 vs. 12
  misc_feature: MA Experiment 20000535 PARAMETER Experiment Name: Zm_Hybrid_Seed_Dev_P Parameter: Organism Value: Zea mays
  misc_feature: MA Experiment 20000535 PARAMETER Experiment Name: Zm_Hybrid_Seed_Dev_P Parameter: Plant Line Value: 35A19
  misc_feature: MA Experiment 20000535 PARAMETER Experiment Name: Zm_Hybrid_Seed_Dev_P Parameter: Tissue Value: Embryo vs. Unfert Floret
cttccctagaacatcctaatcgaaaaaccagccactagctaggacgtcgctgcttgcttccacgcctccttacggtttatccaagcacagcgagagacctttgcgcgtgtgcgctctcgttcgagctagcagcggcggcatgctgacgaggcggcacggagggttccggctcggccggaagctgctcagcgtctggcgctgggcgctctgccgccgccggcgccgccgcgttcgcggccgcgggtacctccgcctgcagccgtgccaacgaggaggaggcaccaccaaatccccgtccccgtcccccatggcggcgcatgcagtggtaagcatcaagatgatgcagcagcagcagcagaagcacgacgactctgctggctcgccgcggatgctcacgtgggggcggtcgctggcgcggcgggtgaggctcctgcgccggcgcgggggaggaggagggaaggaccggctgctggaggacgccgccgcggatgccaccacgcccaaggggcaggtggccgtgtacgtggtcggcgggggcgagtcgatgcgctacgtggtccccgtggtgtacttcaaccacccgctcttcggggagctgctgcgcgaggccgaggaggagttcggcttccagcaccccggcgggatcaccatcccgtgcgcggcctcgcggttcgagcgcgccgccgccgtggccgccgcaggcggcggcgccgccgccgggaagaaggtgccttctgtctggtggtagcagcacgtggccacacggtggccggtgtacatacatacacacgtgcatgcccatcaggatcaggccgcagccggccctcaggaggatcccgatcgattcccatgggaaatggggactgacgatccttctatatattttttctctccttctcgtttgacttttcctttttgccctcttgcgccgtttgcttgtgtggattgagcatgtgcatgggatgcgaggaggatggatagttgtagtttgtttgagagatgaacaaggcttttttttaatttagggtcagcataaacatgttcccattccccccccaacttgcaaagtccatcatcatatatatccatttattagagagcatctaatatgc

SEQ ID NO: 9910 - protein, 202 aa, Zea mays subsp. mays
  peptide (1)..(202): Ceres Seq. ID no. 13493586
  misc_feature (85)..(180): Pfam Name: Auxin responsive protein Pfam Description: Auxin responsive protein
  misc_feature (84)..(188): Homolog of NCBI NO: 38567865 NR Description: OSJNBa0091D06.3 [Oryza sativa (japonica
  misc_feature (1)..(53): Homolog of NCBI NO: 38567865 NR Description: OSJNBa0091D06.3 [Oryza sativa (japonica
  misc_feature (83)..(190): Homolog of NCBI NO: 15232400 NR Description: auxin-induced (indole-3-acetic acid induced)
  misc_feature (83)..(191): Homolog of NCBI NO: 15225432 NR Description: auxin-induced (indole-3-acetic acid induced)
  misc_feature (65)..(187): Homolog of NCBI NO: 15235723 NR Description: auxin-induced (indole-3-acetic acid induced)
  misc_feature (121)..(178): Homolog of NCBI NO: 18411465 NR Description: auxin-induced (indole-3-acetic acid induced)
  misc_feature (89)..(187): Homolog of NCBI NO: 15234550 NR Description: auxin-induced (indole-3-acetic acid induced)
  misc_feature (111)..(178): Homolog of NCBI NO: 15226485 NR Description: auxin-induced (indole-3-acetic acid induced)
  misc_feature (105)..(178): Homolog of NCBI NO: 15238736 NR Description: auxin-induced (indole-3-acetic acid induced)
  misc_feature (118)..(183): Homolog of NCBI NO: 15226484 NR Description: auxin-induced (indole-3-acetic acid induced)
MLTRRHGGFRLGRKLLSVWRWALCRRRRRRVRGRGYLRLQPCQRGGGTTKSPSPSPMAAHAVVSIKMMQQQQQKHDDSAGSPRMLTWGRSLARRVRLLRRRGGGGGKDRLLEDAAADATTPKGQVAVYVVGGGESMRYVVPVVYFNHPLFGELLREAEEEFGFQHPGGITIPCAASRFERAAAVAAAGGGAAAGKKVPSVWW

SEQ ID NO: 9911 - protein, 146 aa, Zea mays subsp. mays
  peptide (1)..(146): Ceres Seq. ID no. 13493587
  misc_feature (29)..(124): Pfam Name: Auxin responsive protein Pfam Description: Auxin responsive protein
  misc_feature (28)..(132): Homolog of NCBI NO: 38567865 NR Description: OSJNBa0091D06.3 [Oryza sativa (japonica
  misc_feature (27)..(134): Homolog of NCBI NO: 15232400 NR Description: auxin-induced (indole-3-acetic acid induced)
  misc_feature (27)..(135): Homolog of NCBI NO: 15225432 NR Description: auxin-induced (indole-3-acetic acid induced)
  misc_feature (9)..(131): Homolog of NCBI NO: 15235723 NR Description: auxin-induced (indole-3-acetic acid induced)
  misc_feature (65)..(122): Homolog of NCBI NO: 18411465 NR Description: auxin-induced (indole-3-acetic acid induced)
  misc_feature (33)..(131): Homolog of NCBI NO: 15234550 NR Description: auxin-induced (indole-3-acetic acid induced)
  misc_feature (55)..(122): Homolog of NCBI NO: 15226485 NR Description: auxin-induced (indole-3-acetic acid induced)
  misc_feature (49)..(122): Homolog of NCBI NO: 15238736 NR Description: auxin-induced (indole-3-acetic acid induced)
  misc_feature (62)..(127): Homolog of NCBI NO: 15226484 NR Description: auxin-induced (indole-3-acetic acid induced)
  misc_feature (65)..(128): Homolog of NCBI NO: 15236188 NR Description: auxin-induced (indole-3-acetic acid induced)
MAAHAVVSIKMMQQQQQKHDDSAGSPRMLTWGRSLARRVRLLRRRGGGGGKDRLLEDAAADATTPKGQVAVYVVGGGESMRYVVPVVYFNHPLFGELLREAEEEFGFQHPGGITIPCAASRFERAAAVAAAGGGAAAGKKVPSVWW

SEQ ID NO: 9912 - protein, 138 aa, Zea mays subsp. mays
  peptide (1)..(138): Ceres Seq. ID no. 13493588
  misc_feature (1)..(65): Pfam Name: Cupin Pfam Description: Cupin
  misc_feature (1)..(79): Homolog of NCBI NO: 13376335 NR Description: hypothetical protein FLJ14280 [Homo sapiens]
MPPRPRGRWPCTWSAGASRCATWSPWCTSTTRSSGSCCARPRRSSASSTPAGSPSRARPRGSSAPPPWPPQAAAPPPGRRCLLSGGSSTWPHGGRCTYIHTCMPIRIRPQPALRRIPIDSHGKWGLTILLYIFSLLLV

SEQ ID NO: 9913 - DNA, 1032 bp, Zea mays subsp. mays
  misc_feature (1)..(1032): Ceres Seq. ID no. 12415130
  misc_feature: MA Experiment ID: 108527 Result: Up-regulated in Transcription
  misc_feature: MA Experiment 108527 PARAMETER Experiment Name: Zm_5mM_NO_P Parameter: Age (day) Value: 8
  misc_feature: MA Experiment 108527 PARAMETER Experiment Name: Zm_5mM_NO_P Parameter: Organism Value: Zea mays
  misc_feature: MA Experiment 108527 PARAMETER Experiment Name: Zm_5mM_NO_P Parameter: Plant Line Value: 35A19
  misc_feature: MA Experiment 108527 PARAMETER Experiment Name: Zm_5mM_NO_P Parameter: Timepoint (hr) Value: 6
  misc_feature: MA Experiment 108527 PARAMETER Experiment Name: Zm_5mM_NO_P Parameter: Tissue Value: Aerial
  misc_feature: MA Experiment 108527 PARAMETER Experiment Name: Zm_5mM_NO_P Parameter: Treatment Value: 5mM NO vs. No Treatment
  misc_feature: MA Experiment ID: 108528 Result: Down-regulated in Transcription
  misc_feature: MA Experiment 108528 PARAMETER Experiment Name: Zm_Imbibed_Seeds_P Parameter: Age (day) Value: 5 vs. 2
  misc_feature: MA Experiment 108528 PARAMETER Experiment Name: Zm_Imbibed_Seeds_P Parameter: Organism Value: Zea mays
  misc_feature: MA Experiment 108528 PARAMETER Experiment Name: Zm_Imbibed_Seeds_P Parameter: Plant Line Value: 35A19
  misc_feature: MA Experiment 108528 PARAMETER Experiment Name: Zm_Imbibed_Seeds_P Parameter: Tissue Value: Aerial vs. Embryo
  misc_feature: MA Experiment ID: 108543 Result: Down-regulated in Transcription
  misc_feature: MA Experiment ID: 108545 Result: Down-regulated in Transcription
  misc_feature: MA Experiment 108545 PARAMETER Experiment Name: Zm_Imbibed_Seeds_P Parameter: Age (day) Value: 3 vs. 2
  misc_feature: MA Experiment 108545 PARAMETER Experiment Name: Zm_Imbibed_Seeds_P Parameter: Organism Value: Zea mays
  misc_feature: MA Experiment 108545 PARAMETER Experiment Name: Zm_Imbibed_Seeds_P Parameter: Plant Line Value: 35A19
  misc_feature: MA Experiment 108545 PARAMETER Experiment Name: Zm_Imbibed_Seeds_P Parameter: Tissue Value: Aerial vs. Embryo
  misc_feature: MA Experiment ID: 108547 Result: Down-regulated in Transcription
  misc_feature: MA Experiment 108547 PARAMETER Experiment Name: Zm_Imbibed_Seeds_P Parameter: Age (day) Value: 4 vs. 2
  misc_feature: MA Experiment 108547 PARAMETER Experiment Name: Zm_Imbibed_Seeds_P Parameter: Organism Value: Zea mays
  misc_feature: MA Experiment 108547 PARAMETER Experiment Name: Zm_Imbibed_Seeds_P Parameter: Plant Line Value: 35A19
  misc_feature: MA Experiment 108547 PARAMETER Experiment Name: Zm_Imbibed_Seeds_P Parameter: Tissue Value: Aerial vs. Embryo
  misc_feature: MA Experiment ID: 20000478 Result: Up-regulated in Transcription
  misc_feature: MA Experiment 20000478 PARAMETER Experiment Name: Zm_5mM_SA_P Parameter: Age (day) Value: 11
  misc_feature: MA Experiment 20000478 PARAMETER Experiment Name: Zm_5mM_SA_P Parameter: Organism Value: Zea mays
  misc_feature: MA Experiment 20000478 PARAMETER Experiment Name: Zm_5mM_SA_P Parameter: Plant Line Value: 35A19
  misc_feature: MA Experiment 20000478 PARAMETER Experiment Name: Zm_5mM_SA_P Parameter: Timepoint (hr) Value: 72
  misc_feature: MA Experiment 20000478 PARAMETER Experiment Name: Zm_5mM_SA_P Parameter: Tissue Value: Aerial
  misc_feature: MA Experiment 20000478 PARAMETER Experiment Name: Zm_5mM_SA_P Parameter: Treatment Value: 5mM SA vs. No Treatment
  misc_feature: MA Experiment ID: 20000535 Result: Down-regulated in Transcription
  misc_feature: MA Experiment 20000535 PARAMETER Experiment Name: Zm_Hybrid_Seed_Dev_P Parameter: DAP Value: 30 vs. 12
  misc_feature: MA Experiment 20000535 PARAMETER Experiment Name: Zm_Hybrid_Seed_Dev_P Parameter: Organism Value: Zea mays
  misc_feature: MA Experiment 20000535 PARAMETER Experiment Name: Zm_Hybrid_Seed_Dev_P Parameter: Plant Line Value: 35A19
  misc_feature: MA Experiment 20000535 PARAMETER Experiment Name: Zm_Hybrid_Seed_Dev_P Parameter: Tissue Value: Embryo vs. Unfert Floret
  misc_feature: MA Experiment ID: 20000626 Result: Up-regulated in Transcription
  misc_feature: MA Experiment 20000626 PARAMETER Experiment Name: Zm_Herbicide-Treatments_P Parameter: Timepoint (hr) Value: 12
  misc_feature: MA Experiment 20000626 PARAMETER Experiment Name: Zm_Herbicide-Treatments_P Parameter: Tissue Value: Aerial
  misc_feature: MA Experiment 20000626 PARAMETER Experiment Name: Zm_Herbicide-Treatments_P Parameter: Treatment Value: Roundup vs. No Treatment
agctagctcgctgtggcaggctggcagcatgttccgatctgccgtggcagcgtctcgtcagggccagcgggaagagtacggccgacccagccgccgccgcgtccgctttcttcctcagtcgcttctccgcggcgggccgggccgccatcgccacagaggctggctggaaaggtagcgctgatcatcggcagggcaactggggcgccacgtcgccgcggagctgagcctgctgggggggcccggcccggcggcggccgtccactacacccgctgcgacgtgaccgacgaggcgcaggtcgcggcggcggtggacctggccgtggagctgcacggccgcctcgacgtgatgctcagcaacgccggcatcagcggcagcctggcgccggcccccgtggcggcgctggacctggccgacttcgaccgcgtcatggccgtgaacgcccgcgccgcggtggcgggcgtcaagcacgcggcgcgcgtcatggtgccccgccgcgccggcagcatcgtgtgcacggccagcgtggccggcgtgctgggcggcgtcgcgctgccgccctacagcgtgtccaaggccgccgtgctgggcctggtgcgcgccgtggccgggcagntcgcgcgntcgggcgtccgcgtcaacgccatntcgcccacctacatccccacgccgctcgtcatgggcgccatggccgagtggttccccggcgccaccgccgaggagcgcaggcggatcgtggagaaggacatgaacgagatggacggccccgtgctccaggtggaggacgtggccagcgccgccctgtacctggcgtccgatgagtccaagtgtgtcaatggccacaacctcgtcgtcgacggcggcttcacggtggggaaggcgcccaatatgccgccgcctggaaactactgagcagctaccacttgccaatctaaaggcacggtggatgactttctattgagcatttctttttcttttgcgattggaaaacttaggtaatatagttaaaagaactcgatcacgcgttttctttc

SEQ ID NO: 9914 - protein, 187 aa, Zea mays subsp. mays
  peptide (1)..(187): Ceres Seq. ID no. 12415131
  misc_feature (1)..(187): Homolog of NCBI NO: 33354194 NR Description: putative sex determination protein tasselseed 2
  misc_feature (1)..(187): Homolog of NCBI NO: 34899190 NR Description: alcohol dehydrogenase-like protein [Oryza sativa
  misc_feature (1)..(184): Homolog of NCBI NO: 34899188 NR Description: similar to alcohol dehydrogenase [Oryza sativa
  misc_feature (1)..(184): Homolog of NCBI NO: 33146507 NR Description: putative short-chain alcohol dehydrogenase [Oryza
  misc_feature (1)..(186): Homolog of NCBI NO: 34899230 NR Description: alcohol dehydrogenase-like protein [Oryza sativa
  misc_feature (1)..(186): Homolog of NCBI NO: 34899228 NR Description: alcohol dehydrogenase-like protein [Oryza sativa
  misc_feature (1)..(180): Homolog of NCBI NO: 34899216 NR Description: alcohol dehydrogenase-like protein [Oryza sativa
  misc_feature (1)..(184): Homolog of NCBI NO: 34899220 NR Description: alcohol dehydrogenase-like protein [Oryza sativa
  misc_feature (1)..(181): Homolog of NCBI NO: 34899218 NR Description: alcohol dehydrogenase-like protein~contains EST
  misc_feature (1)..(182): Homolog of NCBI NO: 33354197 NR Description: putative sex determination protein tasselseed 2
  misc_feature (90)..(90): Xaa is any aa, unknown or other
  misc_feature (92)..(92): Xaa is any aa, unknown or other
  misc_feature (100)..(100): Xaa is any aa, unknown or other
MLSNAGISGSLAPAPVAALDLADFDRVMAVNARAAVAGVKHAARVMVPRRAGSIVCTASVAGVLGGVALPPYSVSKAAVLGLVRAVAGQXAXSGVRVNAXSPTYIPTPLVMGAMAEWFPGATAEERRRIVEKDMNEMDGPVLQVEDVASAALYLASDESKCVNGHNLVVDGGFTVGKAPNMPPPGNY

SEQ ID NO: 9915 - protein, 160 aa, Zea mays subsp. mays
  peptide (1)..(160): Ceres Seq. ID no. 12415132
  misc_feature (1)..(160): Homolog of NCBI NO: 33354194 NR Description: putative sex determination protein tasselseed 2
  misc_feature (1)..(160): Homolog of NCBI NO: 34899190 NR Description: alcohol dehydrogenase-like protein [Oryza sativa
  misc_feature (1)..(157): Homolog of NCBI NO: 34899188 NR Description: similar to alcohol dehydrogenase [Oryza sativa
  misc_feature (1)..(157): Homolog of NCBI NO: 33146507 NR Description: putative short-chain alcohol dehydrogenase [Oryza
  misc_feature (1)..(159): Homolog of NCBI NO: 34899230 NR Description: alcohol dehydrogenase-like protein [Oryza sativa
  misc_feature (1)..(159): Homolog of NCBI NO: 34899228 NR Description: alcohol dehydrogenase-like protein [Oryza sativa
  misc_feature (1)..(153): Homolog of NCBI NO: 34899216 NR Description: alcohol dehydrogenase-like protein [Oryza sativa
  misc_feature (1)..(157): Homolog of NCBI NO: 34899220 NR Description: alcohol dehydrogenase-like protein [Oryza sativa
  misc_feature (1)..(154): Homolog of NCBI NO: 34899218 NR Description: alcohol dehydrogenase-like protein~contains EST
  misc_feature (1)..(155): Homolog of NCBI NO: 33354197 NR Description: putative sex determination protein tasselseed 2
  misc_feature (63)..(63): Xaa is any aa, unknown or other
  misc_feature (65)..(65): Xaa is any aa, unknown or other
  misc_feature (73)..(73): Xaa is any aa, unknown or other
MAVNARAAVAGVKHAARVMVPRRAGSIVCTASVAGVLGGVALPPYSVSKAAVLGLVRAVAGQXAXSGVRVNAXSPTYIPTPLVMGAMAEWFPGATAEERRRIVEKDMNEMDGPVLQVEDVASAALYLASDESKCVNGHNLVVDGGFTVGKAPNMPPPGNY

SEQ ID NO: 9916 - protein, 142 aa, Zea mays subsp. mays
  peptide (1)..(142): Ceres Seq. ID no. 12415133
  misc_feature (1)..(142): Homolog of NCBI NO: 33354194 NR Description: putative sex determination protein tasselseed 2
  misc_feature (1)..(142): Homolog of NCBI NO: 34899190 NR Description: alcohol dehydrogenase-like protein [Oryza sativa
  misc_feature (1)..(139): Homolog of NCBI NO: 34899188 NR Description: similar to alcohol dehydrogenase [Oryza sativa
  misc_feature (1)..(139): Homolog of NCBI NO: 33146507 NR Description: putative short-chain alcohol dehydrogenase [Oryza
  misc_feature (1)..(141): Homolog of NCBI NO: 34899230 NR Description: alcohol dehydrogenase-like protein [Oryza sativa
  misc_feature (1)..(141): Homolog of NCBI NO: 34899228 NR Description: alcohol dehydrogenase-like protein [Oryza sativa
  misc_feature (1)..(135): Homolog of NCBI NO: 34899216 NR Description: alcohol dehydrogenase-like protein [Oryza sativa
  misc_feature (1)..(139): Homolog of NCBI NO: 34899220 NR Description: alcohol dehydrogenase-like protein [Oryza sativa
  misc_feature (1)..(136): Homolog of NCBI NO: 34899218 NR Description: alcohol dehydrogenase-like protein~contains EST
  misc_feature (1)..(137): Homolog of NCBI NO: 33354197 NR Description: putative sex determination protein tasselseed 2
  misc_feature (45)..(45): Xaa is any aa, unknown or other
  misc_feature (47)..(47): Xaa is any aa, unknown or other
  misc_feature (55)..(55): Xaa is any aa, unknown or other
MVPRRAGSIVCTASVAGVLGGVALPPYSVSKAAVLGLVRAVAGQXAXSGVRVNAXSPTYIPTPLVMGAMAEWFPGATAEERRRIVEKDMNEMDGPVLQVEDVASAALYLASDESKCVNGHNLVVDGGFTVGKAPNMPPPGNY

SEQ ID NO: 9917 - DNA, 1180 bp, Zea mays subsp. mays
  misc_feature (1)..(1180): Ceres Seq. ID no. 12357243
  misc_feature: MA Experiment ID: 108522 Result: Up-regulated in Transcription
  misc_feature: MA Experiment 108522 PARAMETER Experiment Name: Zm_42deg_Heat_P Parameter: Age (day) Value: 8
  misc_feature: MA Experiment 108522 PARAMETER Experiment Name: Zm_42deg_Heat_P Parameter: Organism Value: Zea mays
  misc_feature: MA Experiment 108522 PARAMETER Experiment Name: Zm_42deg_Heat_P Parameter: Plant Line Value: 35A19
  misc_feature: MA Experiment 108522 PARAMETER Experiment Name: Zm_42deg_Heat_P Parameter: Temperature (deg C) Value: 42 vs. 22
  misc_feature: MA Experiment 108522 PARAMETER Experiment Name: Zm_42deg_Heat_P Parameter: Timepoint (hr) Value: 1
  misc_feature: MA Experiment 108522 PARAMETER Experiment Name: Zm_42deg_Heat_P Parameter: Tissue Value: Aerial
attcctctccgccccctcccaccccacccgcttctaggacgcagcagcgcacccccgatcctcgcctgtcgcctccatctccattcgcaggcctgagaccctcgcctgcaccgcgctgccgccagccatgggaatggggcctctgcgagaacgccgcgtcggccgccgctgagtccgcggccttgccggaggccggcgccgcctcggcagcgggctcgtacgcggtgctgcagtgcggcgaggactcggagtacgtgcggcagaagtacggcggctacttcgccgtcttccgcgcgctgctggaggaggacggcgagagctggcgcgtgtaccgcgccgtcggcggggagctccccaccgacgccgaggccggccggcttcgacgggttcgtcatctccgggagctgctccgacgcgcacggcgacgagccctggatcctggacctcgtcggcctcatccgccgcctccacgccgccggcaagcgcatcctcggcgtctgcttcggccaccagatcctgtgccgggcgctgggcgggcgcaccgggcggtcgaccaagggctgggacatcggggtgagctgcatccacccgacggcggcggcggcgcggctgttcgcgccgctgaagctgccggtgcacatgccggtgatcgagttccaccacgacgaggtgtgggagctgcccgccggcgccgaggtgctggcgcggtcggaccagacccgcgtggagatgttccgcctgggggaccgcgccatgggcgtccagggccacccggagtacagcaaggacatcctcatgagcatcgccgaccgcctcctccggcataaccacatcctggactgccaggtggacgtggccaaggcgagcttcgacgtgcggcagccggacaaggagctgtggaagaaggtgtgcaggggcttcctcaaggggaggctgcaggcgctatagcaattccactaaccgctgcagaggaggaaattgggatgtcttaggttaatttttaattcacccttgttttgtgcttcagagctcaagagttgtacataaactactattgtccgaagcattaataaactcaacaacatcgttctcgtactgcctgctgtttctgtgcctcgtcgacagtctcagcatctgtcattggcgtatctggtgaacgatgtcgttggaactgattttc

SEQ ID NO: 9918 - protein, 274 aa, Zea mays subsp. mays
  peptide (1)..(274): Ceres Seq. ID no. 12357244
  misc_feature (46)..(123): Homolog of NCBI NO: 13174241 NR Description: putative glutamine synthetase [Oryza sativa]
  misc_feature (73)..(122): Homolog of NCBI NO: 15224079 NR Description: unknown protein; protein id: At2g23970.1
  misc_feature (81)..(120): Homolog of NCBI NO: 17381294 NR Description: AT4g30550/F17I23_110 [Arabidopsis thaliana]
  misc_feature (81)..(120): Homolog of NCBI NO: 15234767 NR Description: putative protein; protein id: At4g30550.1, by cDNA: 29388., supported by cDNA: gi_17381293 [Arabidopsis >gi|25407659|pir||D85357 hypothetical protein AT4g30550
  misc_feature (81)..(120): Homolog of NCBI NO: 21555885 NR Description: unknown [Arabidopsis thaliana]
  misc_feature (73)..(122): Homolog of NCBI NO: 14009290 NR Description: defense-related protein [Brassica carinata]
  misc_feature (73)..(122): Homolog of NCBI NO: 15234763 NR Description: putative protein; protein id: At4g30530.1, by cDNA: 37987., supported by cDNA: gi_15294151, supported by gi_20147268 [Arabidopsis thaliana] >gi|25407655|pir||B85357
  misc_feature (73)..(122): Homolog of NCBI NO: 15234765 NR Description: putative protein; protein id: At4g30540.1
  misc_feature (73)..(122): Homolog of NCBI NO: 21593315 NR Description: defense-related protein [Arabidopsis thaliana]
  misc_feature (73)..(122): Homolog of NCBI NO: 15224078 NR Description: unknown protein; protein id: At2g23960.1
SSPPPPTPPASRTQQRTPDPRLSPPSPFAGLRPSPAPRCRQPWEWGLCENAASAAAESAALPEAGAASAAGSYAVLQCGEDSEYVRQKYGGYFAVFRALLEEDGESWRVYRAVGGELPTDAEAGRLRRVRHLRELLRRARRRALDPGPRRPHPPPPRRRQAHPRRLLRPPDPVPGAGRAHRAVDQGLGHRGELHPPDGGGGAAVRAAEAAGAHAGDRVPPRRGVGAARRRRGAGAVGPDPRGDVPPGGPRHGRPGPPGVQQGHPHEHRRPPPPA

SEQ ID NO: 9919 - DNA, 901 bp, Zea mays subsp. mays
  misc_feature (1)..(901): Ceres Seq. ID no. 12349401
  misc_feature: MA Experiment ID: 20000492 Result: Down-regulated in Transcription
  misc_feature: MA Experiment 20000492 PARAMETER Experiment Name: Zm_Hybrid_Seed_Dev_P Parameter: DAP Value: 12
  misc_feature: MA Experiment 20000492 PARAMETER Experiment Name: Zm_Hybrid_Seed_Dev_P Parameter: Organism Value: Zea mays
  misc_feature: MA Experiment 20000492 PARAMETER Experiment Name: Zm_Hybrid_Seed_Dev_P Parameter: Plant Line Value: 35A19
  misc_feature: MA Experiment 20000492 PARAMETER Experiment Name: Zm_Hybrid_Seed_Dev_P Parameter: Tissue Value: Fert Kernel vs. Unfert Floret
aataaataaggaaaattctgaaggagtaatattgcttggtcatagtactggatgccaggatattgtgcattatatgcgcacaaactttgcctgttcgaaagcggtttctggggtcatcttgcaggccccagtaagtgacagggagtatagagcaactcttccggaaacagctgaaatgatagacctggcagccaaactgattagcgagggtcgtggaatggatttgatgcctagaaaagcaaactcagatgctcctattactgcctacaggtaccactccctttgttcatatatgggtgatgatgacatgttcagttcagatctaagtgaagatcagctgaggcagagacttggtcatatgtcaatcacacagtgccaggttattttttcaatgggggatgaatatgtacctgaatatgttgataagagggctctactagacaggctatgtagggcgctgggaggtgcagagaaagtcgagatagaatggggaaaccatgctctgtccaacagagtgcaagaagcagttgtggccattgtagattttgtcaagagggaggggcccaaaggctgggacgacccatggagctagatacagcagttataatctcatttgtaactagtttgtgcttttcctcttctctcttttctccaattgtaacatctttcttttgcattattattggtccatttttcaatagtgatatgctatttttcttataaccccctcccccaaacatgcatcgcgttctcattctagtatggtgtatcacatatgtaaattgcgttaggaatcttgattatcaggctgtctttggtggatcatgtaaaattggagttgtgggaacaaggagctgttggagacggcatcagatcaacttcgtgcaaacttcagttttgg

SEQ ID NO: 9920 - protein, 196 aa, Zea mays subsp. mays
  peptide (1)..(196): Ceres Seq. ID no. 12349402
  misc_feature (1)..(196): Homolog of NCBI NO: 15239639 NR Description: putative protein; protein id: At5g19050.1, by cDNA: gi_18377687 [Arabidopsis thaliana] hypothetical protein [Arabidopsis thaliana]
  misc_feature (98)..(196): Homolog of NCBI NO: 34900044 NR Description: hypothetical protein~predicted by GeneMark.hmm
  misc_feature (1)..(103): Homolog of NCBI NO: 34900046 NR Description: contains EST C72879(E2411)~similar to Arabidopsis
  misc_feature (9)..(151): Homolog of NCBI NO: 32403674 NR Description: hypothetical protein [Neurospora crassa]
  misc_feature (1)..(196): Homolog of NCBI NO: 34393295 NR Description: unknown protein [Oryza sativa (japonica
INKENSEGVILLGHSTGCQDIVHYMRTNFACSKAVSGVILQAPVSDREYRATLPETAEMIDLAAKLISEGRGMDLMPRKANSDAPITAYRYHSLCSYMGDDDMFSSDLSEDQLRQRLGHMSITQCQVIFSMGDEYVPEYVDKRALLDRLCRALGGAEKVEIEWGNHALSNRVQEAVVAIVDFVKREGPKGWDDPWS

SEQ ID NO: 9921 - protein, 172 aa, Zea mays subsp. mays
  peptide (1)..(172): Ceres Seq. ID no. 12349403
  misc_feature (1)..(172): Homolog of NCBI NO: 34393295 NR Description: unknown protein [Oryza sativa (japonica
  misc_feature (1)..(172): Homolog of NCBI NO: 15239639 NR Description: putative protein; protein id: At5g19050.1, by cDNA: gi_18377687 [Arabidopsis thaliana] hypothetical protein [Arabidopsis thaliana]
  misc_feature (74)..(172): Homolog of NCBI NO: 34900044 NR Description: hypothetical protein~predicted by GeneMark.hmm
  misc_feature (1)..(79): Homolog of NCBI NO: 34900046 NR Description: contains EST C72879(E2411)~similar to Arabidopsis
  misc_feature (1)..(127): Homolog of NCBI NO: 32403674 NR Description: hypothetical protein [Neurospora crassa]
MRTNFACSKAVSGVILQAPVSDREYRATLPETAEMIDLAAKLISEGRGMDLMPRKANSDAPITAYRYHSLCSYMGDDDMFSSDLSEDQLRQRLGHMSITQCQVIFSMGDEYVPEYVDKRALLDRLCRALGGAEKVEIEWGNHALSNRVQEAVVAIVDFVKREGPKGWDDPWS

SEQ ID NO: 9922 - protein, 138 aa, Zea mays subsp. mays
  peptide (1)..(138): Ceres Seq. ID no. 12349404
  misc_feature (1)..(138): Homolog of NCBI NO: 34393295 NR Description: unknown protein [Oryza sativa (japonica
  misc_feature (1)..(138): Homolog of NCBI NO: 15239639 NR Description: putative protein; protein id: At5g19050.1, by cDNA: gi_18377687 [Arabidopsis thaliana] hypothetical protein [Arabidopsis thaliana]
  misc_feature (40)..(138): Homolog of NCBI NO: 34900044 NR Description: hypothetical protein~predicted by GeneMark.hmm
  misc_feature (1)..(45): Homolog of NCBI NO: 34900046 NR Description: contains EST C72879(E2411)~similar to Arabidopsis
  misc_feature (1)..(93): Homolog of NCBI NO: 32403674 NR Description: hypothetical protein [Neurospora crassa]
MIDLAAKLISEGRGMDLMPRKANSDAPITAYRYHSLCSYMGDDDMFSSDLSEDQLRQRLGHMSITQCQVIFSMGDEYVPEYVDKRALLDRLCRALGGAEKVEIEWGNHALSNRVQEAVVAIVDFVKREGPKGWDDPWS

SEQ ID NO: 9923 - DNA, 835 bp, Zea mays subsp. mays
  misc_feature (1)..(835): Ceres Seq. ID no. 12415818
  misc_feature: MA Experiment ID: 108522 Result: Up-regulated in Transcription
  misc_feature: MA Experiment 108522 PARAMETER Experiment Name: Zm_42deg_Heat_P Parameter: Age (day) Value: 8
  misc_feature: MA Experiment 108522 PARAMETER Experiment Name: Zm_42deg_Heat_P Parameter: Organism Value: Zea mays
  misc_feature: MA Experiment 108522 PARAMETER Experiment Name: Zm_42deg_Heat_P Parameter: Plant Line Value: 35A19
  misc_feature: MA Experiment 108522 PARAMETER Experiment Name: Zm_42deg_Heat_P Parameter: Temperature (deg C) Value: 42 vs. 22
  misc_feature: MA Experiment 108522 PARAMETER Experiment Name: Zm_42deg_Heat_P Parameter: Timepoint (hr) Value: 1
  misc_feature: MA Experiment 108522 PARAMETER Experiment Name: Zm_42deg_Heat_P Parameter: Tissue Value: Aerial
  misc_feature: MA Experiment ID: 108523 Result: Up-regulated in Transcription
  misc_feature: MA Experiment 108523 PARAMETER Experiment Name: Zm_42deg_Heat_P Parameter: Age (day) Value: 8
  misc_feature: MA Experiment 108523 PARAMETER Experiment Name: Zm_42deg_Heat_P Parameter: Organism Value: Zea mays
  misc_feature: MA Experiment 108523 PARAMETER Experiment Name: Zm_42deg_Heat_P Parameter: Plant Line Value: 35A19
  misc_feature: MA Experiment 108523 PARAMETER Experiment Name: Zm_42deg_Heat_P Parameter: Temperature (deg C) Value: 42 vs. 22
  misc_feature: MA Experiment 108523 PARAMETER Experiment Name: Zm_42deg_Heat_P Parameter: Timepoint (hr) Value: 6
  misc_feature: MA Experiment 108523 PARAMETER Experiment Name: Zm_42deg_Heat_P Parameter: Tissue Value: Aerial
  misc_feature: MA Experiment ID: 108559 Result: Up-regulated in Transcription
  misc_feature: MA Experiment 108559 PARAMETER Experiment Name: Zm_5mM_NO_P Parameter: Age (day) Value: 8
  misc_feature: MA Experiment 108559 PARAMETER Experiment Name: Zm_5mM_NO_P Parameter: Organism Value: Zea mays
  misc_feature: MA Experiment 108559 PARAMETER Experiment Name: Zm_5mM_NO_P Parameter: Plant Line Value: 35A19
  misc_feature: MA Experiment 108559 PARAMETER Experiment Name: Zm_5mM_NO_P Parameter: Timepoint (hr) Value: 12
  misc_feature: MA Experiment 108559 PARAMETER Experiment Name: Zm_5mM_NO_P Parameter: Tissue Value: Aerial
  misc_feature: MA Experiment 108559 PARAMETER Experiment Name: Zm_5mM_NO_P Parameter: Treatment Value: 5mM NO vs. No Treatment
gctctcgggctctcggcttcgaatcccgacaacctccctccccgaagctgcttagccgccggctgggcctcagacctgcgtcaagcttccggcggcagcccttcgagcatcacaatggcgtccggcggagcggccatctcggcggggcctacaccaccgtcggcgacgacggcgtcgtcggttgagtggcaccagcggccgccgaacccgaagaatcccgtggtgttcttcgacgtgaccatcgggtccatcgccgccggccgcatcaagatggagctcttcgccgacatcgcccccaagaccgcggagaacttccggcagttctgcactggggagcatagaaaaaatgctttgccacaaggttataagggctgccaattccatagagtgatcaaagatttcatgattcagggtggtgacttcttgaagaatgatggtactggatgcacatcaatctacggtaccaaatttgatgatgaaaattttatagcaaagcatacagggcctggactgctctcgatggcaaacagtggaattaactctaatggatctcagttctttataacatgtgcaaagtgtgactggcttgacaacaaacatgtggtatttgggagagtgcttggagacggtttgctcgtcgtgaggaagattgaaaatgttgcaactggagcgaataacaaaccaaagcttgcctgcgttataagtgagtgtggtgaaatgtagcttgatccctttgtgtggctaatcgtggactctttacgctgctgatgtagaccctgtttggttgatggaagtacttaagcagtggaaacattgatggaaatgtattgtgtct

SEQ ID NO: 9924 - protein, 240 aa, Zea mays subsp. mays
  peptide (1)..(240): Ceres Seq. ID no. 12415819
  misc_feature (74)..(240): Pfam Name: Cyclophilin type peptidyl-prolyl cis-trans isomerase Pfam Description: Cyclophilin type peptidyl-prolyl cis-trans
  misc_feature (39)..(240): Homolog of NCBI NO: 15224944 NR Description: putative peptidyl-prolyl cis-trans isomerase;
  misc_feature (54)..(240): Homolog of NCBI NO: 4454307 NR Description: cyclophilin [Pseudotsuga menziesii]
  misc_feature (66)..(240): Homolog of NCBI NO: 37595420 NR Description: peptidyl prolyl isomerase H [Danio rerio]
  misc_feature (65)..(240): Homolog of NCBI NO: 11602709 NR Description: putative U-snRNP-associated cyclophilin
  misc_feature (69)..(240): Homolog of NCBI NO: 5454154 NR Description: peptidyl prolyl isomerase H; cyclophilin H [Homo >gi|20830368|ref|XP_132057.1| similar to cyclophilin [Mus >gi|21312022|ref|NP_082953.1| RIKEN cDNA 1100001J08; DNA segment,
  misc_feature (69)..(240): Homolog of NCBI NO: 39849992 NR Description: Unknown (protein for MGC:76244) [Silurana
  misc_feature (69)..(240): Homolog of NCBI NO: 39597495 NR Description: Hypothetical protein CBG03161 [Caenorhabditis
  misc_feature (69)..(240): Homolog of NCBI NO: 17532643 NR Description: Peptidyl-prolyl cis-trans isomerase cyclophilin
  misc_feature (72)..(240): Homolog of NCBI NO: 24586038 NR Description: CG17266-PA [Drosophila melanogaster]
  misc_feature (66)..(220): Homolog of NCBI NO: 28278913 NR Description: Similar to RIKEN cDNA 1100001J08 gene [Danio
ALGLSASNPDNLPPRSCLAAGWASDLRQASGGSPSSITMASGGAAISAGPTPPSATTASSVEWHQRPPNPKNPVVFFDVTIGSIAAGRIKMELFADIAPKTAENFRQFCTGEHRKNALPQGYKGCQFHRVIKDFMIQGGDFLKNDGTGCTSIYGTKFDDENFIAKHTGPGLLSMANSGINSNGSQFFITCAKCDWLDNKHVVFGRVLGDGLLVVRKIENVATGANNKPKLACVISECGEM

SEQ ID NO: 9925 - protein, 202 aa, Zea mays subsp. mays
  peptide (1)..(202): Ceres Seq. ID no. 12415820
  misc_feature (36)..(202): Pfam Name: Cyclophilin type peptidyl-prolyl cis-trans isomerase Pfam Description: Cyclophilin type peptidyl-prolyl cis-trans
  misc_feature (1)..(202): Homolog of NCBI NO: 15224944 NR Description: putative peptidyl-prolyl cis-trans isomerase;
  misc_feature (16)..(202): Homolog of NCBI NO: 4454307 NR Description: cyclophilin [Pseudotsuga menziesii]
  misc_feature (28)..(202): Homolog of NCBI NO: 37595420 NR Description: peptidyl prolyl isomerase H [Danio rerio]
  misc_feature (27)..(202): Homolog of NCBI NO: 11602709 NR Description: putative U-snRNP-associated cyclophilin
  misc_feature (31)..(202): Homolog of NCBI NO: 5454154 NR Description: peptidyl prolyl isomerase H; cyclophilin H [Homo >gi|20830368|ref|XP_132057.1| similar to cyclophilin [Mus >gi|21312022|ref|NP_082953.1| RIKEN cDNA 1100001J08; DNA segment,
  misc_feature (31)..(202): Homolog of NCBI NO: 39849992 NR Description: Unknown (protein for MGC:76244) [Silurana
  misc_feature (31)..(202): Homolog of NCBI NO: 39597495 NR Description: Hypothetical protein CBG03161 [Caenorhabditis
  misc_feature (31)..(202): Homolog of NCBI NO: 17532643 NR Description: Peptidyl-prolyl cis-trans isomerase cyclophilin
  misc_feature (34)..(202): Homolog of NCBI NO: 24586038 NR Description: CG17266-PA [Drosophila melanogaster]
  misc_feature (28)..(182): Homolog of NCBI NO: 28278913 NR Description: Similar to RIKEN cDNA 1100001J08 gene [Danio
MASGGAAISAGPTPPSATTASSVEWHQRPPNPKNPVVFFDVTIGSIAAGRIKMELFADIAPKTAENFRQFCTGEHRKNALPQGYKGCQFHRVIKDFMIQGGDFLKNDGTGCTSIYGTKFDDENFIAKHTGPGLLSMANSGINSNGSQFFITCAKCDWLDNKHVVFGRVLGDGLLVVRKIENVATGANNKPKLACVISECGEM

SEQ ID NO: 9926 - protein, 150 aa, Zea mays subsp. mays; identical to SEQ ID NO: 1911
  peptide (1)..(150): Ceres Seq. ID no. 12415821
  misc_feature (1)..(150): Pfam Name: Cyclophilin type peptidyl-prolyl cis-trans isomerase Pfam Description: Cyclophilin type peptidyl-prolyl cis-trans
  misc_feature (1)..(150): Homolog of NCBI NO: 15224944 NR Description: putative peptidyl-prolyl cis-trans isomerase;
  misc_feature (1)..(150): Homolog of NCBI NO: 4454307 NR Description: cyclophilin [Pseudotsuga menziesii]
  misc_feature (1)..(150): Homolog of NCBI NO: 37595420 NR Description: peptidyl prolyl isomerase H [Danio rerio]
  misc_feature (1)..(150): Homolog of NCBI NO: 11602709 NR Description: putative U-snRNP-associated cyclophilin
  misc_feature (1)..(150): Homolog of NCBI NO: 5454154 NR Description: peptidyl prolyl isomerase H; cyclophilin H [Homo >gi|20830368|ref|XP_132057.1| similar to cyclophilin [Mus >gi|21312022|ref|NP_082953.1| RIKEN cDNA 1100001J08; DNA segment,
  misc_feature (1)..(150): Homolog of NCBI NO: 39849992 NR Description: Unknown (protein for MGC:76244) [Silurana
  misc_feature (1)..(150): Homolog of NCBI NO: 39597495 NR Description: Hypothetical protein CBG03161 [Caenorhabditis
  misc_feature (1)..(150): Homolog of NCBI NO: 17532643 NR Description: Peptidyl-prolyl cis-trans isomerase cyclophilin
  misc_feature (1)..(150): Homolog of NCBI NO: 24586038 NR Description: CG17266-PA [Drosophila melanogaster]
  misc_feature (1)..(130): Homolog of NCBI NO: 28278913 NR Description: Similar to RIKEN cDNA 1100001J08 gene [Danio

SEQ ID NO: 9927 - DNA, 1864 bp, Zea mays subsp. mays
  misc_feature (1)..(1864): Ceres Seq. ID no. 12336605
  misc_feature: MA Experiment ID: 108535 Result: Up-regulated in Transcription
  misc_feature: MA Experiment 108535 PARAMETER Experiment Name: Zm_Meristem_P Parameter: Age (day) Value: 8
  misc_feature: MA Experiment 108535 PARAMETER Experiment Name: Zm_Meristem_P Parameter: Organism Value: Zea mays
  misc_feature: MA Experiment 108535 PARAMETER Experiment Name: Zm_Meristem_P Parameter: Plant Line Value: 35A19
  misc_feature: MA Experiment 108535 PARAMETER Experiment Name: Zm_Meristem_P Parameter: Tissue Value: Root Meristem vs. Above Root Meristem
  misc_feature: MA Experiment ID: 20000487 Result: Up-regulated in Transcription
  misc_feature: MA Experiment 20000487 PARAMETER Experiment Name: Zm_50mM_NH4NO3_L_to_H_P Parameter: Organism Value: Zea mays
  misc_feature: MA Experiment 20000487 PARAMETER Experiment Name: Zm_50mM_NH4NO3_L_to_H_P Parameter: Timepoint (hr) Value: 4
  misc_feature: MA Experiment 20000487 PARAMETER Experiment Name: Zm_50mM_NH4NO3_L_to_H_P Parameter: Tissue Value: Leaves
  misc_feature: MA Experiment 20000487 PARAMETER Experiment Name: Zm_50mM_NH4NO3_L_to_H_P Parameter: Treatment Value: 50mM NH4NO3 vs. 100mM Mannitol
  misc_feature: MA Experiment ID: 20000492 Result: Up-regulated in Transcription
  misc_feature: MA Experiment 20000492 PARAMETER Experiment Name: Zm_Hybrid_Seed_Dev_P Parameter: DAP Value: 12
  misc_feature: MA Experiment 20000492 PARAMETER Experiment Name: Zm_Hybrid_Seed_Dev_P Parameter: Organism Value: Zea mays
  misc_feature: MA Experiment 20000492 PARAMETER Experiment Name: Zm_Hybrid_Seed_Dev_P Parameter: Plant Line Value: 35A19
  misc_feature: MA Experiment 20000492 PARAMETER Experiment Name: Zm_Hybrid_Seed_Dev_P Parameter: Tissue Value: Fert Kernel vs. Unfert Floret
gaaccctcgcgccgccgcctactccagcctccagcgtgatctgagtcctgaccaagccctaaacgccaccgccctcgcaaatctcctttcccttcgatccatggccgccgccgtcgccgcccccgcgccatcccgcaagacggagacctacaccgacaccaagcgccgcgacgacgtgcgcggcgccaacatcgccgctgcgcgcgccgtcgccgacgccgtgcgcacctcgctgggcccccgtggcatggataagatgatcgcttcgggcgaccaggctcaggaggtcatcatcaccaacgacggtgccaccatcctctcccgcatggcgctcctccagcccggccgcgcgcatgctcgccgagctatcccgctcccaggacgccgccgctggggacggcaccactaccgtcgtcgtcctcgctggatccctcctccgccgcgcccagtcgctcctctccgccggggctcaccccaccgccgctgccgacgccctccaccgtctcgccacgcgcgctgttgagatcctccacgccatggccatccccatcgagctatccgaccgggaatccctcgtcaagtctgcgtccacggctctcaactccaaggtcgtctcccagtactccacccttctctcgcccctcgccgtcgacgccgccctctctgtggtggaccccgctcaccctgaccttctcgacctccgggacatccgcatcgtgaagaagcttggtggcaccgtggacgatactgagctcatccctggcctcatctttgacaagaaggctagccatgctgctgggggcccaactcggatggagaatgctaagatcgctgtcatacagttccaaatctcaccacccaagactgacattgagcagagtgtcattgtatccgactacgcacagatggaccgcatcctacgtgaggagcgcaattatatccttgggatggtaaaaaagatcaaggcggctggatgcaatgtattgctcattcagaagagcatcttgcgtgatgcagtcactgacttgtctctgcactatcttgctaaggcaaagattctggtggtgaaggacgtggagagggatgagatggagttcatcaccaagaccctaaactgccttcccattgccaacattgagcacttccgcacggataagtttgggtatgcagatgttgttgaggaagtctctgttggagagggcaaggttgtgaagatcactggaatcaaggacatggttggaccgcaactgtacttgtcaggggatctaaccaattggttattgatgaagctgaacgcagtctccatgatgcactctgtgtcataaggtgcttggtcagcaagagatttttgattgctggtggtggtgctccagaaatagagatgtcaatgcagctggctgcttgggcaaaggagcttcgagggatggagagttactgcatcaaggagtttgctgaggcgcttgaggtcatcccttacacattggctgagaatgctgggctcaacccaatctccattgtcaccgaactcaggaatcgccatgccagaggtgagaagaacactggcatcaatgtgaggaaagggcagatcacaaacatcctggaggagaatgtcgtgcagccgttgctggtgagcacaagtgccattacgttagcctgcgagtgtgtcagaatgatcttgaagattgatgacattgtcactgttaggtaagagcgtgaagttggggtcatgtcagcctgctctgttctgtctggattgattattagttaggttactgcttaatgtaaaacttggttcatgggcgtgtttctacacttggttttgatgttagtactatccttgacatgaaactactaccagggttgc

SEQ ID NO: 9928 - protein, 323 aa, Zea mays subsp. mays
  peptide (1)..(323): Ceres Seq. ID no. 12336606
  misc_feature (1)..(294): Pfam Name: TCP-1/cpn60 chaperonin family Pfam Description: TCP-1/cpn60 chaperonin family
  misc_feature (1)..(294): Homolog of NCBI NO: 37536036 NR Description: putative cytosolic chaperonin, delta-subunit
MLAELSRSQDAAAGDGTTTVVVLAGSLLRRAQSLLSAGAHPTAAADALHRLATRAVEILHAMAIPIELSDRESLVKSASTALNSKVVSQYSTLLSPLAVDAALSVVDPAHPDLLDLRDIRIVKKLGGTVDDTELIPGLIFDKKASHAAGGPTRMENAKIAVIQFQISPPKTDIEQSVIVSDYAQMDRILREERNYILGMVKKIKAAGCNVLLIQKSILRDAVTDLSLHYLAKAKILVVKDVERDEMEFITKTLNCLPIANIEHFRTDKFGYADVVEEVSVGEGKVVKITGIKDMVGPQLYLSGDLTNWLLMKLNAVSMMHSVS

SEQ ID NO: 9929 - protein, 262 aa, Zea mays subsp. mays
  peptide (1)..(262): Ceres Seq. ID no. 12336607
  misc_feature (1)..(233): Pfam Name: TCP-1/cpn60 chaperonin family Pfam Description: TCP-1/cpn60 chaperonin family
  misc_feature (1)..(233): Homolog of NCBI NO: 37536036 NR Description: putative cytosolic chaperonin, delta-subunit
MAIPIELSDRESLVKSASTALNSKVVSQYSTLLSPLAVDAALSVVDPAHPDLLDLRDIRIVKKLGGTVDDTELIPGLIFDKKASHAAGGPTRMENAKIAVIQFQISPPKTDIEQSVIVSDYAQMDRILREERNYILGMVKKIKAAGCNVLLIQKSILRDAVTDLSLHYLAKAKILVVKDVERDEMEFITKTLNCLPIANIEHFRTDKFGYADVVEEVSVGEGKVVKITGIKDMVGPQLYLSGDLTNWLLMKLNAVSMMHSVS

SEQ ID NO: 9930 - protein, 173 aa, Zea mays subsp. mays
  peptide (1)..(173): Ceres Seq. ID no. 12336608
  misc_feature (34)..(114): Homolog of NCBI NO: 37536036 NR Description: putative cytosolic chaperonin, delta-subunit
NPRAAAYSSLQRDLSPDQALNATALANLLSLRSMAAAVAAPAPSRKTETYTDTKRRDDVRGANIAAARAVADAVRTSLGPRGMDKMIASGDQAQEVIITNDGATILSRMALLQPGRAHARRAIPLPGRRRWGRHHYRRRPRWIPPPPRPVAPLRRGSPHRRCRRPPPSRHARC

SEQ ID NO: 9931 - DNA, 1200 bp, Zea mays subsp. mays
  misc_feature (1)..(1200): Ceres Seq. ID no. 12387398
  misc_feature: MA Experiment ID: 108515 Result: Down-regulated in Transcription
  misc_feature: MA Experiment 108515 PARAMETER Experiment Name: Zm_2mM_SA_P Parameter: Age (day) Value: 8
  misc_feature: MA Experiment 108515 PARAMETER Experiment Name: Zm_2mM_SA_P Parameter: Organism Value: Zea mays
  misc_feature: MA Experiment 108515 PARAMETER Experiment Name: Zm_2mM_SA_P Parameter: Plant Line Value: 35A19
  misc_feature: MA Experiment 108515 PARAMETER Experiment Name: Zm_2mM_SA_P Parameter: Timepoint (hr) Value: 12
  misc_feature: MA Experiment 108515 PARAMETER Experiment Name: Zm_2mM_SA_P Parameter: Tissue Value: Aerial
  misc_feature: MA Experiment 108515 PARAMETER Experiment Name: Zm_2mM_SA_P Parameter: Treatment Value: 2mM SA vs. No Treatment
  misc_feature: MA Experiment ID: 108523 Result: Down-regulated in Transcription
  misc_feature: MA Experiment 108523 PARAMETER Experiment Name: Zm_42deg_Heat_P Parameter: Age (day) Value: 8
  misc_feature: MA Experiment 108523 PARAMETER Experiment Name: Zm_42deg_Heat_P Parameter: Organism Value: Zea mays
  misc_feature: MA Experiment 108523 PARAMETER Experiment Name: Zm_42deg_Heat_P Parameter: Plant Line Value: 35A19
  misc_feature: MA Experiment 108523 PARAMETER Experiment Name: Zm_42deg_Heat_P Parameter: Temperature (deg C) Value: 42 vs. 22
  misc_feature: MA Experiment 108523 PARAMETER Experiment Name: Zm_42deg_Heat_P Parameter: Timepoint (hr) Value: 6
  misc_feature: MA Experiment 108523 PARAMETER Experiment Name: Zm_42deg_Heat_P Parameter: Tissue Value: Aerial
  misc_feature: MA Experiment ID: 108527 Result: Down-regulated in Transcription
  misc_feature: MA Experiment 108527 PARAMETER Experiment Name: Zm_5mM_NO_P Parameter: Age (day) Value: 8
  misc_feature: MA Experiment 108527 PARAMETER Experiment Name: Zm_5mM_NO_P Parameter: Organism Value: Zea mays
  misc_feature: MA Experiment 108527 PARAMETER Experiment Name: Zm_5mM_NO_P Parameter: Plant Line Value: 35A19
  misc_feature: MA Experiment 108527 PARAMETER Experiment Name: Zm_5mM_NO_P Parameter: Timepoint (hr) Value: 6
  misc_feature: MA Experiment 108527 PARAMETER Experiment Name: Zm_5mM_NO_P Parameter: Tissue Value: Aerial
  misc_feature: MA Experiment 108527 PARAMETER Experiment Name: Zm_5mM_NO_P Parameter: Treatment Value: 5mM NO vs. No Treatment
  misc_feature: MA Experiment ID: 108529 Result: Up-regulated in Transcription
  misc_feature: MA Experiment 108529 PARAMETER Experiment Name: Zm_Imbibed_Seeds_P Parameter: Age (day) Value: 5 vs. 2
  misc_feature: MA Experiment 108529 PARAMETER Experiment Name: Zm_Imbibed_Seeds_P Parameter: Organism Value: Zea mays
  misc_feature: MA Experiment 108529 PARAMETER Experiment Name: Zm_Imbibed_Seeds_P Parameter: Plant Line Value: 35A19
  misc_feature: MA Experiment 108529 PARAMETER Experiment Name: Zm_Imbibed_Seeds_P Parameter: Tissue Value: Roots vs. Embryo
  misc_feature: MA Experiment ID: 108535 Result: Down-regulated in Transcription
  misc_feature: MA Experiment 108535 PARAMETER Experiment Name: Zm_Meristem_P Parameter: Age (day) Value: 8
  misc_feature: MA Experiment 108535 PARAMETER Experiment Name: Zm_Meristem_P Parameter: Organism Value: Zea mays
  misc_feature: MA Experiment 108535 PARAMETER Experiment Name: Zm_Meristem_P Parameter: Plant Line Value: 35A19
  misc_feature: MA Experiment 108535 PARAMETER Experiment Name: Zm_Meristem_P Parameter: Tissue Value: Root Meristem vs. Above Root Meristem
  misc_feature: MA Experiment ID: 108536 Result: Down-regulated in Transcription
  misc_feature: MA Experiment 108536 PARAMETER Experiment Name: Zm_Meristem_P Parameter: Age (day) Value: 8
  misc_feature: MA Experiment 108536 PARAMETER Experiment Name: Zm_Meristem_P Parameter: Organism Value: Zea mays
  misc_feature: MA Experiment 108536 PARAMETER Experiment Name: Zm_Meristem_P Parameter: Plant Line Value: 35A19
  misc_feature: MA Experiment 108536 PARAMETER Experiment Name: Zm_Meristem_P Parameter: Tissue Value: Shoot Meristem vs. Above Shoot Meristem
  misc_feature: MA Experiment ID: 108543 Result: Up-regulated in Transcription
  misc_feature: MA Experiment ID: 108546 Result: Up-regulated in Transcription
  misc_feature: MA Experiment 108546 PARAMETER Experiment Name: Zm_Imbibed_Seeds_P Parameter: Age (day) Value: 3 vs. 2
  misc_feature: MA Experiment 108546 PARAMETER Experiment Name: Zm_Imbibed_Seeds_P Parameter: Organism Value: Zea mays
  misc_feature: MA Experiment 108546 PARAMETER Experiment Name: Zm_Imbibed_Seeds_P Parameter: Plant Line Value: 35A19
  misc_feature: MA Experiment 108546 PARAMETER Experiment Name: Zm_Imbibed_Seeds_P Parameter: Tissue Value: Roots vs. Embryo
  misc_feature: MA Experiment ID: 108687 Result: Up-regulated in Transcription
  misc_feature: MA Experiment 108687 PARAMETER Experiment Name: Zm_Embryos-Flowers__P Parameter: Tissue Value: Embryo vs. Aerial+
  misc_feature: MA Experiment ID: 108688 Result: Down-regulated in Transcription
  misc_feature: MA Experiment 108688 PARAMETER Experiment Name: Zm_Embryos-Flowers__P Parameter: Tissue Value: Immature Flowers vs. Aerial+
  misc_feature: MA Experiment ID: 20000477 Result: Down-regulated in Transcription
  misc_feature: MA Experiment 20000477 PARAMETER Experiment Name: Zm_5mM_SA_P Parameter: Age (day) Value: 10
  misc_feature: MA Experiment 20000477 PARAMETER Experiment Name: Zm_5mM_SA_P Parameter: Organism Value: Zea mays
  misc_feature: MA Experiment 20000477 PARAMETER Experiment Name: Zm_5mM_SA_P Parameter: Plant Line Value: 35A19
  misc_feature: MA Experiment 20000477 PARAMETER Experiment Name: Zm_5mM_SA_P Parameter: Timepoint (hr) Value: 48
  misc_feature: MA Experiment 20000477 PARAMETER Experiment Name: Zm_5mM_SA_P Parameter: Tissue Value: Aerial
  misc_feature: MA Experiment 20000477 PARAMETER Experiment Name: Zm_5mM_SA_P Parameter: Treatment Value: 5mM SA vs. No Treatment
  misc_feature: MA Experiment ID: 20000478 Result: Down-regulated in Transcription
  misc_feature: MA Experiment 20000478 PARAMETER Experiment Name: Zm_5mM_SA_P Parameter: Age (day) Value: 11
  misc_feature: MA Experiment 20000478 PARAMETER Experiment Name: Zm_5mM_SA_P Parameter: Organism Value: Zea mays
  misc_feature: MA Experiment 20000478 PARAMETER Experiment Name: Zm_5mM_SA_P Parameter: Plant Line Value: 35A19
  misc_feature: MA Experiment 20000478 PARAMETER Experiment Name: Zm_5mM_SA_P Parameter: Timepoint (hr) Value: 72
  misc_feature: MA Experiment 20000478 PARAMETER Experiment Name: Zm_5mM_SA_P Parameter: Tissue Value: Aerial
  misc_feature: MA Experiment 20000478 PARAMETER Experiment Name: Zm_5mM_SA_P Parameter: Treatment Value: 5mM SA vs. No Treatment
  misc_feature: MA Experiment ID: 20000492 Result: Down-regulated in Transcription
  misc_feature: MA Experiment 20000492 PARAMETER Experiment Name: Zm_Hybrid_Seed_Dev_P Parameter: DAP Value: 12
  misc_feature: MA Experiment 20000492 PARAMETER Experiment Name: Zm_Hybrid_Seed_Dev_P Parameter: Organism Value: Zea mays
  misc_feature: MA Experiment 20000492 PARAMETER Experiment Name: Zm_Hybrid_Seed_Dev_P Parameter: Plant Line Value: 35A19
  misc_feature: MA Experiment 20000492 PARAMETER Experiment Name: Zm_Hybrid_Seed_Dev_P Parameter: Tissue Value: Fert Kernel vs. Unfert Floret
  misc_feature: MA Experiment ID: 20000534 Result: Up-regulated in Transcription
  misc_feature: MA Experiment 20000534 PARAMETER Experiment Name: Zm_Hybrid_Pollen_P Parameter: Age (day) Value: 8
  misc_feature: MA Experiment 20000534 PARAMETER Experiment Name: Zm_Hybrid_Pollen_P Parameter: Organism Value: Zea mays
  misc_feature: MA Experiment 20000534 PARAMETER Experiment Name: Zm_Hybrid_Pollen_P Parameter: Plant Line Value: 35A19
  misc_feature: MA Experiment 20000534 PARAMETER Experiment Name: Zm_Hybrid_Pollen_P Parameter: Tissue Value: Pollen vs. Aerial
  misc_feature: MA Experiment ID: 20000626 Result: Down-regulated in Transcription
  misc_feature: MA Experiment 20000626 PARAMETER Experiment Name: Zm_Herbicide-Treatments_P Parameter: Timepoint (hr) Value: 12
  misc_feature: MA Experiment 20000626 PARAMETER Experiment Name: Zm_Herbicide-Treatments_P Parameter: Tissue Value: Aerial
  misc_feature: MA Experiment 20000626 PARAMETER Experiment Name: Zm_Herbicide-Treatments_P Parameter: Treatment Value: Roundup vs. No Treatment
  misc_feature: MA Experiment ID: 20000630 Result: Down-regulated in Transcription
  misc_feature: MA Experiment 20000630 PARAMETER Experiment Name: Zm_Herbicide-Treatments_P Parameter: Timepoint (hr) Value: 4
  misc_feature: MA Experiment 20000630 PARAMETER Experiment Name: Zm_Herbicide-Treatments_P Parameter: Tissue Value: Aerial
  misc_feature: MA Experiment 20000630 PARAMETER Experiment Name: Zm_Herbicide-Treatments_P Parameter: Treatment Value: Roundup vs. No Treatment
acgaagcattcgcctcgccttgatctccaaccccttccttccttgcttaggagaaagagggaggagaggagaggaggaagaagatggagagggcggccccagtgaggagttcccacacctccacggccggcctactcgcgtggcctcaacccgatggcgccgcgtcgcaggcaccacgtcggcctaaccagccgacggaggaattcaggaaggtggtgttcggggggcaggtcaccgaggaggccgacggtctcaacaagacgaagatgaggacgacggcctccgcacccaagtcgaaggagacaacagggatcggcatgtttaaggccgagagcgctgccgccgccgtcacaactgcatcccgtgatcgccaggctagccagatcaccttttctcaggacgggaccattcctcccaggaagccaacttcagttgctggggtggcgaggcagcgcgaacttagccataccgttgagagttcgggggacggtaagatgaagcggcaggtgtccaatgcgaaatccaaggagctcagtggtcacaacatctttgctgatcatgaagatccgagtcccaacaggtcaagcagctctgctgctgctctggcacatgtgaaaaatgcaaatgtgagctccttctcctttggaaaggccgacatggacagcacagtgaaaacagcaaagaagaaagggtccagcaacaagtctactgatctgatgaatggcaaggccatctccgagagggattcagcgcctgcagggaaacagcctctgaaccgcgcgaagccgaaaggattgagtggtagtagcatttttgcagacgggaaggcctcaacaactggtgatcatgcaggccgtcggacccggcagccacctggcggcgatagcagcatcttgctgggctagcgtgcatatggatattgtcctatgccgccacacgggtggttggtccgtccgtgtgcggccatgttttcctgatcaggcgatgagtcccatctcagatgatctggttcacttctggcgtgtgtatgggtttgtgtctgtgttggttgtgacatgtccaatggaacaaccctatccctactgcgtgtggtgccgttttgttgtgtagtagtacaacggatgacatgtggtaccgtttcgttgtgtgtacgtggatatacatatgtgtgtttggttattaaatactccctccgttttt

SEQ ID NO: 9932 - protein, 273 aa, Zea mays subsp. mays
  peptide (1)..(273): Ceres Seq. ID no. 12387399
  misc_feature (25)..(272): Homolog of NCBI NO: 33146622 NR Description: hypothetical protein [Oryza sativa (japonica
  misc_feature (1)..(272): Homolog of NCBI NO: 30699309 NR Description: expressed protein [Arabidopsis thaliana] unknown protein [Arabidopsis thaliana]
  misc_feature (1)..(272): Homolog of NCBI NO: 25361078 NR Description: unknown protein T11I11.9 [imported] - Arabidopsis
  misc_feature (1)..(272): Homolog of NCBI NO: 30692553 NR Description: expressed protein [Arabidopsis thaliana] unknown protein [Arabidopsis thaliana]
  misc_feature (1)..(272): Homolog of NCBI NO: 15236057 NR Description: putative protein; protein id: At4g39860.1, by cDNA: 15747. [Arabidopsis thaliana] >gi|7487706|pir||T06092
  misc_feature (1)..(272): Homolog of NCBI NO: 21553689 NR Description: unknown [Arabidopsis thaliana]
  misc_feature (23)..(272): Homolog of NCBI NO: 18399883 NR Description: expressed protein; protein id: At1g35780.1, by cDNA: gi_16226791, supported by cDNA: gi_17380891 [Arabidopsis
  misc_feature (26)..(272): Homolog of NCBI NO: 38347099 NR Description: OSJNBa0006M15.14 [Oryza sativa (japonica
  misc_feature (97)..(272): Homolog of NCBI NO: 25361079 NR Description: hypothetical protein At2g22270 [imported] -
  misc_feature (97)..(272): Homolog of NCBI NO: 18399920 NR Description: expressed protein; protein id: At2g22270.1, by cDNA: 17172. [Arabidopsis thaliana]
MERAAPVRSSHTSTAGLLAWPQPDGAASQAPRRPNQPTEEFRKVVFGGQVTEEADGLNKTKMRTTASAPKSKETTGIGMFKAESAAAAVTTASRDRQASQITFSQDGTIPPRKPTSVAGVARQRELSHTVESSGDGKMKRQVSNAKSKELSGHNIFADHEDPSPNRSSSSAAALAHVKNANVSSFSFGKADMDSTVKTAKKKGSSNKSTDLMNGKAISERDSAPAGKQPLNRAKPKGLSGSSIFADGKASTTGDHAGRRTRQPPGGDSSILLG

SEQ ID NO: 9933 - protein, 212 aa, Zea mays subsp. mays
  peptide (1)..(212): Ceres Seq. ID no. 12387400
  misc_feature (1)..(211): Homolog of NCBI NO: 33146622 NR Description: hypothetical protein [Oryza sativa (japonica
  misc_feature (1)..(211): Homolog of NCBI NO: 30699309 NR Description: expressed protein [Arabidopsis thaliana] unknown protein [Arabidopsis thaliana]
  misc_feature (1)..(211): Homolog of NCBI NO: 25361078 NR Description: unknown protein T11I11.9 [imported] - Arabidopsis
  misc_feature (1)..(211): Homolog of NCBI NO: 30692553 NR Description: expressed protein [Arabidopsis thaliana] unknown protein [Arabidopsis thaliana]
  misc_feature (1)..(211): Homolog of NCBI NO: 15236057 NR Description: putative protein; protein id: At4g39860.1, by cDNA: 15747. [Arabidopsis thaliana] >gi|7487706|pir||T06092
  misc_feature (1)..(211): Homolog of NCBI NO: 21553689 NR Description: unknown [Arabidopsis thaliana]
  misc_feature (1)..(211): Homolog of NCBI NO: 18399883 NR Description: expressed protein; protein id: At1g35780.1, by cDNA: gi_16226791, supported by cDNA: gi_17380891 [Arabidopsis
  misc_feature (1)..(211): Homolog of NCBI NO: 38347099 NR Description: OSJNBa0006M15.14 [Oryza sativa (japonica
  misc_feature (36)..(211): Homolog of NCBI NO: 25361079 NR Description: hypothetical protein At2g22270 [imported] -
  misc_feature (36)..(211): Homolog of NCBI NO: 18399920 NR Description: expressed protein; protein id: At2g22270.1, by cDNA: 17172. [Arabidopsis thaliana]
MRTTASAPKSKETTGIGMFKAESAAAAVTTASRDRQASQITFSQDGTIPPRKPTSVAGVARQRELSHTVESSGDGKMKRQVSNAKSKELSGHNIFADHEDPSPNRSSSSAAALAHVKNANVSSFSFGKADMDSTVKTAKKKGSSNKSTDLMNGKAISERDSAPAGKQPLNRAKPKGLSGSSIFADGKASTTGDHAGRRTRQPPGGDSSILLG

SEQ ID NO: 9934 - protein, 195 aa, Zea mays subsp. mays
  peptide (1)..(195): Ceres Seq. ID no. 12387401
  misc_feature (1)..(194): Homolog of NCBI NO: 33146622 NR Description: hypothetical protein [Oryza sativa (japonica
  misc_feature (1)..(194): Homolog of NCBI NO: 30699309 NR Description: expressed protein [Arabidopsis thaliana] unknown protein [Arabidopsis thaliana]
  misc_feature (1)..(194): Homolog of NCBI NO: 25361078 NR Description: unknown protein T11I11.9 [imported] - Arabidopsis
  misc_feature (1)..(194): Homolog of NCBI NO: 30692553 NR Description: expressed protein [Arabidopsis thaliana] unknown protein [Arabidopsis thaliana]
  misc_feature (1)..(194): Homolog of NCBI NO: 15236057 NR Description: putative protein; protein id: At4g39860.1, by cDNA: 15747. [Arabidopsis thaliana] >gi|7487706|pir||T06092
  misc_feature (1)..(194): Homolog of NCBI NO: 21553689 NR Description: unknown [Arabidopsis thaliana]
  misc_feature (1)..(194): Homolog of NCBI NO: 18399883 NR Description: expressed protein; protein id: At1g35780.1, by cDNA: gi_16226791, supported by cDNA: gi_17380891 [Arabidopsis
  misc_feature (1)..(194): Homolog of NCBI NO: 38347099 NR Description: OSJNBa0006M15.14 [Oryza sativa (japonica
  misc_feature (19)..(194): Homolog of NCBI NO: 25361079 NR Description: hypothetical protein At2g22270 [imported] -
  misc_feature (19)..(194): Homolog of NCBI NO: 18399920 NR Description: expressed protein; protein id: At2g22270.1, by cDNA: 17172. [Arabidopsis thaliana]
MFKAESAAAAVTTASRDRQASQITFSQDGTIPPRKPTSVAGVARQRELSHTVESSGDGKMKRQVSNAKSKELSGHNIFADHEDPSPNRSSSSAAALAHVKNANVSSFSFGKADMDSTVKTAKKKGSSNKSTDLMNGKAISERDSAPAGKQPLNRAKPKGLSGSSIFADGKASTTGDHAGRRTRQPPGGDSSILLG

SEQ ID NO: 9935 - DNA, 708 bp, Zea mays subsp. mays
  misc_feature (1)..(708): Ceres Seq. ID no. 12355366
  misc_feature: MA Experiment ID: 108527 Result: Up-regulated in Transcription
  misc_feature: MA Experiment 108527 PARAMETER Experiment Name: Zm_5mM_NO_P Parameter: Age (day) Value: 8
  misc_feature: MA Experiment 108527 PARAMETER Experiment Name: Zm_5mM_NO_P Parameter: Organism Value: Zea mays
  misc_feature: MA Experiment 108527 PARAMETER Experiment Name: Zm_5mM_NO_P Parameter: Plant Line Value: 35A19
  misc_feature: MA Experiment 108527 PARAMETER Experiment Name: Zm_5mM_NO_P Parameter: Timepoint (hr) Value: 6
  misc_feature: MA Experiment 108527 PARAMETER Experiment Name: Zm_5mM_NO_P Parameter: Tissue Value: Aerial
  misc_feature: MA Experiment 108527 PARAMETER Experiment Name: Zm_5mM_NO_P Parameter: Treatment Value: 5mM NO vs. No Treatment
  misc_feature: MA Experiment ID: 108535 Result: Down-regulated in Transcription
  misc_feature: MA Experiment 108535 PARAMETER Experiment Name: Zm_Meristem_P Parameter: Age (day) Value: 8
  misc_feature: MA Experiment 108535 PARAMETER Experiment Name: Zm_Meristem_P Parameter: Organism Value: Zea mays
  misc_feature: MA Experiment 108535 PARAMETER Experiment Name: Zm_Meristem_P Parameter: Plant Line Value: 35A19
  misc_feature: MA Experiment 108535 PARAMETER Experiment Name: Zm_Meristem_P Parameter: Tissue Value: Root Meristem vs. Above Root Meristem
  misc_feature: MA Experiment ID: 108689 Result: Down-regulated in Transcription
  misc_feature: MA Experiment 108689 PARAMETER Experiment Name: Zm_Drought_Roots_P Parameter: Age (day) Value: 9
  misc_feature: MA Experiment 108689 PARAMETER Experiment Name: Zm_Drought_Roots_P Parameter: Organism Value: Zea mays
  misc_feature: MA Experiment 108689 PARAMETER Experiment Name: Zm_Drought_Roots_P Parameter: Plant Line Value: 35A19
  misc_feature: MA Experiment 108689 PARAMETER Experiment Name: Zm_Drought_Roots_P Parameter: Timepoint (hr) Value: 24
  misc_feature: MA Experiment 108689 PARAMETER Experiment Name: Zm_Drought_Roots_P Parameter: Tissue Value: Roots
  misc_feature: MA Experiment 108689 PARAMETER Experiment Name: Zm_Drought_Roots_P Parameter: Treatment Value: Drought vs. No Drought
  misc_feature: MA Experiment ID: 20000534 Result: Down-regulated in Transcription
  misc_feature: MA Experiment 20000534 PARAMETER Experiment Name: Zm_Hybrid_Pollen_P Parameter: Age (day) Value: 8
  misc_feature: MA Experiment 20000534 PARAMETER Experiment Name: Zm_Hybrid_Pollen_P Parameter: Organism Value: Zea mays
  misc_feature: MA Experiment 20000534 PARAMETER Experiment Name: Zm_Hybrid_Pollen_P Parameter: Plant Line Value: 35A19
  misc_feature: MA Experiment 20000534 PARAMETER Experiment Name: Zm_Hybrid_Pollen_P Parameter: Tissue Value: Pollen vs. Aerial
  misc_feature: MA Experiment ID: 20000535 Result: Up-regulated in Transcription
  misc_feature: MA Experiment 20000535 PARAMETER Experiment Name: Zm_Hybrid_Seed_Dev_P Parameter: DAP Value: 30 vs. 12
  misc_feature: MA Experiment 20000535 PARAMETER Experiment Name: Zm_Hybrid_Seed_Dev_P Parameter: Organism Value: Zea mays
  misc_feature: MA Experiment 20000535 PARAMETER Experiment Name: Zm_Hybrid_Seed_Dev_P Parameter: Plant Line Value: 35A19
  misc_feature: MA Experiment 20000535 PARAMETER Experiment Name: Zm_Hybrid_Seed_Dev_P Parameter: Tissue Value: Embryo vs. Unfert Floret
catggaaggaattgcacaggcgttgctagcattggataggattgaacatgatgttgaattgacttatgagcaactgcttctgctagaaactaatctgctcttaagtggccttgatttgcacgatcaacatgaagatatgagattggatatcgacaatatgtcttatgaggaactgcttgctttggaagagcatattggctcagtgactactgcccttactgaagagcaatttaccaagtgtgtaaaccaaagtgtgtatgaagcaagaaattcttatagagatgtaagcaagatcgcagcagatgatgtgaaatgtagcgtatgtcaggaggaatacgttgatggtgaagagattggtacaatgcaatgtgaacatcagtaccatgtgcgctgcattcacgaatggcttaagcagaagaattggtgtccaatatgcaaagcttcaggctataccttcagagatgaccaagggagacgcatgaatcttggcccaaacttgtaaatagcgtggatttattattagacattgtagatgctgacgcagttcaccccaatatgtggatacgatagtctctcccgaacggtcgaacgcctggaaccttttgttactgcatcttttatcttcttagcacacccttgctgcttgacagcagtacgggtcagaaactcgaaaataaccgtggttctcaagaaatttttccagattcc

SEQ ID NO: 9936 - protein, 166 aa, Zea mays subsp. mays
  peptide (1)..(166): Ceres Seq. ID no. 12355367
  misc_feature (105)..(145): Pfam Name: Zinc finger, C3HC4 type (RING finger) Pfam Description: Zinc finger, C3HC4 type (RING finger)
  misc_feature (1)..(148): Homolog of NCBI NO: 30689641 NR Description: RING finger-related protein [Arabidopsis thaliana]
  misc_feature (1)..(151): Homolog of NCBI NO: 7486381 NR Description: hypothetical protein F3L17.20 - Arabidopsis >gi|5262756|emb|CAB45904.1| putative protein [Arabidopsis >gi|7270048|emb|CAB79863.1| putative protein [Arabidopsis
  misc_feature (1)..(151): Homolog of NCBI NO: 18417809 NR Description: putative protein; protein id: At4g31450.1, by cDNA: gi_15983461 [Arabidopsis thaliana] AT4g31450/F3L17_20 [Arabidopsis thaliana]
  misc_feature (1)..(148): Homolog of NCBI NO: 10129643 NR Description: Pspzf zinc finger protein-like [Arabidopsis
  misc_feature (1)..(148): Homolog of NCBI NO: 22326712 NR Description: Pspzf zinc finger protein - like; protein id:
  misc_feature (1)..(148): Homolog of NCBI NO: 20466428 NR Description: Pspzf zinc finger protein-like [Arabidopsis
  misc_feature (4)..(149): Homolog of NCBI NO: 11358785 NR Description: RING-H2 finger protein RHG1a [imported] -
  misc_feature (4)..(149): Homolog of NCBI NO: 15239131 NR Description: putative protein; protein id: At5g42940.1, by cDNA: gi_18087615 [Arabidopsis thaliana] contains similarity to RING zinc finger protein~gene_id:MBD2.14
  misc_feature (31)..(146): Homolog of NCBI NO: 38345496 NR Description: OSJNBa0010D21.9 [Oryza sativa (japonica
  misc_feature (3)..(149): Homolog of NCBI NO: 15220067 NR Description: hypothetical protein; protein id: At1g45180.1 thaliana] >gi|7767667|gb|AAF69164.1|AC007915_16 F27F5.26
MEGIAQALLALDRIEHDVELTYEQLLLLETNLLLSGLDLHDQHEDMRLDIDNMSYEELLALEEHIGSVTTALTEEQFTKCVNQSVYEARNSYRDVSKIAADDVKCSVCQEEYVDGEEIGTMQCEHQYHVRCIHEWLKQKNWCPICKASGYTFRDDQGRRMNLGPNL

SEQ ID NO: 9937 - protein, 121 aa, Zea mays subsp. mays
  peptide (1)..(121): Ceres Seq. ID no. 12355368
  misc_feature (60)..(100): Pfam Name: Zinc finger, C3HC4 type (RING finger) Pfam Description: Zinc finger, C3HC4 type (RING finger)
  misc_feature (1)..(103): Homolog of NCBI NO: 30689641 NR Description: RING finger-related protein [Arabidopsis thaliana]
  misc_feature (1)..(106): Homolog of NCBI NO: 7486381 NR Description: hypothetical protein F3L17.20 - Arabidopsis >gi|5262756|emb|CAB45904.1| putative protein [Arabidopsis >gi|7270048|emb|CAB79863.1| putative protein [Arabidopsis
  misc_feature (1)..(106): Homolog of NCBI NO: 18417809 NR Description: putative protein; protein id: At4g31450.1, by cDNA: gi_15983461 [Arabidopsis thaliana] AT4g31450/F3L17_20 [Arabidopsis thaliana]
  misc_feature (1)..(103): Homolog of NCBI NO: 10129643 NR Description: Pspzf zinc finger protein-like [Arabidopsis
  misc_feature (1)..(103): Homolog of NCBI NO: 22326712 NR Description: Pspzf zinc finger protein - like; protein id:
  misc_feature (1)..(103): Homolog of NCBI NO: 20466428 NR Description: Pspzf zinc finger protein-like [Arabidopsis
  misc_feature (1)..(104): Homolog of NCBI NO: 11358785 NR Description: RING-H2 finger protein RHG1a [imported] -
  misc_feature (1)..(104): Homolog of NCBI NO: 15239131 NR Description: putative protein; protein id: At5g42940.1, by cDNA: gi_18087615 [Arabidopsis thaliana] contains similarity to RING zinc finger protein~gene_id:MBD2.14
  misc_feature (1)..(101): Homolog of NCBI NO: 38345496 NR Description: OSJNBa0010D21.9 [Oryza sativa (japonica
  misc_feature (1)..(104): Homolog of NCBI NO: 15220067 NR Description: hypothetical protein; protein id: At1g45180.1 thaliana] >gi|7767667|gb|AAF69164.1|AC007915_16 F27F5.26
MRLDIDNMSYEELLALEEHIGSVTTALTEEQFTKCVNQSVYEARNSYRDVSKIAADDVKCSVCQEEYVDGEEIGTMQCEHQYHVRCIHEWLKQKNWCPICKASGYTFRDDQGRRMNLGPNL

SEQ ID NO: 9938 - protein, 114 aa, Zea mays subsp. mays
  peptide (1)..(114): Ceres Seq. ID no. 12355369
  misc_feature (53)..(93): Pfam Name: Zinc finger, C3HC4 type (RING finger) Pfam Description: Zinc finger, C3HC4 type (RING finger)
  misc_feature (1)..(97): Homolog of NCBI NO: 11358785 NR Description: RING-H2 finger protein RHG1a [imported] -
  misc_feature (1)..(97): Homolog of NCBI NO: 15239131 NR Description: putative protein; protein id: At5g42940.1, by cDNA: gi_18087615 [Arabidopsis thaliana] contains similarity to RING zinc finger protein~gene_id:MBD2.14
  misc_feature (1)..(96): Homolog of NCBI NO: 30689641 NR Description: RING finger-related protein [Arabidopsis thaliana]
  misc_feature (1)..(99): Homolog of NCBI NO: 18417809 NR Description: putative protein; protein id: At4g31450.1, by cDNA: gi_15983461 [Arabidopsis thaliana] AT4g31450/F3L17_20 [Arabidopsis thaliana]
  misc_feature (1)..(96): Homolog of NCBI NO: 22326712 NR Description: Pspzf zinc finger protein - like; protein id:
  misc_feature (1)..(96): Homolog of NCBI NO: 20466428 NR Description: Pspzf zinc finger protein-like [Arabidopsis
  misc_feature (1)..(96): Homolog of NCBI NO: 10129643 NR Description: Pspzf zinc finger protein-like [Arabidopsis
  misc_feature (1)..(99): Homolog of NCBI NO: 7486381 NR Description: hypothetical protein F3L17.20 - Arabidopsis >gi|5262756|emb|CAB45904.1| putative protein [Arabidopsis >gi|7270048|emb|CAB79863.1| putative protein [Arabidopsis
  misc_feature (1)..(94): Homolog of NCBI NO: 38345496 NR Description: OSJNBa0010D21.9 [Oryza sativa (japonica
  misc_feature (1)..(97): Homolog of NCBI NO: 15220067 NR Description: hypothetical protein; protein id: At1g45180.1 thaliana] >gi|7767667|gb|AAF69164.1|AC007915_16 F27F5.26
MSYEELLALEEHIGSVTTALTEEQFTKCVNQSVYEARNSYRDVSKIAADDVKCSVCQEEYVDGEEIGTMQCEHQYHVRCIHEWLKQKNWCPICKASGYTFRDDQGRRMNLGPNL

SEQ ID NO: 9939 - DNA, 1081 bp, Zea mays subsp. mays
  misc_feature (1)..(1081): Ceres Seq. ID no. 12415038
  misc_feature: MA Experiment ID: 108535 Result: Down-regulated in Transcription
  misc_feature: MA Experiment 108535 PARAMETER Experiment Name: Zm_Meristem_P Parameter: Age (day) Value: 8
  misc_feature: MA Experiment 108535 PARAMETER Experiment Name: Zm_Meristem_P Parameter: Organism Value: Zea mays
  misc_feature: MA Experiment 108535 PARAMETER Experiment Name: Zm_Meristem_P Parameter: Plant Line Value: 35A19
  misc_feature: MA Experiment 108535 PARAMETER Experiment Name: Zm_Meristem_P Parameter: Tissue Value: Root Meristem vs. Above Root Meristem
ccaattcaaacagtgaggcggaggcagaggcagacaacgccgccatgaacgccttcttcacgtccctggcgcgcgggctggacgacctgggccgtgcaggcgggctgtcgtcgctgccggctctgctgcgggcggcggcgcttctcagggggctgcactcgcagctcacgctcatggtcggccagctccacctgccgccgggcggccgctggctcgacgagtacatggacgagaccgcccgcctctgggacgcctgcctcgccgtcaaactcggccctcgcctccgtcgagcggtattgcgccgcggccctcctgcgccgccgcggcgctggatgactggctccaggatccctcccctctctccagtcgccaggtgatgcgggcgatctccgtgtcgaggagggaggccatggccgcggaggaggagaaccgcgcgctggcggacgcgaggatcgcgccgctctcgctgcagctggacgagcggcttctgctgcgcgcgacggacgcgaggcttacggttacgggcttcaacggcttccgggggctgctgcacgcgctccacaacgcgagctcgctcctcctgctcatcctcgccagcggcgccgtctcgtgcgccgccgcggccggcggcccgtgcggcgcggacgacgccggggccggcttcgtggcgtccatcgtgatgctgcagcagcggatggcggaggaggccgctgacgctgagtccgacgggcctggcgcgcccgggatcgggatgtgcgagttccggtgcgcgcgcgccgccgtggaggcggcgcgggaggaggtggagcgcgccgccgcggcggcggggcgcaagtgcgagggcggcggtgtcgtgaaggacaaggtggaggagctcaaggcgtggctgcatgtgctccggaccggcaccgatagcctggtgtgccagctggacgacttcntggacgacattgtagagggaaggaaggagctctccgacctgtgcagccattgatgtatcgatcacgcctcctgccctgcgcccctgcccccgatcgagcctcggagctccagtgccaggataaagattaccatcgtcatc

SEQ ID NO: 9940 - protein, 205 aa, Zea mays subsp. mays
  peptide (1)..(205): Ceres Seq. ID no. 12415039
  misc_feature (1)..(205): Homolog of NCBI NO: 34907302 NR Description: hypothetical protein~similar to Arabidopsis
  misc_feature (1)..(205): Homolog of NCBI NO: 21593454 NR Description: unknown [Arabidopsis thaliana]
  misc_feature (1)..(205): Homolog of NCBI NO: 18395063 NR Description: expressed protein; protein id: At1g22030.1, by cDNA: 39052. [Arabidopsis thaliana] >gi|25402951|pir||C86353
  misc_feature (1)..(205): Homolog of NCBI NO: 22330710 NR Description: hypothetical protein; protein id: At1g77855.1
  misc_feature (1)..(205): Homolog of NCBI NO: 6573780 NR Description: F28K19.7 [Arabidopsis thaliana]
  misc_feature (189)..(189): Xaa is any aa, unknown or other
MRAISVSRREAMAAEEENRALADARIAPLSLQLDERLLLRATDARLTVTGFNGFRGLLHALHNASSLLLLILASGAVSCAAAAGGPCGADDAGAGFVASIVMLQQRMAEEAADAESDGPGAPGIGMCEFRCARAAVEAAREEVERAAAAAGRKCEGGGVVKDKVEELKAWLHVLRTGTDSLVCQLDDFXDDIVEGRKELSDLCSH

SEQ ID NO: 9941 - protein, 194 aa, Zea mays subsp. mays
  peptide (1)..(194): Ceres Seq. ID no. 12415040
  misc_feature (1)..(194): Homolog of NCBI NO: 34907302 NR Description: hypothetical protein~similar to Arabidopsis
  misc_feature (1)..(194): Homolog of NCBI NO: 21593454 NR Description: unknown [Arabidopsis thaliana]
  misc_feature (1)..(194): Homolog of NCBI NO: 18395063 NR Description: expressed protein; protein id: At1g22030.1, by cDNA: 39052. [Arabidopsis thaliana] >gi|25402951|pir||C86353
  misc_feature (1)..(194): Homolog of NCBI NO: 22330710 NR Description: hypothetical protein; protein id: At1g77855.1
  misc_feature (1)..(194): Homolog of NCBI NO: 6573780 NR Description: F28K19.7 [Arabidopsis thaliana]
  misc_feature (178)..(178): Xaa is any aa, unknown or other
MAAEEENRALADARIAPLSLQLDERLLLRATDARLTVTGFNGFRGLLHALHNASSLLLLILASGAVSCAAAAGGPCGADDAGAGFVASIVMLQQRMAEEAADAESDGPGAPGIGMCEFRCARAAVEAAREEVERAAAAAGRKCEGGGVVKDKVEELKAWLHVLRTGTDSLVCQLDDFXDDIVEGRKELSDLCSH

SEQ ID NO: 9942 - protein, 124 aa, Zea mays subsp. mays
  peptide (1)..(124): Ceres Seq. ID no. 12415041
  misc_feature (15)..(91): Homolog of NCBI NO: 34907302 NR Description: hypothetical protein~similar to Arabidopsis
  misc_feature (14)..(89): Homolog of NCBI NO: 21593454 NR Description: unknown [Arabidopsis thaliana]
  misc_feature (14)..(89): Homolog of NCBI NO: 18395063 NR Description: expressed protein; protein id: At1g22030.1, by cDNA: 39052. [Arabidopsis thaliana] >gi|25402951|pir||C86353
  misc_feature (14)..(89): Homolog of NCBI NO: 22330710 NR Description: hypothetical protein; protein id: At1g77855.1
  misc_feature (14)..(89): Homolog of NCBI NO: 6573780 NR Description: F28K19.7 [Arabidopsis thaliana]
NSNSEAEAEADNAAMNAFFTSLARGLDDLGRAGGLSSLPALLRAAALLRGLHSQLTLMVGQLHLPPGGRWLDEYMDETARLWDACLAVKLGPRLRRAVLRRGPPAPPRRWMTGSRIPPLSPVAR

SEQ ID NO: 9943 - DNA, 1594 bp, Zea mays subsp. mays; identical to SEQ ID NO: 2660
  misc_feature (1)..(1594): Ceres Seq. ID no. 12387222
  misc_feature: MA Experiment ID: 108528 Result: Down-regulated in Transcription
  misc_feature: MA Experiment 108528 PARAMETER Experiment Name: Zm_Imbibed_Seeds_P Parameter: Age (day) Value: 5 vs. 2
  misc_feature: MA Experiment 108528 PARAMETER Experiment Name: Zm_Imbibed_Seeds_P Parameter: Organism Value: Zea mays
  misc_feature: MA Experiment 108528 PARAMETER Experiment Name: Zm_Imbibed_Seeds_P Parameter: Plant Line Value: 35A19
  misc_feature: MA Experiment 108528 PARAMETER Experiment Name: Zm_Imbibed_Seeds_P Parameter: Tissue Value: Aerial vs. Embryo
  misc_feature: MA Experiment ID: 108530 Result: Down-regulated in Transcription
  misc_feature: MA Experiment 108530 PARAMETER Experiment Name: Zm_Imbibed_Seeds_P Parameter: Age (day) Value: 6 vs. 2
  misc_feature: MA Experiment 108530 PARAMETER Experiment Name: Zm_Imbibed_Seeds_P Parameter: Organism Value: Zea mays
  misc_feature: MA Experiment 108530 PARAMETER Experiment Name: Zm_Imbibed_Seeds_P Parameter: Plant Line Value: 35A19
  misc_feature: MA Experiment 108530 PARAMETER Experiment Name: Zm_Imbibed_Seeds_P Parameter: Tissue Value: Aerial vs. Embryo
  misc_feature: MA Experiment ID: 108535 Result: Up-regulated in Transcription
  misc_feature: MA Experiment 108535 PARAMETER Experiment Name: Zm_Meristem_P Parameter: Age (day) Value: 8
  misc_feature: MA Experiment 108535 PARAMETER Experiment Name: Zm_Meristem_P Parameter: Organism Value: Zea mays
  misc_feature: MA Experiment 108535 PARAMETER Experiment Name: Zm_Meristem_P Parameter: Plant Line Value: 35A19
  misc_feature: MA Experiment 108535 PARAMETER Experiment Name: Zm_Meristem_P Parameter: Tissue Value: Root Meristem vs. Above Root Meristem
  misc_feature: MA Experiment ID: 108543 Result: Up-regulated in Transcription
  misc_feature: MA Experiment ID: 108544 Result: Down-regulated in Transcription
  misc_feature: MA Experiment ID: 108688 Result: Down-regulated in Transcription
  misc_feature: MA Experiment 108688 PARAMETER Experiment Name: Zm_Embryos-Flowers__P Parameter: Tissue Value: Immature Flowers vs. Aerial+
  misc_feature: MA Experiment ID: 20000108 Result: Up-regulated in Transcription
  misc_feature: MA Experiment 20000108 PARAMETER Experiment Name: Zm_Root-Tips_P Parameter: Age (day) Value: 12
  misc_feature: MA Experiment 20000108 PARAMETER Experiment Name: Zm_Root-Tips_P Parameter: Organism Value: Zea mays
  misc_feature: MA Experiment 20000108 PARAMETER Experiment Name: Zm_Root-Tips_P Parameter: Tissue Value: Root tips vs. Root mid region    35
  misc_feature: MA Experiment 20000108 PARAMETER Experiment Name: Zm_Root-Tips_P Parameter: Tissue Value: Root tips vs. Root mid region   Sequence Listing-Misc Features (4)
  misc_feature: MA Experiment ID: 20000487 Result: Down-regulated in Transcription
  misc_feature: MA Experiment 20000487 PARAMETER Experiment Name: Zm_50mM_NH4NO3_L_to_H_P Parameter: Organism Value: Zea mays
  misc_feature: MA Experiment 20000487 PARAMETER Experiment Name: Zm_50mM_NH4NO3_L_to_H_P Parameter: Timepoint (hr) Value: 4
  misc_feature: MA Experiment 20000487 PARAMETER Experiment Name: Zm_50mM_NH4NO3_L_to_H_P Parameter: Tissue Value: Leaves
  misc_feature: MA Experiment 20000487 PARAMETER Experiment Name: Zm_50mM_NH4NO3_L_to_H_P Parameter: Treatment Value: 50mM NH4NO3 vs. 100mM Mannitol
  misc_feature: MA Experiment ID: 20000535 Result: Up-regulated in Transcription
  misc_feature: MA Experiment 20000535 PARAMETER Experiment Name: Zm_Hybrid_Seed_Dev_P Parameter: DAP Value: 30 vs. 12
  misc_feature: MA Experiment 20000535 PARAMETER Experiment Name: Zm_Hybrid_Seed_Dev_P Parameter: Organism Value: Zea mays
  misc_feature: MA Experiment 20000535 PARAMETER Experiment Name: Zm_Hybrid_Seed_Dev_P Parameter: Plant Line Value: 35A19
  misc_feature: MA Experiment 20000535 PARAMETER Experiment Name: Zm_Hybrid_Seed_Dev_P Parameter: Tissue Value: Embryo vs. Unfert Floret
  misc_feature: MA Experiment ID: 20000626 Result: Up-regulated in Transcription
  misc_feature: MA Experiment 20000626 PARAMETER Experiment Name: Zm_Herbicide-Treatments_P Parameter: Timepoint (hr) Value: 12
  misc_feature: MA Experiment 20000626 PARAMETER Experiment Name: Zm_Herbicide-Treatments_P Parameter: Tissue Value: Aerial
  misc_feature: MA Experiment 20000626 PARAMETER Experiment Name: Zm_Herbicide-Treatments_P Parameter: Treatment Value: Roundup vs. No Treatment
  misc_feature: MA Experiment ID: 20000632 Result: Down-regulated in Transcription
  misc_feature: MA Experiment 20000632 PARAMETER Experiment Name: Zm_Herbicide-Treatments_P Parameter: Timepoint (hr) Value: 4
  misc_feature: MA Experiment 20000632 PARAMETER Experiment Name: Zm_Herbicide-Treatments_P Parameter: Tissue Value: Aerial
  misc_feature: MA Experiment 20000632 PARAMETER Experiment Name: Zm_Herbicide-Treatments_P Parameter: Treatment Value: Glean vs. No Treatment

SEQ ID NO: 9944 - protein, 454 aa, Zea mays subsp. mays; identical to SEQ ID NO: 2661
  peptide (1)..(454): Ceres Seq. ID no. 12387223
  misc_feature (146)..(417): Pfam Name: Polyprenyl synthetase Pfam Description: Polyprenyl synthetase
  misc_feature (146)..(417): Pfam Name: Polyprenyl synthetase Pfam Description: Polyprenyl synthetase
  misc_feature (105)..(454): Homolog of NCBI NO: 1346033 NR Description: Farnesyl pyrophosphate synthetase (FPP (FPS) (Farnesyl diphosphate synthetase) [Includes:
  misc_feature (104)..(454): Homolog of NCBI NO: 34911542 NR Description: putative farnesyl-pyrophosphate synthetase [Oryza
  misc_feature (158)..(454): Homolog of NCBI NO: 25458583 NR Description: probable farnesyl pyrophosphate synthase - rice >gi|4680193|gb|AAD27558.1|AF111710_4 putative farnesyl
  misc_feature (21)..(151): Homolog of NCBI NO: 25458583 NR Description: probable farnesyl pyrophosphate synthase - rice >gi|4680193|gb|AAD27558.1|AF111710_4 putative farnesyl
  misc_feature (106)..(454): Homolog of NCBI NO: 18958450 NR Description: farnesyl pyrophosphare synthase [Musa acuminata]
  misc_feature (104)..(454): Homolog of NCBI NO: 34911542 NR Description: putative farnesyl-pyrophosphate synthetase [Oryza
  misc_feature (21)..(151): Homolog of NCBI NO: 25458583 NR Description: probable farnesyl pyrophosphate synthase - rice >gi|4680193|gb|AAD27558.1|AF111710_4 putative farnesyl
  misc_feature (115)..(454): Homolog of NCBI NO: 25452945 NR Description: Farnesyl pyrophosphate synthetase 1 (FPP
  misc_feature (117)..(454): Homolog of NCBI NO: 13537421 NR Description: farnesyl pyrophosphate synthase [Humulus lupulus]
  misc_feature (115)..(454): Homolog of NCBI NO: 1346029 NR Description: Farnesyl pyrophosphate synthetase 2 (FPP
  misc_feature (115)..(454): Homolog of NCBI NO: 7433992 NR Description: farnesyl-pyrophosphate synthetase - Para rubber >gi|22676905|gb|AAM98379.1| farnesyl diphosphate synthase [Hevea
  misc_feature (115)..(454): Homolog of NCBI NO: 1346028 NR Description: Farnesyl pyrophosphate synthetase 1 (FPP
  misc_feature (106)..(454): Homolog of NCBI NO: 18958450 NR Description: farnesyl pyrophosphare synthase [Musa acuminata]
  misc_feature (158)..(454): Homolog of NCBI NO: 25458583 NR Description: probable farnesyl pyrophosphate synthase - rice >gi|4680193|gb|AAD27558.1|AF111710_4 putative farnesyl
  misc_feature (105)..(454): Homolog of NCBI NO: 1346033 NR Description: Farnesyl pyrophosphate synthetase (FPP (FPS) (Farnesyl diphosphate synthetase) [Includes:
  misc_feature (115)..(454): Homolog of NCBI NO: 1346028 NR Description: Farnesyl pyrophosphate synthetase 1 (FPP
  misc_feature (115)..(454): Homolog of NCBI NO: 7433992 NR Description: farnesyl-pyrophosphate synthetase - Para rubber >gi|22676905|gb|AAM98379.1| farnesyl diphosphate synthase [Hevea
  misc_feature (115)..(454): Homolog of NCBI NO: 1346029 NR Description: Farnesyl pyrophosphate synthetase 2 (FPP
  misc_feature (117)..(454): Homolog of NCBI NO: 13537421 NR Description: farnesyl pyrophosphate synthase [Humulus lupulus]
  misc_feature (115)..(454): Homolog of NCBI NO: 25452945 NR Description: Farnesyl pyrophosphate synthetase 1 (FPP

SEQ ID NO: 9945 - protein, 350 aa, Zea mays subsp. mays; identical to SEQ ID NO: 2662
  peptide (1)..(350): Ceres Seq. ID no. 12387224
  misc_feature (42)..(313): Pfam Name: Polyprenyl synthetase Pfam Description: Polyprenyl synthetase
  misc_feature (42)..(313): Pfam Name: Polyprenyl synthetase Pfam Description: Polyprenyl synthetase
  misc_feature (1)..(350): Homolog of NCBI NO: 1346033 NR Description: Farnesyl pyrophosphate synthetase (FPP (FPS) (Farnesyl diphosphate synthetase) [Includes:
  misc_feature (1)..(350): Homolog of NCBI NO: 34911542 NR Description: putative farnesyl-pyrophosphate synthetase [Oryza
  misc_feature (54)..(350): Homolog of NCBI NO: 25458583 NR Description: probable farnesyl pyrophosphate synthase - rice >gi|4680193|gb|AAD27558.1|AF111710_4 putative farnesyl
  misc_feature (1)..(47): Homolog of NCBI NO: 25458583 NR Description: probable farnesyl pyrophosphate synthase - rice >gi|4680193|gb|AAD27558.1|AF111710_4 putative farnesyl
  misc_feature (2)..(350): Homolog of NCBI NO: 18958450 NR Description: farnesyl pyrophosphare synthase [Musa acuminata]
  misc_feature (1)..(350): Homolog of NCBI NO: 34911542 NR Description: putative farnesyl-pyrophosphate synthetase [Oryza
  misc_feature (1)..(47): Homolog of NCBI NO: 25458583 NR Description: probable farnesyl pyrophosphate synthase - rice >gi|4680193|gb|AAD27558.1|AF111710_4 putative farnesyl
  misc_feature (11)..(350): Homolog of NCBI NO: 25452945 NR Description: Farnesyl pyrophosphate synthetase 1 (FPP
  misc_feature (13)..(350): Homolog of NCBI NO: 13537421 NR Description: farnesyl pyrophosphate synthase [Humulus lupulus]
  misc_feature (11)..(350): Homolog of NCBI NO: 1346029 NR Description: Farnesyl pyrophosphate synthetase 2 (FPP
  misc_feature (11)..(350): Homolog of NCBI NO: 7433992 NR Description: farnesyl-pyrophosphate synthetase - Para rubber >gi|22676905|gb|AAM98379.1| farnesyl diphosphate synthase [Hevea
  misc_feature (11)..(350): Homolog of NCBI NO: 1346028 NR Description: Farnesyl pyrophosphate synthetase 1 (FPP
  misc_feature (2)..(350): Homolog of NCBI NO: 18958450 NR Description: farnesyl pyrophosphare synthase [Musa acuminata]
  misc_feature (54)..(350): Homolog of NCBI NO: 25458583 NR Description: probable farnesyl pyrophosphate synthase - rice >gi|4680193|gb|AAD27558.1|AF111710_4 putative farnesyl
  misc_feature (1)..(350): Homolog of NCBI NO: 1346033 NR Description: Farnesyl pyrophosphate synthetase (FPP (FPS) (Farnesyl diphosphate synthetase) [Includes:
  misc_feature (11)..(350): Homolog of NCBI NO: 1346028 NR Description: Farnesyl pyrophosphate synthetase 1 (FPP
  misc_feature (11)..(350): Homolog of NCBI NO: 7433992 NR Description: farnesyl-pyrophosphate synthetase - Para rubber >gi|22676905|gb|AAM98379.1| farnesyl diphosphate synthase [Hevea
  misc_feature (11)..(350): Homolog of NCBI NO: 1346029 NR Description: Farnesyl pyrophosphate synthetase 2 (FPP
  misc_feature (13)..(350): Homolog of NCBI NO: 13537421 NR Description: farnesyl pyrophosphate synthase [Humulus lupulus]
  misc_feature (11)..(350): Homolog of NCBI NO: 25452945 NR Description: Farnesyl pyrophosphate synthetase 1 (FPP

SEQ ID NO: 9946 - protein, 305 aa, Zea mays subsp. mays; identical to SEQ ID NO: 2663
  peptide (1)..(305): Ceres Seq. ID no. 12387225
  misc_feature (1)..(268): Pfam Name: Polyprenyl synthetase Pfam Description: Polyprenyl synthetase
  misc_feature (1)..(268): Pfam Name: Polyprenyl synthetase Pfam Description: Polyprenyl synthetase
  misc_feature (1)..(305): Homolog of NCBI NO: 1346033 NR Description: Farnesyl pyrophosphate synthetase (FPP (FPS) (Farnesyl diphosphate synthetase) [Includes:
  misc_feature (1)..(305): Homolog of NCBI NO: 34911542 NR Description: putative farnesyl-pyrophosphate synthetase [Oryza
  misc_feature (9)..(305): Homolog of NCBI NO: 25458583 NR Description: probable farnesyl pyrophosphate synthase - rice >gi|4680193|gb|AAD27558.1|AF111710_4 putative farnesyl
  misc_feature (1)..(305): Homolog of NCBI NO: 18958450 NR Description: farnesyl pyrophosphare synthase [Musa acuminata]
  misc_feature (1)..(305): Homolog of NCBI NO: 1346028 NR Description: Farnesyl pyrophosphate synthetase 1 (FPP
  misc_feature (1)..(305): Homolog of NCBI NO: 34911542 NR Description: putative farnesyl-pyrophosphate synthetase [Oryza
  misc_feature (1)..(305): Homolog of NCBI NO: 18958450 NR Description: farnesyl pyrophosphare synthase [Musa acuminata]
  misc_feature (1)..(305): Homolog of NCBI NO: 14279425 NR Description: farnesyl pyrophosphate synthase [Humulus lupulus]
  misc_feature (1)..(305): Homolog of NCBI NO: 25452945 NR Description: Farnesyl pyrophosphate synthetase 1 (FPP
  misc_feature (1)..(305): Homolog of NCBI NO: 13537421 NR Description: farnesyl pyrophosphate synthase [Humulus lupulus]
  misc_feature (1)..(305): Homolog of NCBI NO: 1346029 NR Description: Farnesyl pyrophosphate synthetase 2 (FPP
  misc_feature (1)..(305): Homolog of NCBI NO: 7433992 NR Description: farnesyl-pyrophosphate synthetase - Para rubber >gi|22676905|gb|AAM98379.1| farnesyl diphosphate synthase [Hevea
  misc_feature (1)..(305): Homolog of NCBI NO: 1346028 NR Description: Farnesyl pyrophosphate synthetase 1 (FPP
  misc_feature (9)..(305): Homolog of NCBI NO: 25458583 NR Description: probable farnesyl pyrophosphate synthase - rice >gi|4680193|gb|AAD27558.1|AF111710_4 putative farnesyl
  misc_feature (1)..(305): Homolog of NCBI NO: 1346033 NR Description: Farnesyl pyrophosphate synthetase (FPP (FPS) (Farnesyl diphosphate synthetase) [Includes:
  misc_feature (1)..(305): Homolog of NCBI NO: 7433992 NR Description: farnesyl-pyrophosphate synthetase - Para rubber >gi|22676905|gb|AAM98379.1| farnesyl diphosphate synthase [Hevea
  misc_feature (1)..(305): Homolog of NCBI NO: 1346029 NR Description: Farnesyl pyrophosphate synthetase 2 (FPP
  misc_feature (1)..(305): Homolog of NCBI NO: 13537421 NR Description: farnesyl pyrophosphate synthase [Humulus lupulus]
  misc_feature (1)..(305): Homolog of NCBI NO: 25452945 NR Description: Farnesyl pyrophosphate synthetase 1 (FPP
  misc_feature (1)..(305): Homolog of NCBI NO: 14279425 NR Description: farnesyl pyrophosphate synthase [Humulus lupulus]

SEQ ID NO: 9947 - DNA, 748 bp, Zea mays subsp. mays
  misc_feature (1)..(748): Ceres Seq. ID no. 12415163
  misc_feature: MA Experiment ID: 108545 Result: Down-regulated in Transcription
  misc_feature: MA Experiment 108545 PARAMETER Experiment Name: Zm_Imbibed_Seeds_P Parameter: Age (day) Value: 3 vs. 2
  misc_feature: MA Experiment 108545 PARAMETER Experiment Name: Zm_Imbibed_Seeds_P Parameter: Organism Value: Zea mays
  misc_feature: MA Experiment 108545 PARAMETER Experiment Name: Zm_Imbibed_Seeds_P Parameter: Plant Line Value: 35A19
  misc_feature: MA Experiment 108545 PARAMETER Experiment Name: Zm_Imbibed_Seeds_P Parameter: Tissue Value: Aerial vs. Embryo
  misc_feature: MA Experiment ID: 108547 Result: Down-regulated in Transcription
  misc_feature: MA Experiment 108547 PARAMETER Experiment Name: Zm_Imbibed_Seeds_P Parameter: Age (day) Value: 4 vs. 2
  misc_feature: MA Experiment 108547 PARAMETER Experiment Name: Zm_Imbibed_Seeds_P Parameter: Organism Value: Zea mays
  misc_feature: MA Experiment 108547 PARAMETER Experiment Name: Zm_Imbibed_Seeds_P Parameter: Plant Line Value: 35A19
  misc_feature: MA Experiment 108547 PARAMETER Experiment Name: Zm_Imbibed_Seeds_P Parameter: Tissue Value: Aerial vs. Embryo
  misc_feature: MA Experiment ID: 20000492 Result: Up-regulated in Transcription
  misc_feature: MA Experiment 20000492 PARAMETER Experiment Name: Zm_Hybrid_Seed_Dev_P Parameter: DAP Value: 12
  misc_feature: MA Experiment 20000492 PARAMETER Experiment Name: Zm_Hybrid_Seed_Dev_P Parameter: Organism Value: Zea mays
  misc_feature: MA Experiment 20000492 PARAMETER Experiment Name: Zm_Hybrid_Seed_Dev_P Parameter: Plant Line Value: 35A19
  misc_feature: MA Experiment 20000492 PARAMETER Experiment Name: Zm_Hybrid_Seed_Dev_P Parameter: Tissue Value: Fert Kernel vs. Unfert Floret
attccagcgtcttgtctcgctgtaccggccgatctccccattctcccctcttcgccggtcccaccaccgcgccgatcctgatggcctccgccgcctcatcggccgtcggcgctggcaaatcgctgttccaggggctccgcaggttcctcaagaagccgtgggagatcacaggcccctgcgcctctcccgagtaccgcagcgcgctgcctggcgcgctcgagtaccgcgtcaagtgcccggccaccgtgcgcgacgaccgcgacaaggccatcgtgcccacatccgatccggagacagtctacgatatcaagtacttcacccgcgaccgccgccggagccgcccgcccgtgcggcgcaccctactccgcaagcccgatctcgagagctacatggccaccaagcagttcgaccccaccaatgacttccccgtaccatacgtcaacaccaccgtcgaggaggatgacaacactgtcggcggtggctaccagaagtgactcaggaaagcttgctggttaatttggtaggtatcctttgattggacttcatcagaagcggcactattttcattccagctattaaatatccccttttcttttgttcctagtggaagttttttggatgtaaaagatgacggtgtcaaataatatggcacctgtggagctcacaggatgcacatatcttgtaaattgtattctaaaactgtctacctgataccattgttactgtttaatgcaaaatttaaggtttc

SEQ ID NO: 9948 - protein, 163 aa, Zea mays subsp. mays
  peptide (1)..(163): Ceres Seq. ID no. 12415164
  misc_feature (1)..(163): Homolog of NCBI NO: 34909786 NR Description: P0512C01.35 [Oryza sativa (japonica
  misc_feature (31)..(163): Homolog of NCBI NO: 15241510 NR Description: putative protein; protein id: At5g08060.1, by cDNA: 2390., supported by cDNA: gi_13877960, supported by gi_17065637 [Arabidopsis thaliana] >gi|11285547|pir||T45631
  misc_feature (31)..(163): Homolog of NCBI NO: 21592443 NR Description: unknown [Arabidopsis thaliana]
SSVLSRCTGRSPHSPLFAGPTTAPILMASAASSAVGAGKSLFQGLRRFLKKPWEITGPCASPEYRSALPGALEYRVKCPATVRDDRDKAIVPTSDPETVYDIKYFTRDRRRSRPPVRRTLLRKPDLESYMATKQFDPTNDFPVPYVNTTVEEDDNTVGGGYQK

SEQ ID NO: 9949 - protein, 139 aa, Zea mays subsp. mays
  peptide (1)..(139): Ceres Seq. ID no. 12415165
FQRLVSLYRPISPFSPLRRSHHRADPDGLRRLIGRRRWQIAVPGAPQVPQEAVGDHRPLRLSRVPQRAAWRARVPRQVPGHRARRPRQGHRAHIRSGDSLRYQVLHPRPPPEPPARAAHPTPQARSRELHGHQAVRPHQ

SEQ ID NO: 9950 - protein, 137 aa, Zea mays subsp. mays
  peptide (1)..(137): Ceres Seq. ID no. 12415166
  misc_feature (1)..(137): Homolog of NCBI NO: 34909786 NR Description: P0512C01.35 [Oryza sativa (japonica
  misc_feature (5)..(137): Homolog of NCBI NO: 15241510 NR Description: putative protein; protein id: At5g08060.1, by cDNA: 2390., supported by cDNA: gi_13877960, supported by gi_17065637 [Arabidopsis thaliana] >gi|11285547|pir||T45631
  misc_feature (5)..(137): Homolog of NCBI NO: 21592443 NR Description: unknown [Arabidopsis thaliana]
MASAASSAVGAGKSLFQGLRRFLKKPWEITGPCASPEYRSALPGALEYRVKCPATVRDDRDKAIVPTSDPETVYDIKYFTRDRRRSRPPVRRTLLRKPDLESYMATKQFDPTNDFPVPYVNTTVEEDDNTVGGGYQK

SEQ ID NO: 9951 - DNA, 1027 bp, Zea mays subsp. mays
  misc_feature (1)..(1027): Ceres Seq. ID no. 12360663
  misc_feature: MA Experiment ID: 108504 Result: Up-regulated in Transcription
  misc_feature: MA Experiment 108504 PARAMETER Experiment Name: Zm_Drought_P Parameter: Age (day) Value: 8
  misc_feature: MA Experiment 108504 PARAMETER Experiment Name: Zm_Drought_P Parameter: Organism Value: Zea mays
  misc_feature: MA Experiment 108504 PARAMETER Experiment Name: Zm_Drought_P Parameter: Plant Line Value: 35A19
  misc_feature: MA Experiment 108504 PARAMETER Experiment Name: Zm_Drought_P Parameter: Timepoint (hr) Value: 12
  misc_feature: MA Experiment 108504 PARAMETER Experiment Name: Zm_Drought_P Parameter: Tissue Value: Aerial
  misc_feature: MA Experiment 108504 PARAMETER Experiment Name: Zm_Drought_P Parameter: Treatment Value: Drought vs. No Drought
  misc_feature: MA Experiment ID: 108523 Result: Up-regulated in Transcription
  misc_feature: MA Experiment 108523 PARAMETER Experiment Name: Zm_42deg_Heat_P Parameter: Age (day) Value: 8
  misc_feature: MA Experiment 108523 PARAMETER Experiment Name: Zm_42deg_Heat_P Parameter: Organism Value: Zea mays
  misc_feature: MA Experiment 108523 PARAMETER Experiment Name: Zm_42deg_Heat_P Parameter: Plant Line Value: 35A19
  misc_feature: MA Experiment 108523 PARAMETER Experiment Name: Zm_42deg_Heat_P Parameter: Temperature (deg C) Value: 42 vs. 22
  misc_feature: MA Experiment 108523 PARAMETER Experiment Name: Zm_42deg_Heat_P Parameter: Timepoint (hr) Value: 6
  misc_feature: MA Experiment 108523 PARAMETER Experiment Name: Zm_42deg_Heat_P Parameter: Tissue Value: Aerial
  misc_feature: MA Experiment ID: 108529 Result: Up-regulated in Transcription
  misc_feature: MA Experiment 108529 PARAMETER Experiment Name: Zm_Imbibed_Seeds_P Parameter: Age (day) Value: 5 vs. 2
  misc_feature: MA Experiment 108529 PARAMETER Experiment Name: Zm_Imbibed_Seeds_P Parameter: Organism Value: Zea mays
  misc_feature: MA Experiment 108529 PARAMETER Experiment Name: Zm_Imbibed_Seeds_P Parameter: Plant Line Value: 35A19
  misc_feature: MA Experiment 108529 PARAMETER Experiment Name: Zm_Imbibed_Seeds_P Parameter: Tissue Value: Roots vs. Embryo
  misc_feature: MA Experiment ID: 108556 Result: Up-regulated in Transcription
  misc_feature: MA Experiment 108556 PARAMETER Experiment Name: Zm_Drought_P Parameter: Age (day) Value: 9
  misc_feature: MA Experiment 108556 PARAMETER Experiment Name: Zm_Drought_P Parameter: Organism Value: Zea mays
  misc_feature: MA Experiment 108556 PARAMETER Experiment Name: Zm_Drought_P Parameter: Plant Line Value: 35A19
  misc_feature: MA Experiment 108556 PARAMETER Experiment Name: Zm_Drought_P Parameter: Timepoint (hr) Value: 24
  misc_feature: MA Experiment 108556 PARAMETER Experiment Name: Zm_Drought_P Parameter: Tissue Value: Aerial
  misc_feature: MA Experiment 108556 PARAMETER Experiment Name: Zm_Drought_P Parameter: Treatment Value: Drought vs. No Drought
  misc_feature: MA Experiment ID: 20000535 Result: Down-regulated in Transcription
  misc_feature: MA Experiment 20000535 PARAMETER Experiment Name: Zm_Hybrid_Seed_Dev_P Parameter: DAP Value: 30 vs. 12
  misc_feature: MA Experiment 20000535 PARAMETER Experiment Name: Zm_Hybrid_Seed_Dev_P Parameter: Organism Value: Zea mays
  misc_feature: MA Experiment 20000535 PARAMETER Experiment Name: Zm_Hybrid_Seed_Dev_P Parameter: Plant Line Value: 35A19
  misc_feature: MA Experiment 20000535 PARAMETER Experiment Name: Zm_Hybrid_Seed_Dev_P Parameter: Tissue Value: Embryo vs. Unfert Floret
aactttggttaaccacccgactccgcctaatatagccttccttttccgtccatggccgcgcaaccctaacggcgcccttcccgtgccgcgcgcatggcggaccccggcggctgcctcgaggtccggctcttctacgtgcgcgtctcgccgcacggcggcgcggcccctcccccgcgcctcgcgctcgacctccgccccgcgggcggcgaggcggcccccgtcccgctgcgcctcgaccgccacgacgccgcctcgggcgaggccacctacgtctccaccgcggccgcgcggctgcccccgccatccgcggccttcgatgtggccgaccaccgcggcgtcgcgctgctccggggctcgcttcggtggtgtcccggcgccaagggcggttcccacgcctgggaaattgattgcgtccccgccgctgcggcggccgcctcggcctcggccttcgaggtgtacgtcgccgggtgctacgccggcgagcccgcggtgctcacgcacgccctgcggctagccaccccggaggaagctgctgctgcgttggttcggcgccgatcgggggcattgccggctgctagggatgaaggcgacaatgatatgaacactggtagcacncaataccctgaaggttggtactcanacgatgacgacgggcagctctcatggttcaacgctggggtcagagttggcgtaggcatcggcctgggagtctgtgttggtgtaggcataggcgtcgggctcctcctgcgctcctaccaagcaacaaccagaagcttgaagaggcggttcttctgacagttgcagctggtgtagctaccaatgatgaccagagcagagttctgcctcacatacttgtatagttcatgtgtttgttgtgcaggagttttgttttgtttttaggggaaagtgtagatgctgtgttaatgtggttgtgtacatggctctcgccgtttcttgtatggcatggcatgcatgtaaactgtgaagttggtcctcggacatgtgaaggaaatggtttctagttttg

SEQ ID NO: 9952 - protein, 233 aa, Zea mays subsp. mays
  peptide (1)..(233): Ceres Seq. ID no. 12360664
  misc_feature (3)..(233): Homolog of NCBI NO: 28812134 NR Description: P0443G08.30 [Oryza sativa (japonica
  misc_feature (163)..(232): Homolog of NCBI NO: 2505879 NR Description: hypothetical protein [Arabidopsis thaliana]
  misc_feature (163)..(232): Homolog of NCBI NO: 18378846 NR Description: expressed protein; protein id: At1g01500.1, by cDNA: 6115. [Arabidopsis thaliana] >gi|27311811|gb|AAO00871.1|
  misc_feature (163)..(232): Homolog of NCBI NO: 21593937 NR Description: unknown [Arabidopsis thaliana]
  misc_feature (120)..(231): Homolog of NCBI NO: 22329671 NR Description: unknown protein; protein id: At1g19400.1, by cDNA: gi_18176222, supported by cDNA: gi_20465770 [Arabidopsis >gi|18176223|gb|AAL60006.1| unknown protein [Arabidopsis
  misc_feature (163)..(225): Homolog of NCBI NO: 1922248 NR Description: hypothetical protein [Arabidopsis thaliana]
  misc_feature (163)..(230): Homolog of NCBI NO: 25517982 NR Description: F22L4.6 protein - Arabidopsis thaliana
  misc_feature (173)..(231): Homolog of NCBI NO: 18389258 NR Description: unknown protein [Arabidopsis thaliana]
  misc_feature (173)..(231): Homolog of NCBI NO: 21553509 NR Description: unknown [Arabidopsis thaliana]
  misc_feature (173)..(231): Homolog of NCBI NO: 18410788 NR Description: expressed protein; protein id: At1g75180.1, by cDNA: 148308., supported by cDNA: gi_18389257 [Arabidopsis
  misc_feature (174)..(174): Xaa is any aa, unknown or other
  misc_feature (183)..(183): Xaa is any aa, unknown or other
MADPGGCLEVRLFYVRVSPHGGAAPPPRLALDLRPAGGEAAPVPLRLDRHDAASGEATYVSTAAARLPPPSAAFDVADHRGVALLRGSLRWCPGAKGGSHAWEIDCVPAAAAAASASAFEVYVAGCYAGEPAVLTHALRLATPEEAAAALVRRRSGALPAARDEGDNDMNTGSXQYPEGWYSXDDDGQLSWFNAGVRVGVGIGLGVCVGVGIGVGLLLRSYQATTRSLKRRFF

SEQ ID NO: 9953 - protein, 170 aa, Zea mays subsp. mays
  peptide (1)..(170): Ceres Seq. ID no. 12360665
  misc_feature (25)..(168): Pfam Name: Glycoprotein GG/GX Pfam Description: Glycoprotein GG/GX
  misc_feature (8)..(170): Homolog of NCBI NO: 27375632 NR Description: blr0521 [Bradyrhizobium japonicum]
  misc_feature (5)..(170): Homolog of NCBI NO: 7446482 NR Description: probable cell wall-plasma membrane linker protein
  misc_feature (16)..(170): Homolog of NCBI NO: 25989119 NR Description: unknown [Streptomyces aureofaciens]
  misc_feature (16)..(168): Homolog of NCBI NO: 21431729 NR Description: Anter-specific proline-rich protein APG precursor
  misc_feature (6)..(170): Homolog of NCBI NO: 20138131 NR Description: Vegetative cell wall protein gp1 precursor rich glycoprotein 1) >gi|12018147|gb|AAG45420.1|AF309494_1
  misc_feature (17)..(170): Homolog of NCBI NO: 1076211 NR Description: hypothetical protein VSP-3 - Chlamydomonas >gi|530876|gb|AAB53953.1| amino acid feature: Rod protein domain,
  misc_feature (16)..(168): Homolog of NCBI NO: 25511649 NR Description: T20H2.9 protein - Arabidopsis thaliana
  misc_feature (16)..(170): Homolog of NCBI NO: 11360318 NR Description: probable mucin DKFZp434C196.1 - human (fragment)
  misc_feature (16)..(168): Homolog of NCBI NO: 99694 NR Description: proline-rich protein APG - Arabidopsis thaliana
TLVNHPTPPNIAFLFRPWPRNPNGALPVPRAWRTPAAASRSGSSTCASRRTAARPLPRASRSTSAPRAARRPPSRCASTATTPPRARPPTSPPRPRGCPRHPRPSMWPTTAASRCSGARFGGVPAPRAVPTPGKLIASPPLRRPPRPRPSRCTSPGATPASPRCSRTPCG

SEQ ID NO: 9954 - DNA, 793 bp, Zea mays subsp. mays
  misc_feature (1)..(793): Ceres Seq. ID no. 12347593
  misc_feature: MA Experiment ID: 108528 Result: Up-regulated in Transcription
  misc_feature: MA Experiment 108528 PARAMETER Experiment Name: Zm_Imbibed_Seeds_P Parameter: Age (day) Value: 5 vs. 2
  misc_feature: MA Experiment 108528 PARAMETER Experiment Name: Zm_Imbibed_Seeds_P Parameter: Organism Value: Zea mays
  misc_feature: MA Experiment 108528 PARAMETER Experiment Name: Zm_Imbibed_Seeds_P Parameter: Plant Line Value: 35A19
  misc_feature: MA Experiment 108528 PARAMETER Experiment Name: Zm_Imbibed_Seeds_P Parameter: Tissue Value: Aerial vs. Embryo
  misc_feature: MA Experiment ID: 108530 Result: Up-regulated in Transcription
  misc_feature: MA Experiment 108530 PARAMETER Experiment Name: Zm_Imbibed_Seeds_P Parameter: Age (day) Value: 6 vs. 2
  misc_feature: MA Experiment 108530 PARAMETER Experiment Name: Zm_Imbibed_Seeds_P Parameter: Organism Value: Zea mays
  misc_feature: MA Experiment 108530 PARAMETER Experiment Name: Zm_Imbibed_Seeds_P Parameter: Plant Line Value: 35A19
  misc_feature: MA Experiment 108530 PARAMETER Experiment Name: Zm_Imbibed_Seeds_P Parameter: Tissue Value: Aerial vs. Embryo
  misc_feature: MA Experiment ID: 108535 Result: Up-regulated in Transcription
  misc_feature: MA Experiment 108535 PARAMETER Experiment Name: Zm_Meristem_P Parameter: Age (day) Value: 8
  misc_feature: MA Experiment 108535 PARAMETER Experiment Name: Zm_Meristem_P Parameter: Organism Value: Zea mays
  misc_feature: MA Experiment 108535 PARAMETER Experiment Name: Zm_Meristem_P Parameter: Plant Line Value: 35A19
  misc_feature: MA Experiment 108535 PARAMETER Experiment Name: Zm_Meristem_P Parameter: Tissue Value: Root Meristem vs. Above Root Meristem
  misc_feature: MA Experiment ID: 108536 Result: Down-regulated in Transcription
  misc_feature: MA Experiment 108536 PARAMETER Experiment Name: Zm_Meristem_P Parameter: Age (day) Value: 8
  misc_feature: MA Experiment 108536 PARAMETER Experiment Name: Zm_Meristem_P Parameter: Organism Value: Zea mays
  misc_feature: MA Experiment 108536 PARAMETER Experiment Name: Zm_Meristem_P Parameter: Plant Line Value: 35A19
  misc_feature: MA Experiment 108536 PARAMETER Experiment Name: Zm_Meristem_P Parameter: Tissue Value: Shoot Meristem vs. Above Shoot Meristem
  misc_feature: MA Experiment ID: 108545 Result: Up-regulated in Transcription
  misc_feature: MA Experiment 108545 PARAMETER Experiment Name: Zm_Imbibed_Seeds_P Parameter: Age (day) Value: 3 vs. 2
  misc_feature: MA Experiment 108545 PARAMETER Experiment Name: Zm_Imbibed_Seeds_P Parameter: Organism Value: Zea mays
  misc_feature: MA Experiment 108545 PARAMETER Experiment Name: Zm_Imbibed_Seeds_P Parameter: Plant Line Value: 35A19
  misc_feature: MA Experiment 108545 PARAMETER Experiment Name: Zm_Imbibed_Seeds_P Parameter: Tissue Value: Aerial vs. Embryo
  misc_feature: MA Experiment ID: 108547 Result: Up-regulated in Transcription
  misc_feature: MA Experiment 108547 PARAMETER Experiment Name: Zm_Imbibed_Seeds_P Parameter: Age (day) Value: 4 vs. 2
  misc_feature: MA Experiment 108547 PARAMETER Experiment Name: Zm_Imbibed_Seeds_P Parameter: Organism Value: Zea mays
  misc_feature: MA Experiment 108547 PARAMETER Experiment Name: Zm_Imbibed_Seeds_P Parameter: Plant Line Value: 35A19
  misc_feature: MA Experiment 108547 PARAMETER Experiment Name: Zm_Imbibed_Seeds_P Parameter: Tissue Value: Aerial vs. Embryo
  misc_feature: MA Experiment ID: 108597 Result: Down-regulated in Transcription
  misc_feature: MA Experiment 108597 PARAMETER Experiment Name: Zm_100uM_ABA_P Parameter: Age (day) Value: 9
  misc_feature: MA Experiment 108597 PARAMETER Experiment Name: Zm_100uM_ABA_P Parameter: Organism Value: Zea mays
  misc_feature: MA Experiment 108597 PARAMETER Experiment Name: Zm_100uM_ABA_P Parameter: Plant Line Value: 35A19
  misc_feature: MA Experiment 108597 PARAMETER Experiment Name: Zm_100uM_ABA_P Parameter: Timepoint (hr) Value: 24
  misc_feature: MA Experiment 108597 PARAMETER Experiment Name: Zm_100uM_ABA_P Parameter: Tissue Value: Aerial
  misc_feature: MA Experiment 108597 PARAMETER Experiment Name: Zm_100uM_ABA_P Parameter: Treatment Value: 100uM ABA vs. No Treatment
  misc_feature: MA Experiment ID: 20000480 Result: Down-regulated in Transcription
  misc_feature: MA Experiment 20000480 PARAMETER Experiment Name: Zm_Drought_P Parameter: Age (day) Value: 11
  misc_feature: MA Experiment 20000480 PARAMETER Experiment Name: Zm_Drought_P Parameter: Organism Value: Zea mays
  misc_feature: MA Experiment 20000480 PARAMETER Experiment Name: Zm_Drought_P Parameter: Plant Line Value: 35A19
  misc_feature: MA Experiment 20000480 PARAMETER Experiment Name: Zm_Drought_P Parameter: Timepoint (hr) Value: 72
  misc_feature: MA Experiment 20000480 PARAMETER Experiment Name: Zm_Drought_P Parameter: Tissue Value: Aerial
  misc_feature: MA Experiment 20000480 PARAMETER Experiment Name: Zm_Drought_P Parameter: Treatment Value: Drought vs. No Drought
  misc_feature: MA Experiment ID: 20000626 Result: Down-regulated in Transcription
  misc_feature: MA Experiment 20000626 PARAMETER Experiment Name: Zm_Herbicide-Treatments_P Parameter: Timepoint (hr) Value: 12
  misc_feature: MA Experiment 20000626 PARAMETER Experiment Name: Zm_Herbicide-Treatments_P Parameter: Tissue Value: Aerial
  misc_feature: MA Experiment 20000626 PARAMETER Experiment Name: Zm_Herbicide-Treatments_P Parameter: Treatment Value: Roundup vs. No Treatment
  misc_feature: MA Experiment ID: 20001606 Result: Up-regulated in Transcription
  misc_feature: MA Experiment 20001606 PARAMETER Experiment Name: Zm_50ppm_KNO3_L-to-H_P Parameter: Age (day) Value: 19
  misc_feature: MA Experiment 20001606 PARAMETER Experiment Name: Zm_50ppm_KNO3_L-to-H_P Parameter: Organism Value: Zea mays
  misc_feature: MA Experiment 20001606 PARAMETER Experiment Name: Zm_50ppm_KNO3_L-to-H_P Parameter: Plant Line Value: 35A19
  misc_feature: MA Experiment 20001606 PARAMETER Experiment Name: Zm_50ppm_KNO3_L-to-H_P Parameter: Timepoint (hr) Value: 8
  misc_feature: MA Experiment 20001606 PARAMETER Experiment Name: Zm_50ppm_KNO3_L-to-H_P Parameter: Tissue Value: Shoots
  misc_feature: MA Experiment 20001606 PARAMETER Experiment Name: Zm_50ppm_KNO3_L-to-H_P Parameter: Treatment Value: 50ppm KNO3 vs. 50ppm KCl
  misc_feature: MA Experiment ID: 20001608 Result: Up-regulated in Transcription
  misc_feature: MA Experiment 20001608 PARAMETER Experiment Name: Zm_50ppm_KNO3_L-to-H_P Parameter: Age (day) Value: 21
  misc_feature: MA Experiment 20001608 PARAMETER Experiment Name: Zm_50ppm_KNO3_L-to-H_P Parameter: Organism Value: Zea mays
  misc_feature: MA Experiment 20001608 PARAMETER Experiment Name: Zm_50ppm_KNO3_L-to-H_P Parameter: Plant Line Value: 35A19
  misc_feature: MA Experiment 20001608 PARAMETER Experiment Name: Zm_50ppm_KNO3_L-to-H_P Parameter: Timepoint (hr) Value: 48
  misc_feature: MA Experiment 20001608 PARAMETER Experiment Name: Zm_50ppm_KNO3_L-to-H_P Parameter: Tissue Value: Shoots
  misc_feature: MA Experiment 20001608 PARAMETER Experiment Name: Zm_50ppm_KNO3_L-to-H_P Parameter: Treatment Value: 50ppm KNO3 vs. 50ppm KCl
gttgttgttgctgctgctaggtgctagctcacgagtcacggccgccttccactcccacaagcttcaactagccttcttactcccgccgtcgcccccgatccgagagcgagcatggcgcactctctcgccgcctccttctcgccggccgccgcccggcgccagatgacaaatgtgattccaagctggagctcggtttccttccagagccacaggagggcttctgtgtccatccgctcaagaccaaattctcttgggtttaagatttgctgttcggctaagaaagagacagtggacaaggtttgcagtatagtgaaggagcagctggctcttcccgatgggaccgctatcactggcgaatcaaaattcgctgaacttggcgctgattcgctggatacggtcgagattgtgatggggctcgaggaggcgttcaacataacagtggacgaaacaagcgcacaagacatcgcaacggtgcaggacgctgcggaccttatcgagaagctcatgctggaggcacctccaaaggtcgtctagatccagcaaccttgcgatcgacgaccttgcgtttgatctatgttgtgtgttaatttgttcgtgttgccccatttgttttttcttgatgattcaagatgaggttttgtattggtgttgctgaggtgaattagatagccccaaaggccacatgaagcagatgaggacagttcattccactttgaatttgtatgttgtagtgctgctatagagaaaccaatggactgttatgaagagtcaatgcaactgttgcttttcgttt

SEQ ID NO: 9955 - protein, 140 aa, Zea mays subsp. mays
  peptide (1)..(140): Ceres Seq. ID no. 12347594
  misc_feature (61)..(128): Pfam Name: Phosphopantetheine attachment site Pfam Description: Phosphopantetheine attachment site
  misc_feature (1)..(134): Homolog of NCBI NO: 113165 NR Description: Acyl carrier protein I, chloroplast precursor
  misc_feature (7)..(132): Homolog of NCBI NO: 20137323 NR Description: Acyl carrier protein 1, chloroplast precursor
  misc_feature (28)..(132): Homolog of NCBI NO: 2465010 NR Description: acyl carrier protein [Fragaria vesca]
  misc_feature (26)..(132): Homolog of NCBI NO: 113169 NR Description: Acyl carrier protein II, chloroplast precursor
  misc_feature (26)..(132): Homolog of NCBI NO: 113172 NR Description: Acyl carrier protein III, chloroplast precursor
  misc_feature (6)..(132): Homolog of NCBI NO: 1703085 NR Description: Acyl carrier protein 1, chloroplast precursor
  misc_feature (1)..(131): Homolog of NCBI NO: 30102979 NR Description: putative acyl carrier protein, 3'-partial [Oryza
  misc_feature (28)..(132): Homolog of NCBI NO: 166975 NR Description: acyl carrier protein III precursor
  misc_feature (8)..(132): Homolog of NCBI NO: 1703087 NR Description: Acyl carrier protein 3, chloroplast precursor
  misc_feature (6)..(131): Homolog of NCBI NO: 5669599 NR Description: acyl carrier protein [Coriandrum sativum]
MAHSLAASFSPAAARRQMTNVIPSWSSVSFQSHRRASVSIRSRPNSLGFKICCSAKKETVDKVCSIVKEQLALPDGTAITGESKFAELGADSLDTVEIVMGLEEAFNITVDETSAQDIATVQDAADLIEKLMLEAPPKVV

SEQ ID NO: 9956 - protein, 123 aa, Zea mays subsp. mays
  peptide (1)..(123): Ceres Seq. ID no. 12347595
  misc_feature (44)..(111): Pfam Name: Phosphopantetheine attachment site Pfam Description: Phosphopantetheine attachment site
  misc_feature (1)..(117): Homolog of NCBI NO: 113165 NR Description: Acyl carrier protein I, chloroplast precursor
  misc_feature (1)..(115): Homolog of NCBI NO: 20137323 NR Description: Acyl carrier protein 1, chloroplast precursor
  misc_feature (11)..(115): Homolog of NCBI NO: 2465010 NR Description: acyl carrier protein [Fragaria vesca]
  misc_feature (9)..(115): Homolog of NCBI NO: 113169 NR Description: Acyl carrier protein II, chloroplast precursor
  misc_feature (9)..(115): Homolog of NCBI NO: 113172 NR Description: Acyl carrier protein III, chloroplast precursor
  misc_feature (1)..(115): Homolog of NCBI NO: 1703085 NR Description: Acyl carrier protein 1, chloroplast precursor
  misc_feature (1)..(114): Homolog of NCBI NO: 30102979 NR Description: putative acyl carrier protein, 3'-partial [Oryza
  misc_feature (11)..(115): Homolog of NCBI NO: 166975 NR Description: acyl carrier protein III precursor
  misc_feature (1)..(115): Homolog of NCBI NO: 1703087 NR Description: Acyl carrier protein 3, chloroplast precursor
  misc_feature (1)..(114): Homolog of NCBI NO: 5669599 NR Description: acyl carrier protein [Coriandrum sativum]
MTNVIPSWSSVSFQSHRRASVSIRSRPNSLGFKICCSAKKETVDKVCSIVKEQLALPDGTAITGESKFAELGADSLDTVEIVMGLEEAFNITVDETSAQDIATVQDAADLIEKLMLEAPPKVV

SEQ ID NO: 9957 - DNA, 1126 bp, Zea mays subsp. mays
  misc_feature (1)..(1126): Ceres Seq. ID no. 12374788
  misc_feature: MA Experiment ID: 108535 Result: Down-regulated in Transcription
  misc_feature: MA Experiment 108535 PARAMETER Experiment Name: Zm_Meristem_P Parameter: Age (day) Value: 8
  misc_feature: MA Experiment 108535 PARAMETER Experiment Name: Zm_Meristem_P Parameter: Organism Value: Zea mays
  misc_feature: MA Experiment 108535 PARAMETER Experiment Name: Zm_Meristem_P Parameter: Plant Line Value: 35A19
  misc_feature: MA Experiment 108535 PARAMETER Experiment Name: Zm_Meristem_P Parameter: Tissue Value: Root Meristem vs. Above Root Meristem
  misc_feature: MA Experiment ID: 108544 Result: Up-regulated in Transcription
  misc_feature: MA Experiment ID: 20000480 Result: Down-regulated in Transcription
  misc_feature: MA Experiment 20000480 PARAMETER Experiment Name: Zm_Drought_P Parameter: Age (day) Value: 11
  misc_feature: MA Experiment 20000480 PARAMETER Experiment Name: Zm_Drought_P Parameter: Organism Value: Zea mays
  misc_feature: MA Experiment 20000480 PARAMETER Experiment Name: Zm_Drought_P Parameter: Plant Line Value: 35A19
  misc_feature: MA Experiment 20000480 PARAMETER Experiment Name: Zm_Drought_P Parameter: Timepoint (hr) Value: 72
  misc_feature: MA Experiment 20000480 PARAMETER Experiment Name: Zm_Drought_P Parameter: Tissue Value: Aerial
  misc_feature: MA Experiment 20000480 PARAMETER Experiment Name: Zm_Drought_P Parameter: Treatment Value: Drought vs. No Drought
  misc_feature: MA Experiment ID: 20000535 Result: Down-regulated in Transcription
  misc_feature: MA Experiment 20000535 PARAMETER Experiment Name: Zm_Hybrid_Seed_Dev_P Parameter: DAP Value: 30 vs. 12
  misc_feature: MA Experiment 20000535 PARAMETER Experiment Name: Zm_Hybrid_Seed_Dev_P Parameter: Organism Value: Zea mays
  misc_feature: MA Experiment 20000535 PARAMETER Experiment Name: Zm_Hybrid_Seed_Dev_P Parameter: Plant Line Value: 35A19
  misc_feature: MA Experiment 20000535 PARAMETER Experiment Name: Zm_Hybrid_Seed_Dev_P Parameter: Tissue Value: Embryo vs. Unfert Floret
atcacaaatctatctcgctcgctctccaggctccagctagactgtcctgctctgcttccgtgctactcactgtgcacagccagccagcttcagcagagtccggctcggctgtcggctgcgagtcctgcagcgcaacaatggacaggcctgcgcaggcgcccacgcagctgccgccggggttccggttccaccctaccgacgaggagctggtcgtgctgtacctccgccggaaggccctggctcgcccgctgccggccgccgtcatccccgtcgtccacgacgtcgccaggctcgatccgtgggacgtccctggggcgagcgaaggggagggctacttcttcagcctgcggcgagcgccggcgaccggccgcaggaggagggctgggagcgggtactggaaggccacggggaaggagaagccggtgttcctgcagtgcggcggcgttggcgccgagcagaggcagctgctcgtgggcgtcaagacggcgctcgccttccaccgccgtgagccgccgccgtcgtcgcggacaggctggatcatgcatgagtaccgcctcgccgtgccccgcggcgtggccgatcagaggaagaagaatgcgagacatggctacgttgctgaaccgggagagtgggtagtgtgccgggtcttcctgaagaacaggccgaaccgggacgccggcagcaaaaatctgcgacacggcgcctccgctcggcggcggcggcggcagcagcagccggaagacgtgagaggacagcagccgttgccattctcggcgccacagccgtcgtcctcgagctgtgttaccgacgtcaccgactgcttgtctgacgaagacgaagccgaagccagcagcggcagcacagcccgagctgcccctcaaagagaggcctaaggatatactccatatagtactccctgtccctgtagcgttttcccctctatcttgccccattgcccgtacttttcctggatcctggcatcagataatcaggtatagggcatgtctagctcaagggtgatccccagatatatcgtgccgaacagatttggcagtcctgaatcaggaacaatacggcatctgtgaagcagcatgcatttcgataatcaggtacagggcattttgcc

SEQ ID NO: 9958 - protein, 296 aa, Zea mays subsp. mays
  peptide (1)..(296): Ceres Seq. ID no. 12374789
  misc_feature (56)..(186): Pfam Name: No apical meristem (NAM) protein Pfam Description: No apical meristem (NAM) protein
  misc_feature (56)..(285): Homolog of NCBI NO: 38175531 NR Description: putative development regulation gene OsNAC4
  misc_feature (55)..(239): Homolog of NCBI NO: 7489024 NR Description: hypothetical protein SENU5, senescence - tomato >gi|1418990|emb|CAA99760.1| unknown [Lycopersicon
  misc_feature (55)..(232): Homolog of NCBI NO: 15240042 NR Description: NAM-like protein; protein id: At5g13180.1,
  misc_feature (40)..(232): Homolog of NCBI NO: 15219110 NR Description: NAM-like protein; protein id: At1g52880.1, by cDNA: 21243., supported by cDNA: gi_20466639, supported by
  misc_feature (40)..(232): Homolog of NCBI NO: 20466640 NR Description: NAM-like protein [Arabidopsis thaliana]
  misc_feature (40)..(232): Homolog of NCBI NO: 21554226 NR Description: NAM-like protein [Arabidopsis thaliana]
  misc_feature (53)..(219): Homolog of NCBI NO: 34902154 NR Description: Putative NAM (no apical meristem) protein [Oryza
  misc_feature (40)..(223): Homolog of NCBI NO: 15232606 NR Description: putative jasmonic acid regulatory protein; id: At3g15510.1, supported by cDNA: gi_12060425 [Arabidopsis
  misc_feature (55)..(185): Homolog of NCBI NO: 15226119 NR Description: putative NAM (no apical meristem)-like protein; id: At2g33480.1, supported by cDNA: gi_13272418, supported by
  misc_feature (54)..(219): Homolog of NCBI NO: 6223651 NR Description: NAM-like protein (no apical meristem)
HKSISLALQAPARLSCSASVLLTVHSQPASAESGSAVGCESCSATMDRPAQAPTQLPPGFRFHPTDEELVVLYLRRKALARPLPAAVIPVVHDVARLDPWDVPGASEGEGYFFSLRRAPATGRRRRAGSGYWKATGKEKPVFLQCGGVGAEQRQLLVGVKTALAFHRREPPPSSRTGWIMHEYRLAVPRGVADQRKKNARHGYVAEPGEWVVCRVFLKNRPNRDAGSKNLRHGASARRRRRQQQPEDVRGQQPLPFSAPQPSSSSCVTDVTDCLSDEDEAEASSGSTARAAPQREA

SEQ ID NO: 9959 - protein, 251 aa, Zea mays subsp. mays
  peptide (1)..(251): Ceres Seq. ID no. 12374790
  misc_feature (11)..(141): Pfam Name: No apical meristem (NAM) protein Pfam Description: No apical meristem (NAM) protein
  misc_feature (1)..(178): Homolog of NCBI NO: 15232606 NR Description: putative jasmonic acid regulatory protein; id: At3g15510.1, supported by cDNA: gi_12060425 [Arabidopsis
  misc_feature (10)..(140): Homolog of NCBI NO: 15226119 NR Description: putative NAM (no apical meristem)-like protein; id: At2g33480.1, supported by cDNA: gi_13272418, supported by
  misc_feature (10)..(194): Homolog of NCBI NO: 7489024 NR Description: hypothetical protein SENU5, senescence - tomato >gi|1418990|emb|CAA99760.1| unknown [Lycopersicon
  misc_feature (1)..(187): Homolog of NCBI NO: 15219110 NR Description: NAM-like protein; protein id: At1g52880.1, by cDNA: 21243., supported by cDNA: gi_20466639, supported by
  misc_feature (1)..(187): Homolog of NCBI NO: 21554226 NR Description: NAM-like protein [Arabidopsis thaliana]
  misc_feature (8)..(174): Homolog of NCBI NO: 34902154 NR Description: Putative NAM (no apical meristem) protein [Oryza
  misc_feature (1)..(187): Homolog of NCBI NO: 20466640 NR Description: NAM-like protein [Arabidopsis thaliana]
  misc_feature (10)..(187): Homolog of NCBI NO: 15240042 NR Description: NAM-like protein; protein id: At5g13180.1,
  misc_feature (11)..(240): Homolog of NCBI NO: 38175531 NR Description: putative development regulation gene OsNAC4
  misc_feature (9)..(174): Homolog of NCBI NO: 6223651 NR Description: NAM-like protein (no apical meristem)
MDRPAQAPTQLPPGFRFHPTDEELVVLYLRRKALARPLPAAVIPVVHDVARLDPWDVPGASEGEGYFFSLRRAPATGRRRRAGSGYWKATGKEKPVFLQCGGVGAEQRQLLVGVKTALAFHRREPPPSSRTGWIMHEYRLAVPRGVADQRKKNARHGYVAEPGEWVVCRVFLKNRPNRDAGSKNLRHGASARRRRRQQQPEDVRGQQPLPFSAPQPSSSSCVTDVTDCLSDEDEAEASSGSTARAAPQREA

SEQ ID NO: 9960 - protein, 211 aa, Zea mays subsp. mays
  peptide (1)..(211): Ceres Seq. ID no. 12374791
ITNLSRSLSRLQLDCPALLPCYSLCTASQLQQSPARLSAASPAAQQWTGLRRRPRSCRRGSGSTLPTRSWSCCTSAGRPWLARCRPPSSPSSTTSPGSIRGTSLGRAKGRATSSACGERRRPAAGGGLGAGTGRPRGRRSRCSCSAAALAPSRGSCSWASRRRSPSTAVSRRRRRGQAGSCMSTASPCPAAWPIRGRRMRDMATLLNRESG

SEQ ID NO: 9961 - DNA, 1300 bp, Zea mays subsp. mays
  misc_feature (1)..(1300): Ceres Seq. ID no. 12369263
  misc_feature: MA Experiment ID: 108523 Result: Down-regulated in Transcription
  misc_feature: MA Experiment 108523 PARAMETER Experiment Name: Zm_42deg_Heat_P Parameter: Age (day) Value: 8
  misc_feature: MA Experiment 108523 PARAMETER Experiment Name: Zm_42deg_Heat_P Parameter: Organism Value: Zea mays
  misc_feature: MA Experiment 108523 PARAMETER Experiment Name: Zm_42deg_Heat_P Parameter: Plant Line Value: 35A19
  misc_feature: MA Experiment 108523 PARAMETER Experiment Name: Zm_42deg_Heat_P Parameter: Temperature (deg C) Value: 42 vs. 22
  misc_feature: MA Experiment 108523 PARAMETER Experiment Name: Zm_42deg_Heat_P Parameter: Timepoint (hr) Value: 6
  misc_feature: MA Experiment 108523 PARAMETER Experiment Name: Zm_42deg_Heat_P Parameter: Tissue Value: Aerial
  misc_feature: MA Experiment ID: 108535 Result: Down-regulated in Transcription
  misc_feature: MA Experiment 108535 PARAMETER Experiment Name: Zm_Meristem_P Parameter: Age (day) Value: 8
  misc_feature: MA Experiment 108535 PARAMETER Experiment Name: Zm_Meristem_P Parameter: Organism Value: Zea mays
  misc_feature: MA Experiment 108535 PARAMETER Experiment Name: Zm_Meristem_P Parameter: Plant Line Value: 35A19
  misc_feature: MA Experiment 108535 PARAMETER Experiment Name: Zm_Meristem_P Parameter: Tissue Value: Root Meristem vs. Above Root Meristem
  misc_feature: MA Experiment ID: 108544 Result: Up-regulated in Transcription
  misc_feature: MA Experiment ID: 20000108 Result: Down-regulated in Transcription
  misc_feature: MA Experiment 20000108 PARAMETER Experiment Name: Zm_Root-Tips_P Parameter: Age (day) Value: 12
  misc_feature: MA Experiment 20000108 PARAMETER Experiment Name: Zm_Root-Tips_P Parameter: Organism Value: Zea mays
  misc_feature: MA Experiment 20000108 PARAMETER Experiment Name: Zm_Root-Tips_P Parameter: Tissue Value: Root tips vs. Root mid region    35
  misc_feature: MA Experiment 20000108 PARAMETER Experiment Name: Zm_Root-Tips_P Parameter: Tissue Value: Root tips vs. Root mid region   Sequence Listing-Misc Features (4)
atggtatttatttctgggaaattagtttctgttcttgacttgttgtaagtcctgaatgcagggagttgtttactggcaacctcccgagtcagctatggataagatcgaaaagatcatcagggaaccaatagtcagtaaatatggttctgatgatgggcttcctgagcttcgagaagcacttctcgaaaagctaagcagagagaacaagcttaccaaatcatcagtcatggtcactgctggtgcaaatcaggcttttgtgaacttggtcctcactctttgtgatgctggtgattccgttgtcatgtttgcaccgtattatttcaatgcctacatgtcattccagatgacaggtgttactgacatattagttggtggctgcgatcccaagacacttcatcctgatgttgattggttggagaaggttctgaaagaaaatgagcctatccctaaacttgtcactgttgtgaatccggggaacccctctggagcttttattccaaggcctatgcttgagagaatttcagatctgtgcaaaaatgctggtgcatggcttgtggttgacaatacctatgagtactttatgtatgatggaatggagcactactgcttagaagatgctcatattgtcaacctcttctcgttctcaaaggcttatggaatgatggggtggcgtgtaggatacattgcatttccaaatgaagctgatggcttccacgatcagctcctcaaagtgcaagacaacataccgatctgcgcctccatcatcgggcagcgcctggcgctctactcgctggaggccggccccgagtggatcaaagaacgggtgaaagacctggtgaaaaaccgagcgctgctggtggaggcgctgtccccgctcggcgaggacaacgtcaagggcggggagggcgccatctacctctgggcaaagctaccggacagctgctcggacgacttcgaggctgtcaggtggctcgcgaacaagcacggcgtcgccgtgatccccgggagcgcagcggaggacccgggtacatccgcgtctccttcggagggctcaaggaagaggacaccaggctggctgctgagaggctcaggcgcggcctgcaggagctggtgaccgatggaatggtaaagtgacggctccatgggtgtaagtaaaagctccagttttccaacggtgtaattccgccgtgattaattcgggagaagaaaaggaacttgttttcaagaatgcactgcgttgctcggacgagagacgggacggaataaaatgcgtctggtctgcagagtcacctatgttatg

SEQ ID NO: 9962 - protein, 352 aa, Zea mays subsp. mays
  peptide (1)..(352): Ceres Seq. ID no. 12369264
  misc_feature (44)..(324): Pfam Name: Aminotransferase class I and II Pfam Description: Aminotransferase class I and II
  misc_feature (2)..(324): Homolog of NCBI NO: 34906130 NR Description: putative aspartate transaminase [Oryza sativa
  misc_feature (1)..(324): Homolog of NCBI NO: 15220119 NR Description: putative aspartate aminotransferase; protein id:
  misc_feature (2)..(318): Homolog of NCBI NO: 17228534 NR Description: probable aspartate aminotransferase [Nostoc sp.
  misc_feature (2)..(337): Homolog of NCBI NO: 23123920 NR Description: hypothetical protein [Nostoc punctiforme]
  misc_feature (2)..(318): Homolog of NCBI NO: 16331997 NR Description: aspartate aminotransferase [Synechocystis sp. PCC >gi|7447812|pir||S75949 probable aspartate transaminase (EC
  misc_feature (2)..(317): Homolog of NCBI NO: 33863300 NR Description: Aminotransferases class-I [Prochlorococcus
  misc_feature (2)..(324): Homolog of NCBI NO: 39995195 NR Description: aminotransferase, classes I and II [Geobacter PCA] >gi|39981957|gb|AAR33419.1| aminotransferase, classes I and
  misc_feature (8)..(324): Homolog of NCBI NO: 21228470 NR Description: Aspartate aminotransferase [Methanosarcina mazei >gi|20906951|gb|AAM32064.1| Aspartate aminotransferase
  misc_feature (2)..(324): Homolog of NCBI NO: 23054173 NR Description: hypothetical protein [Geobacter metallireducens]
  misc_feature (10)..(324): Homolog of NCBI NO: 23050383 NR Description: hypothetical protein [Methanosarcina barkeri]
MQGVVYWQPPESAMDKIEKIIREPIVSKYGSDDGLPELREALLEKLSRENKLTKSSVMVTAGANQAFVNLVLTLCDAGDSVVMFAPYYFNAYMSFQMTGVTDILVGGCDPKTLHPDVDWLEKVLKENEPIPKLVTVVNPGNPSGAFIPRPMLERISDLCKNAGAWLVVDNTYEYFMYDGMEHYCLEDAHIVNLFSFSKAYGMMGWRVGYIAFPNEADGFHDQLLKVQDNIPICASIIGQRLALYSLEAGPEWIKERVKDLVKNRALLVEALSPLGEDNVKGGEGAIYLWAKLPDSCSDDFEAVRWLANKHGVAVIPGSAAEDPGTSASPSEGSRKRTPGWLLRGSGAACRSW

SEQ ID NO: 9963 - protein, 339 aa, Zea mays subsp. mays
  peptide (1)..(339): Ceres Seq. ID no. 12369265
  misc_feature (31)..(311): Pfam Name: Aminotransferase class I and II Pfam Description: Aminotransferase class I and II
  misc_feature (1)..(311): Homolog of NCBI NO: 34906130 NR Description: putative aspartate transaminase [Oryza sativa
  misc_feature (1)..(311): Homolog of NCBI NO: 15220119 NR Description: putative aspartate aminotransferase; protein id:
  misc_feature (1)..(305): Homolog of NCBI NO: 17228534 NR Description: probable aspartate aminotransferase [Nostoc sp.
  misc_feature (1)..(324): Homolog of NCBI NO: 23123920 NR Description: hypothetical protein [Nostoc punctiforme]
  misc_feature (1)..(305): Homolog of NCBI NO: 16331997 NR Description: aspartate aminotransferase [Synechocystis sp. PCC >gi|7447812|pir||S75949 probable aspartate transaminase (EC
  misc_feature (1)..(304): Homolog of NCBI NO: 33863300 NR Description: Aminotransferases class-I [Prochlorococcus
  misc_feature (1)..(311): Homolog of NCBI NO: 39995195 NR Description: aminotransferase, classes I and II [Geobacter PCA] >gi|39981957|gb|AAR33419.1| aminotransferase, classes I and
  misc_feature (1)..(311): Homolog of NCBI NO: 21228470 NR Description: Aspartate aminotransferase [Methanosarcina mazei >gi|20906951|gb|AAM32064.1| Aspartate aminotransferase
  misc_feature (1)..(311): Homolog of NCBI NO: 23054173 NR Description: hypothetical protein [Geobacter metallireducens]
  misc_feature (1)..(311): Homolog of NCBI NO: 23050383 NR Description: hypothetical protein [Methanosarcina barkeri]
MDKIEKIIREPIVSKYGSDDGLPELREALLEKLSRENKLTKSSVMVTAGANQAFVNLVLTLCDAGDSVVMFAPYYFNAYMSFQMTGVTDILVGGCDPKTLHPDVDWLEKVLKENEPIPKLVTVVNPGNPSGAFIPRPMLERISDLCKNAGAWLVVDNTYEYFMYDGMEHYCLEDAHIVNLFSFSKAYGMMGWRVGYIAFPNEADGFHDQLLKVQDNIPICASIIGQRLALYSLEAGPEWIKERVKDLVKNRALLVEALSPLGEDNVKGGEGAIYLWAKLPDSCSDDFEAVRWLANKHGVAVIPGSAAEDPGTSASPSEGSRKRTPGWLLRGSGAACRSW

SEQ ID NO: 9964 - protein, 295 aa, Zea mays subsp. mays
  peptide (1)..(295): Ceres Seq. ID no. 12369266
  misc_feature (1)..(267): Pfam Name: Aminotransferase class I and II Pfam Description: Aminotransferase class I and II
  misc_feature (1)..(267): Homolog of NCBI NO: 34906130 NR Description: putative aspartate transaminase [Oryza sativa
  misc_feature (1)..(267): Homolog of NCBI NO: 15220119 NR Description: putative aspartate aminotransferase; protein id:
  misc_feature (1)..(261): Homolog of NCBI NO: 17228534 NR Description: probable aspartate aminotransferase [Nostoc sp.
  misc_feature (1)..(280): Homolog of NCBI NO: 23123920 NR Description: hypothetical protein [Nostoc punctiforme]
  misc_feature (1)..(261): Homolog of NCBI NO: 16331997 NR Description: aspartate aminotransferase [Synechocystis sp. PCC >gi|7447812|pir||S75949 probable aspartate transaminase (EC
  misc_feature (1)..(260): Homolog of NCBI NO: 33863300 NR Description: Aminotransferases class-I [Prochlorococcus
  misc_feature (1)..(267): Homolog of NCBI NO: 39995195 NR Description: aminotransferase, classes I and II [Geobacter PCA] >gi|39981957|gb|AAR33419.1| aminotransferase, classes I and
  misc_feature (1)..(267): Homolog of NCBI NO: 21228470 NR Description: Aspartate aminotransferase [Methanosarcina mazei >gi|20906951|gb|AAM32064.1| Aspartate aminotransferase
  misc_feature (1)..(267): Homolog of NCBI NO: 23054173 NR Description: hypothetical protein [Geobacter metallireducens]
  misc_feature (1)..(267): Homolog of NCBI NO: 23050383 NR Description: hypothetical protein [Methanosarcina barkeri]
MVTAGANQAFVNLVLTLCDAGDSVVMFAPYYFNAYMSFQMTGVTDILVGGCDPKTLHPDVDWLEKVLKENEPIPKLVTVVNPGNPSGAFIPRPMLERISDLCKNAGAWLVVDNTYEYFMYDGMEHYCLEDAHIVNLFSFSKAYGMMGWRVGYIAFPNEADGFHDQLLKVQDNIPICASIIGQRLALYSLEAGPEWIKERVKDLVKNRALLVEALSPLGEDNVKGGEGAIYLWAKLPDSCSDDFEAVRWLANKHGVAVIPGSAAEDPGTSASPSEGSRKRTPGWLLRGSGAACRSW

SEQ ID NO: 9965 - DNA, 1276 bp, Zea mays subsp. mays
  misc_feature (1)..(1276): Ceres Seq. ID no. 12367734
  misc_feature: MA Experiment ID: 108527 Result: Up-regulated in Transcription
  misc_feature: MA Experiment 108527 PARAMETER Experiment Name: Zm_5mM_NO_P Parameter: Age (day) Value: 8
  misc_feature: MA Experiment 108527 PARAMETER Experiment Name: Zm_5mM_NO_P Parameter: Organism Value: Zea mays
  misc_feature: MA Experiment 108527 PARAMETER Experiment Name: Zm_5mM_NO_P Parameter: Plant Line Value: 35A19
  misc_feature: MA Experiment 108527 PARAMETER Experiment Name: Zm_5mM_NO_P Parameter: Timepoint (hr) Value: 6
  misc_feature: MA Experiment 108527 PARAMETER Experiment Name: Zm_5mM_NO_P Parameter: Tissue Value: Aerial
  misc_feature: MA Experiment 108527 PARAMETER Experiment Name: Zm_5mM_NO_P Parameter: Treatment Value: 5mM NO vs. No Treatment
  misc_feature: MA Experiment ID: 108534 Result: Up-regulated in Transcription
  misc_feature: MA Experiment 108534 PARAMETER Experiment Name: Zm_4deg_Cold_P Parameter: Age (hr) Value: 8
  misc_feature: MA Experiment 108534 PARAMETER Experiment Name: Zm_4deg_Cold_P Parameter: Organism Value: Zea mays
  misc_feature: MA Experiment 108534 PARAMETER Experiment Name: Zm_4deg_Cold_P Parameter: Plant Line Value: 35A19
  misc_feature: MA Experiment 108534 PARAMETER Experiment Name: Zm_4deg_Cold_P Parameter: Temperature (deg C) Value: 4 vs. 22
  misc_feature: MA Experiment 108534 PARAMETER Experiment Name: Zm_4deg_Cold_P Parameter: Timepoint (hr) Value: 6
  misc_feature: MA Experiment 108534 PARAMETER Experiment Name: Zm_4deg_Cold_P Parameter: Tissue Value: Aerial
  misc_feature: MA Experiment ID: 20000626 Result: Down-regulated in Transcription
  misc_feature: MA Experiment 20000626 PARAMETER Experiment Name: Zm_Herbicide-Treatments_P Parameter: Timepoint (hr) Value: 12
  misc_feature: MA Experiment 20000626 PARAMETER Experiment Name: Zm_Herbicide-Treatments_P Parameter: Tissue Value: Aerial
  misc_feature: MA Experiment 20000626 PARAMETER Experiment Name: Zm_Herbicide-Treatments_P Parameter: Treatment Value: Roundup vs. No Treatment
  misc_feature: MA Experiment ID: 20000629 Result: Down-regulated in Transcription
  misc_feature: MA Experiment 20000629 PARAMETER Experiment Name: Zm_Herbicide-Treatments_P Parameter: Timepoint (hr) Value: 12
  misc_feature: MA Experiment 20000629 PARAMETER Experiment Name: Zm_Herbicide-Treatments_P Parameter: Tissue Value: Aerial
  misc_feature: MA Experiment 20000629 PARAMETER Experiment Name: Zm_Herbicide-Treatments_P Parameter: Treatment Value: Trimec vs. No Treatment
ccctctactagtcattctcctctctctctctctcacacacacacacggccaaattccgctctctgctttgtttacacaggcgacgcaagccacgcagcgcgccgccaccgcgtctgcactccgcccccgcgaagcttccggggggccctcttccttcctccgccccagccctcgagtcggtctccaccggcggcggcggcaggcttccgcgccggcgccggactgggtcggcccggccgcgaggtgcaccaggtatcactagcaggtccctgacaaggagggcttactatcctgtggttggaagtagcaactcaagcgttgatgccgttccaactatccgtggatcatctggcgcagcaatatttgctaatggtggctatgctcttaatgctgatgctggaactgtttctatctaccctaatccagctcctgctacttcatctggctctataaccatgcccatgcccatgctccatcagatggtcattcagagccatccacctgctacctctgcagcaacctctacatccatgtggatcgctcaaccactacctgccagaactgctgcggcttctagacatgcaagacgcgtatcagcagggcttgccaacaatggaaggtacagaagggctaggagctcttactacagccttcatccactgatgatggtagaggcagagttggtcttttacgaatcaagagcagcagccgctgacccccacagggacatgagactggacatcgacaacatgagctacgaggacctgttggctttgggagaatctatgggcaatgtcaacacaggcttggccgatgagaaaatttcgaagtgcgtgaaagaagtggtctgctgcagttccgaccagacgcaaaccgatcaagatgaccaggatgacggaagctgcgtcatctgcctggagggttacagagacaaggatatgctggggatactgaaatgcaggcacgacttccacgccggctgcatcaagaagtggctgcagacgaagaactcgtgcccggtgtgcaaagccgccgccgcctaggacgacaccagaggagcgagcaactattttgtgctcctcctcgatctattcatttttttaggctcaggtcgaattatatatgtcgttccattcttttgattccagccagtcgtgtaaataaatgccgtgtgttggttattttagttatcacttgggttacattagcccaaattctcctgttgcattgtaaacaatccagtggtgaaggcaattgatcaagtggttgcaagcgc

SEQ ID NO: 9966 - protein, 195 aa, Zea mays subsp. mays
  peptide (1)..(195): Ceres Seq. ID no. 12367735
  misc_feature (150)..(190): Pfam Name: Zinc finger, C3HC4 type (RING finger) Pfam Description: Zinc finger, C3HC4 type (RING finger)
  misc_feature (1)..(195): Homolog of NCBI NO: 34896014 NR Description: ESTs C25947(C11252) correspond to a region of the predicted to Lotus japonicus gene encoding RING finger protein (Y09539)
  misc_feature (31)..(195): Homolog of NCBI NO: 1086225 NR Description: RING-finger protein - Lotus japonicus
  misc_feature (39)..(195): Homolog of NCBI NO: 4240031 NR Description: DNA binding zinc finger protein (Pspzf) [Pisum
MPMPMLHQMVIQSHPPATSAATSTSMWIAQPLPARTAAASRHARRVSAGLANNGRYRRARSSYYSLHPLMMVEAELVFYESRAAAADPHRDMRLDIDNMSYEDLLALGESMGNVNTGLADEKISKCVKEVVCCSSDQTQTDQDDQDDGSCVICLEGYRDKDMLGILKCRHDFHAGCIKKWLQTKNSCPVCKAAAA

SEQ ID NO: 9967 - protein, 193 aa, Zea mays subsp. mays
  peptide (1)..(193): Ceres Seq. ID no. 12367736
  misc_feature (148)..(188): Pfam Name: Zinc finger, C3HC4 type (RING finger) Pfam Description: Zinc finger, C3HC4 type (RING finger)
  misc_feature (1)..(193): Homolog of NCBI NO: 34896014 NR Description: ESTs C25947(C11252) correspond to a region of the predicted to Lotus japonicus gene encoding RING finger protein (Y09539)
  misc_feature (29)..(193): Homolog of NCBI NO: 1086225 NR Description: RING-finger protein - Lotus japonicus
  misc_feature (37)..(193): Homolog of NCBI NO: 4240031 NR Description: DNA binding zinc finger protein (Pspzf) [Pisum
MPMLHQMVIQSHPPATSAATSTSMWIAQPLPARTAAASRHARRVSAGLANNGRYRRARSSYYSLHPLMMVEAELVFYESRAAAADPHRDMRLDIDNMSYEDLLALGESMGNVNTGLADEKISKCVKEVVCCSSDQTQTDQDDQDDGSCVICLEGYRDKDMLGILKCRHDFHAGCIKKWLQTKNSCPVCKAAAA

SEQ ID NO: 9968 - protein, 191 aa, Zea mays subsp. mays
  peptide (1)..(191): Ceres Seq. ID no. 12367737
  misc_feature (146)..(186): Pfam Name: Zinc finger, C3HC4 type (RING finger) Pfam Description: Zinc finger, C3HC4 type (RING finger)
  misc_feature (1)..(191): Homolog of NCBI NO: 34896014 NR Description: ESTs C25947(C11252) correspond to a region of the predicted to Lotus japonicus gene encoding RING finger protein (Y09539)
  misc_feature (27)..(191): Homolog of NCBI NO: 1086225 NR Description: RING-finger protein - Lotus japonicus
  misc_feature (35)..(191): Homolog of NCBI NO: 4240031 NR Description: DNA binding zinc finger protein (Pspzf) [Pisum
MLHQMVIQSHPPATSAATSTSMWIAQPLPARTAAASRHARRVSAGLANNGRYRRARSSYYSLHPLMMVEAELVFYESRAAAADPHRDMRLDIDNMSYEDLLALGESMGNVNTGLADEKISKCVKEVVCCSSDQTQTDQDDQDDGSCVICLEGYRDKDMLGILKCRHDFHAGCIKKWLQTKNSCPVCKAAAA

SEQ ID NO: 9969 - DNA, 1151 bp, Zea mays subsp. mays
  misc_feature (1)..(1151): Ceres Seq. ID no. 12346366
  misc_feature: MA Experiment ID: 108528 Result: Down-regulated in Transcription
  misc_feature: MA Experiment 108528 PARAMETER Experiment Name: Zm_Imbibed_Seeds_P Parameter: Age (day) Value: 5 vs. 2
  misc_feature: MA Experiment 108528 PARAMETER Experiment Name: Zm_Imbibed_Seeds_P Parameter: Organism Value: Zea mays
  misc_feature: MA Experiment 108528 PARAMETER Experiment Name: Zm_Imbibed_Seeds_P Parameter: Plant Line Value: 35A19
  misc_feature: MA Experiment 108528 PARAMETER Experiment Name: Zm_Imbibed_Seeds_P Parameter: Tissue Value: Aerial vs. Embryo
  misc_feature: MA Experiment ID: 108529 Result: Up-regulated in Transcription
  misc_feature: MA Experiment 108529 PARAMETER Experiment Name: Zm_Imbibed_Seeds_P Parameter: Age (day) Value: 5 vs. 2
  misc_feature: MA Experiment 108529 PARAMETER Experiment Name: Zm_Imbibed_Seeds_P Parameter: Organism Value: Zea mays
  misc_feature: MA Experiment 108529 PARAMETER Experiment Name: Zm_Imbibed_Seeds_P Parameter: Plant Line Value: 35A19
  misc_feature: MA Experiment 108529 PARAMETER Experiment Name: Zm_Imbibed_Seeds_P Parameter: Tissue Value: Roots vs. Embryo
  misc_feature: MA Experiment ID: 108543 Result: Up-regulated in Transcription
  misc_feature: MA Experiment ID: 20000535 Result: Down-regulated in Transcription
  misc_feature: MA Experiment 20000535 PARAMETER Experiment Name: Zm_Hybrid_Seed_Dev_P Parameter: DAP Value: 30 vs. 12
  misc_feature: MA Experiment 20000535 PARAMETER Experiment Name: Zm_Hybrid_Seed_Dev_P Parameter: Organism Value: Zea mays
  misc_feature: MA Experiment 20000535 PARAMETER Experiment Name: Zm_Hybrid_Seed_Dev_P Parameter: Plant Line Value: 35A19
  misc_feature: MA Experiment 20000535 PARAMETER Experiment Name: Zm_Hybrid_Seed_Dev_P Parameter: Tissue Value: Embryo vs. Unfert Floret
gaaagccggagcgtctctgccggtgcccaacgtgcaggcactagctcagacttggcatggatcaggcgagccggtgcctttccggtacgtcaggacagaagagatcgtcgccggcgaagtcgtcgccggctgcgccatcccggtcgtggatctcagcaggttgcttgacccgcggtcgtccgaagaggagctcgcaaacctcggctctgcctgtcagcactggggtttctttcagcttatcaaccatggggtgccggacgaggtgatccaggacacgaagaaagacatggtggagttcttcaagctccctgtggaagccaagaaggtgcacgcgcaggtaccgggcggcatcgagggctacggccaggccttcgtcttctccgagacccagaagctggattgggcggacatgatctacctcatgattagccccaaggagtcgcgggacctgaggttctggcccacccggcctccctccttcagggactctatcgaaaggtactcggccgagacggcgaaggtgacggcgtgcctgctgcggttcatggccaaggacttgggcgtggagccggagcgcctcctggaggagttccggggattgccgcagagcatgcggacgacctactacccgccgtgcaggctggccgccgatgtgcttggcctgtcgccgcacaccgacgccaccggcctgacgctgctgctccacgtcaacgacgtgcagggcctgcagatcaggagggacggcaagtggctcgccgttgaccctctggacggtgctttagtcgtcagcatcggcgacatactggagattctaagcaatgggaggtacagaagcattgagcacagagccattgtacacccggacaaagaacgcatctcggcggcgatgttccatcagacatgccccaacacgacggtcggccctctgcaggagctcgtggaaagagacagtggcggggcacggtacagatccatggactacatggatttcatgaagggcttcttcgcggccaagctcgatgggcgaaggagccacatggacgctttgaggatatactagtccaaatgctggatgaatcatgttcctgtcttcataatgaattggacaactagtagtaaaatatctaaggctatccccaatagttcctctc

SEQ ID NO: 9970 - protein, 352 aa, Zea mays subsp. mays
  peptide (1)..(352): Ceres Seq. ID no. 12346367
  misc_feature (201)..(299): Pfam Name: 2OG-Fe(II) oxygenase superfamily Pfam Description: 2OG-Fe(II) oxygenase superfamily
  misc_feature (5)..(351): Homolog of NCBI NO: 37536792 NR Description: putative dioxygenase [Oryza sativa (japonica group)] >gi|14165314|gb|AAK55446.1| putative dioxygenase [Oryza
  misc_feature (1)..(351): Homolog of NCBI NO: 37536796 NR Description: putative dioxygenase [Oryza sativa (japonica group)] >gi|14165331|gb|AAK55463.1| putative dioxygenase [Oryza
  misc_feature (1)..(351): Homolog of NCBI NO: 37536804 NR Description: putative ethylene-forming enzyme [Oryza sativa
  misc_feature (5)..(351): Homolog of NCBI NO: 37536802 NR Description: putative ethylene-forming enzyme [Oryza sativa
  misc_feature (4)..(351): Homolog of NCBI NO: 15219988 NR Description: SRG1-like protein; protein id: At1g17020.1,
  misc_feature (4)..(351): Homolog of NCBI NO: 15235017 NR Description: SRG1-like protein; protein id: At4g25310.1
  misc_feature (23)..(351): Homolog of NCBI NO: 40736992 NR Description: putative oxidoreductase [Oryza sativa (japonica
  misc_feature (11)..(323): Homolog of NCBI NO: 34898470 NR Description: ESTs D47168(S12332),D46350(S10967) correspond to
  misc_feature (4)..(351): Homolog of NCBI NO: 33115140 NR Description: iron/ascorbate-dependent oxidoreductase [Hordeum
  misc_feature (6)..(331): Homolog of NCBI NO: 31978953 NR Description: flavonol synthase [Petroselinum crispum]
KAGASLPVPNVQALAQTWHGSGEPVPFRYVRTEEIVAGEVVAGCAIPVVDLSRLLDPRSSEEELANLGSACQHWGFFQLINHGVPDEVIQDTKKDMVEFFKLPVEAKKVHAQVPGGIEGYGQAFVFSETQKLDWADMIYLMISPKESRDLRFWPTRPPSFRDSIERYSAETAKVTACLLRFMAKDLGVEPERLLEEFRGLPQSMRTTYYPPCRLAADVLGLSPHTDATGLTLLLHVNDVQGLQIRRDGKWLAVDPLDGALVVSIGDILEILSNGRYRSIEHRAIVHPDKERISAAMFHQTCPNTTVGPLQELVERDSGGARYRSMDYMDFMKGFFAAKLDGRRSHMDALRIY

SEQ ID NO: 9971 - protein, 257 aa, Zea mays subsp. mays
  peptide (1)..(257): Ceres Seq. ID no. 12346368
  misc_feature (106)..(204): Pfam Name: 2OG-Fe(II) oxygenase superfamily Pfam Description: 2OG-Fe(II) oxygenase superfamily
  misc_feature (1)..(256): Homolog of NCBI NO: 37536792 NR Description: putative dioxygenase [Oryza sativa (japonica group)] >gi|14165314|gb|AAK55446.1| putative dioxygenase [Oryza
  misc_feature (1)..(256): Homolog of NCBI NO: 37536796 NR Description: putative dioxygenase [Oryza sativa (japonica group)] >gi|14165331|gb|AAK55463.1| putative dioxygenase [Oryza
  misc_feature (1)..(256): Homolog of NCBI NO: 37536804 NR Description: putative ethylene-forming enzyme [Oryza sativa
  misc_feature (1)..(256): Homolog of NCBI NO: 37536802 NR Description: putative ethylene-forming enzyme [Oryza sativa
  misc_feature (1)..(256): Homolog of NCBI NO: 15219988 NR Description: SRG1-like protein; protein id: At1g17020.1,
  misc_feature (1)..(256): Homolog of NCBI NO: 15235017 NR Description: SRG1-like protein; protein id: At4g25310.1
  misc_feature (1)..(256): Homolog of NCBI NO: 40736992 NR Description: putative oxidoreductase [Oryza sativa (japonica
  misc_feature (1)..(228): Homolog of NCBI NO: 34898470 NR Description: ESTs D47168(S12332),D46350(S10967) correspond to
  misc_feature (1)..(256): Homolog of NCBI NO: 33115140 NR Description: iron/ascorbate-dependent oxidoreductase [Hordeum
  misc_feature (1)..(236): Homolog of NCBI NO: 31978953 NR Description: flavonol synthase [Petroselinum crispum]
MVEFFKLPVEAKKVHAQVPGGIEGYGQAFVFSETQKLDWADMIYLMISPKESRDLRFWPTRPPSFRDSIERYSAETAKVTACLLRFMAKDLGVEPERLLEEFRGLPQSMRTTYYPPCRLAADVLGLSPHTDATGLTLLLHVNDVQGLQIRRDGKWLAVDPLDGALVVSIGDILEILSNGRYRSIEHRAIVHPDKERISAAMFHQTCPNTTVGPLQELVERDSGGARYRSMDYMDFMKGFFAAKLDGRRSHMDALRIY

SEQ ID NO: 9972 - protein, 216 aa, Zea mays subsp. mays
  peptide (1)..(216): Ceres Seq. ID no. 12346369
  misc_feature (65)..(163): Pfam Name: 2OG-Fe(II) oxygenase superfamily Pfam Description: 2OG-Fe(II) oxygenase superfamily
  misc_feature (1)..(215): Homolog of NCBI NO: 37536792 NR Description: putative dioxygenase [Oryza sativa (japonica group)] >gi|14165314|gb|AAK55446.1| putative dioxygenase [Oryza
  misc_feature (1)..(215): Homolog of NCBI NO: 37536796 NR Description: putative dioxygenase [Oryza sativa (japonica group)] >gi|14165331|gb|AAK55463.1| putative dioxygenase [Oryza
  misc_feature (1)..(215): Homolog of NCBI NO: 37536804 NR Description: putative ethylene-forming enzyme [Oryza sativa
  misc_feature (1)..(215): Homolog of NCBI NO: 37536802 NR Description: putative ethylene-forming enzyme [Oryza sativa
  misc_feature (1)..(215): Homolog of NCBI NO: 15219988 NR Description: SRG1-like protein; protein id: At1g17020.1,
  misc_feature (1)..(215): Homolog of NCBI NO: 15235017 NR Description: SRG1-like protein; protein id: At4g25310.1
  misc_feature (1)..(215): Homolog of NCBI NO: 40736992 NR Description: putative oxidoreductase [Oryza sativa (japonica
  misc_feature (1)..(187): Homolog of NCBI NO: 34898470 NR Description: ESTs D47168(S12332),D46350(S10967) correspond to
  misc_feature (1)..(215): Homolog of NCBI NO: 33115140 NR Description: iron/ascorbate-dependent oxidoreductase [Hordeum
  misc_feature (1)..(195): Homolog of NCBI NO: 31978953 NR Description: flavonol synthase [Petroselinum crispum]
MIYLMISPKESRDLRFWPTRPPSFRDSIERYSAETAKVTACLLRFMAKDLGVEPERLLEEFRGLPQSMRTTYYPPCRLAADVLGLSPHTDATGLTLLLHVNDVQGLQIRRDGKWLAVDPLDGALVVSIGDILEILSNGRYRSIEHRAIVHPDKERISAAMFHQTCPNTTVGPLQELVERDSGGARYRSMDYMDFMKGFFAAKLDGRRSHMDALRIY

SEQ ID NO: 9973 - DNA, 955 bp, Zea mays subsp. mays
  misc_feature (1)..(955): Ceres Seq. ID no. 12350622
  misc_feature: MA Experiment ID: 108522 Result: Up-regulated in Transcription
  misc_feature: MA Experiment 108522 PARAMETER Experiment Name: Zm_42deg_Heat_P Parameter: Age (day) Value: 8
  misc_feature: MA Experiment 108522 PARAMETER Experiment Name: Zm_42deg_Heat_P Parameter: Organism Value: Zea mays
  misc_feature: MA Experiment 108522 PARAMETER Experiment Name: Zm_42deg_Heat_P Parameter: Plant Line Value: 35A19
  misc_feature: MA Experiment 108522 PARAMETER Experiment Name: Zm_42deg_Heat_P Parameter: Temperature (deg C) Value: 42 vs. 22
  misc_feature: MA Experiment 108522 PARAMETER Experiment Name: Zm_42deg_Heat_P Parameter: Timepoint (hr) Value: 1
  misc_feature: MA Experiment 108522 PARAMETER Experiment Name: Zm_42deg_Heat_P Parameter: Tissue Value: Aerial
agagtgttcctccggttagtagctgaccggccggcgacgtacgcactgcgctagcaatggcgcctccacggcggccgagcatggggcggcagaaaatcgagatccggcgcatagagagcgacgaggcacggcaggtgtgcttctccaagcggcgcgcggggctgttcaagaaggccagcgagctctccatcctatgcggcgccgacgtggccgccgtcgtcttctcccccgccggcaaggccttctcgttcggccacccctcggtggagtccgtcgtcgaccgcttcctcgcctcgtccaccccctcgcctgccggtgccggtgccggtgccggccactcctccgccggcggcggcgaggaccgcgcggtctccgagctgaaccgccagcacggcgacctgcgcgcgcagctggacgcggagaaggcgaggcaggagcgcgcggacgaggccatccggaaggagcgcgaggccgggagccccgccatggcgtggatcgacgcggacctgggcgccatgggccacgacgacctggtcgcgttctgggccgcgctggccggcgtgcaggccgctgtggccgccagcgccgatcagctgctgcgtgacgcgctgctcgtcgggcgcaggggccgacagcagcagcagccagcggcccagcttggcggtggtggtgtggccttcgacgtcggcgcgtttggcatcggcgtgcaggtgccgccgcctccaggattcgctggcgtcgacctgcaggggttcgggggacaggctgctgccatcctcggcgccggcggcccctcgtgaggtggtggaatggaatgcatgtgcgcgcagttcgcttgagttgttgcattcgcatggaggacgcgtcgtgcctatgttaggtttggttgataacatcgcaaatttgcaaaacagtgttttaaattaaaatttgatgtgtgcttcctgcttctctc

SEQ ID NO: 9974 - protein, 247 aa, Zea mays subsp. mays
  peptide (1)..(247): Ceres Seq. ID no. 12350623
  misc_feature (17)..(67): Pfam Name: SRF-type transcription factor (DNA-binding and Pfam Description: SRF-type transcription factor (DNA-binding and
  misc_feature (1)..(190): Homolog of NCBI NO: 34906076 NR Description: P0459B04.16 [Oryza sativa (japonica
  misc_feature (1)..(146): Homolog of NCBI NO: 30682571 NR Description: MADS-box protein [Arabidopsis thaliana]
  misc_feature (5)..(146): Homolog of NCBI NO: 25412255 NR Description: probable MADS-box protein [imported] -
  misc_feature (6)..(182): Homolog of NCBI NO: 15239333 NR Description: MADS-box protein; protein id: At5g60440.1
  misc_feature (6)..(210): Homolog of NCBI NO: 15234456 NR Description: MADS-box protein; protein id: At4g36590.1,
  misc_feature (6)..(85): Homolog of NCBI NO: 32402436 NR Description: MADS-box protein AGL62 [Arabidopsis thaliana]
  misc_feature (6)..(213): Homolog of NCBI NO: 15218647 NR Description: MADS-box protein; protein id: At1g65360.1
  misc_feature (9)..(133): Homolog of NCBI NO: 15226309 NR Description: MADS-box protein; protein id: At2g34440.1
  misc_feature (9)..(160): Homolog of NCBI NO: 34015383 NR Description: putative transcription factor [Oryza sativa
  misc_feature (6)..(225): Homolog of NCBI NO: 2505875 NR Description: MADS-box protein [Arabidopsis thaliana]
MAPPRRPSMGRQKIEIRRIESDEARQVCFSKRRAGLFKKASELSILCGADVAAVVFSPAGKAFSFGHPSVESVVDRFLASSTPSPAGAGAGAGHSSAGGGEDRAVSELNRQHGDLRAQLDAEKARQERADEAIRKEREAGSPAMAWIDADLGAMGHDDLVAFWAALAGVQAAVAASADQLLRDALLVGRRGRQQQQPAAQLGGGGVAFDVGAFGIGVQVPPPPGFAGVDLQGFGGQAAAILGAGGPS

SEQ ID NO: 9975 - protein, 239 aa, Zea mays subsp. mays
  peptide (1)..(239): Ceres Seq. ID no. 12350624
  misc_feature (9)..(59): Pfam Name: SRF-type transcription factor (DNA-binding and Pfam Description: SRF-type transcription factor (DNA-binding and
  misc_feature (1)..(182): Homolog of NCBI NO: 34906076 NR Description: P0459B04.16 [Oryza sativa (japonica
  misc_feature (1)..(138): Homolog of NCBI NO: 30682571 NR Description: MADS-box protein [Arabidopsis thaliana]
  misc_feature (1)..(138): Homolog of NCBI NO: 25412255 NR Description: probable MADS-box protein [imported] -
  misc_feature (1)..(174): Homolog of NCBI NO: 15239333 NR Description: MADS-box protein; protein id: At5g60440.1
  misc_feature (1)..(202): Homolog of NCBI NO: 15234456 NR Description: MADS-box protein; protein id: At4g36590.1,
  misc_feature (1)..(77): Homolog of NCBI NO: 32402436 NR Description: MADS-box protein AGL62 [Arabidopsis thaliana]
  misc_feature (1)..(205): Homolog of NCBI NO: 15218647 NR Description: MADS-box protein; protein id: At1g65360.1
  misc_feature (1)..(125): Homolog of NCBI NO: 15226309 NR Description: MADS-box protein; protein id: At2g34440.1
  misc_feature (1)..(152): Homolog of NCBI NO: 34015383 NR Description: putative transcription factor [Oryza sativa
  misc_feature (1)..(217): Homolog of NCBI NO: 2505875 NR Description: MADS-box protein [Arabidopsis thaliana]
MGRQKIEIRRIESDEARQVCFSKRRAGLFKKASELSILCGADVAAVVFSPAGKAFSFGHPSVESVVDRFLASSTPSPAGAGAGAGHSSAGGGEDRAVSELNRQHGDLRAQLDAEKARQERADEAIRKEREAGSPAMAWIDADLGAMGHDDLVAFWAALAGVQAAVAASADQLLRDALLVGRRGRQQQQPAAQLGGGGVAFDVGAFGIGVQVPPPPGFAGVDLQGFGGQAAAILGAGGPS

SEQ ID NO: 9976 - protein, 136 aa, Zea mays subsp. mays
  peptide (1)..(136): Ceres Seq. ID no. 12350625
MRRRRGRRRLLPRRQGLLVRPPLGGVRRRPLPRLVHPLACRCRCRCRPLLRRRRRGPRGLRAEPPARRPARAAGRGEGEAGARGRGHPEGARGREPRHGVDRRGPGRHGPRRPGRVLGRAGRRAGRCGRQRRSAAA

SEQ ID NO: 9977 - DNA, 960 bp, Zea mays subsp. mays
  misc_feature (1)..(960): Ceres Seq. ID no. 13493320
  misc_feature: MA Experiment ID: 108527 Result: Down-regulated in Transcription
  misc_feature: MA Experiment 108527 PARAMETER Experiment Name: Zm_5mM_NO_P Parameter: Age (day) Value: 8
  misc_feature: MA Experiment 108527 PARAMETER Experiment Name: Zm_5mM_NO_P Parameter: Organism Value: Zea mays
  misc_feature: MA Experiment 108527 PARAMETER Experiment Name: Zm_5mM_NO_P Parameter: Plant Line Value: 35A19
  misc_feature: MA Experiment 108527 PARAMETER Experiment Name: Zm_5mM_NO_P Parameter: Timepoint (hr) Value: 6
  misc_feature: MA Experiment 108527 PARAMETER Experiment Name: Zm_5mM_NO_P Parameter: Tissue Value: Aerial
  misc_feature: MA Experiment 108527 PARAMETER Experiment Name: Zm_5mM_NO_P Parameter: Treatment Value: 5mM NO vs. No Treatment
  misc_feature: MA Experiment ID: 108528 Result: Up-regulated in Transcription
  misc_feature: MA Experiment 108528 PARAMETER Experiment Name: Zm_Imbibed_Seeds_P Parameter: Age (day) Value: 5 vs. 2
  misc_feature: MA Experiment 108528 PARAMETER Experiment Name: Zm_Imbibed_Seeds_P Parameter: Organism Value: Zea mays
  misc_feature: MA Experiment 108528 PARAMETER Experiment Name: Zm_Imbibed_Seeds_P Parameter: Plant Line Value: 35A19
  misc_feature: MA Experiment 108528 PARAMETER Experiment Name: Zm_Imbibed_Seeds_P Parameter: Tissue Value: Aerial vs. Embryo
  misc_feature: MA Experiment ID: 108529 Result: Down-regulated in Transcription
  misc_feature: MA Experiment 108529 PARAMETER Experiment Name: Zm_Imbibed_Seeds_P Parameter: Age (day) Value: 5 vs. 2
  misc_feature: MA Experiment 108529 PARAMETER Experiment Name: Zm_Imbibed_Seeds_P Parameter: Organism Value: Zea mays
  misc_feature: MA Experiment 108529 PARAMETER Experiment Name: Zm_Imbibed_Seeds_P Parameter: Plant Line Value: 35A19
  misc_feature: MA Experiment 108529 PARAMETER Experiment Name: Zm_Imbibed_Seeds_P Parameter: Tissue Value: Roots vs. Embryo
  misc_feature: MA Experiment ID: 108530 Result: Up-regulated in Transcription
  misc_feature: MA Experiment 108530 PARAMETER Experiment Name: Zm_Imbibed_Seeds_P Parameter: Age (day) Value: 6 vs. 2
  misc_feature: MA Experiment 108530 PARAMETER Experiment Name: Zm_Imbibed_Seeds_P Parameter: Organism Value: Zea mays
  misc_feature: MA Experiment 108530 PARAMETER Experiment Name: Zm_Imbibed_Seeds_P Parameter: Plant Line Value: 35A19
  misc_feature: MA Experiment 108530 PARAMETER Experiment Name: Zm_Imbibed_Seeds_P Parameter: Tissue Value: Aerial vs. Embryo
  misc_feature: MA Experiment ID: 108536 Result: Down-regulated in Transcription
  misc_feature: MA Experiment 108536 PARAMETER Experiment Name: Zm_Meristem_P Parameter: Age (day) Value: 8
  misc_feature: MA Experiment 108536 PARAMETER Experiment Name: Zm_Meristem_P Parameter: Organism Value: Zea mays
  misc_feature: MA Experiment 108536 PARAMETER Experiment Name: Zm_Meristem_P Parameter: Plant Line Value: 35A19
  misc_feature: MA Experiment 108536 PARAMETER Experiment Name: Zm_Meristem_P Parameter: Tissue Value: Shoot Meristem vs. Above Shoot Meristem
  misc_feature: MA Experiment ID: 108545 Result: Up-regulated in Transcription
  misc_feature: MA Experiment 108545 PARAMETER Experiment Name: Zm_Imbibed_Seeds_P Parameter: Age (day) Value: 3 vs. 2
  misc_feature: MA Experiment 108545 PARAMETER Experiment Name: Zm_Imbibed_Seeds_P Parameter: Organism Value: Zea mays
  misc_feature: MA Experiment 108545 PARAMETER Experiment Name: Zm_Imbibed_Seeds_P Parameter: Plant Line Value: 35A19
  misc_feature: MA Experiment 108545 PARAMETER Experiment Name: Zm_Imbibed_Seeds_P Parameter: Tissue Value: Aerial vs. Embryo
  misc_feature: MA Experiment ID: 108546 Result: Down-regulated in Transcription
  misc_feature: MA Experiment 108546 PARAMETER Experiment Name: Zm_Imbibed_Seeds_P Parameter: Age (day) Value: 3 vs. 2
  misc_feature: MA Experiment 108546 PARAMETER Experiment Name: Zm_Imbibed_Seeds_P Parameter: Organism Value: Zea mays
  misc_feature: MA Experiment 108546 PARAMETER Experiment Name: Zm_Imbibed_Seeds_P Parameter: Plant Line Value: 35A19
  misc_feature: MA Experiment 108546 PARAMETER Experiment Name: Zm_Imbibed_Seeds_P Parameter: Tissue Value: Roots vs. Embryo
  misc_feature: MA Experiment ID: 108547 Result: Up-regulated in Transcription
  misc_feature: MA Experiment 108547 PARAMETER Experiment Name: Zm_Imbibed_Seeds_P Parameter: Age (day) Value: 4 vs. 2
  misc_feature: MA Experiment 108547 PARAMETER Experiment Name: Zm_Imbibed_Seeds_P Parameter: Organism Value: Zea mays
  misc_feature: MA Experiment 108547 PARAMETER Experiment Name: Zm_Imbibed_Seeds_P Parameter: Plant Line Value: 35A19
  misc_feature: MA Experiment 108547 PARAMETER Experiment Name: Zm_Imbibed_Seeds_P Parameter: Tissue Value: Aerial vs. Embryo
  misc_feature: MA Experiment ID: 108559 Result: Down-regulated in Transcription
  misc_feature: MA Experiment 108559 PARAMETER Experiment Name: Zm_5mM_NO_P Parameter: Age (day) Value: 8
  misc_feature: MA Experiment 108559 PARAMETER Experiment Name: Zm_5mM_NO_P Parameter: Organism Value: Zea mays
  misc_feature: MA Experiment 108559 PARAMETER Experiment Name: Zm_5mM_NO_P Parameter: Plant Line Value: 35A19
  misc_feature: MA Experiment 108559 PARAMETER Experiment Name: Zm_5mM_NO_P Parameter: Timepoint (hr) Value: 12
  misc_feature: MA Experiment 108559 PARAMETER Experiment Name: Zm_5mM_NO_P Parameter: Tissue Value: Aerial
  misc_feature: MA Experiment 108559 PARAMETER Experiment Name: Zm_5mM_NO_P Parameter: Treatment Value: 5mM NO vs. No Treatment
  misc_feature: MA Experiment ID: 108687 Result: Down-regulated in Transcription
  misc_feature: MA Experiment 108687 PARAMETER Experiment Name: Zm_Embryos-Flowers__P Parameter: Tissue Value: Embryo vs. Aerial+
  misc_feature: MA Experiment ID: 20000535 Result: Down-regulated in Transcription
  misc_feature: MA Experiment 20000535 PARAMETER Experiment Name: Zm_Hybrid_Seed_Dev_P Parameter: DAP Value: 30 vs. 12
  misc_feature: MA Experiment 20000535 PARAMETER Experiment Name: Zm_Hybrid_Seed_Dev_P Parameter: Organism Value: Zea mays
  misc_feature: MA Experiment 20000535 PARAMETER Experiment Name: Zm_Hybrid_Seed_Dev_P Parameter: Plant Line Value: 35A19
  misc_feature: MA Experiment 20000535 PARAMETER Experiment Name: Zm_Hybrid_Seed_Dev_P Parameter: Tissue Value: Embryo vs. Unfert Floret
aaaacaaaatgctgtggccgagcgaatgagaggaagatggctgctaccagcctcagctcctcgttgcccagggccactgcaaaactaacaggagtgccaagatcttcgtcgtactacacccagctgatcttttgctcgaggcatcctttccagaaggcggcggcagctgcagctttccagaagctcccacccgagctcctccggctaagctacccggcgaggaataataagcatgcaagaaccagctggcggcgggccacggacaacgaccaagcggcgccggccgcggcacaaggaactaccagcacccctcctctcccaggctctcccgttccgagcgccgagagatccccggtgacgcccggcaacggccagccgcagcagccggtcgccgacgccaacggcagcgcgccgagcgagccgccgaagcgggcgccgctgacggcgcgggagcggctgcgggcggcgcgcgtgctggggaagtacgcagagccgtcggtgaaagggtcttcgtcgaaaccggccaaaccggagttcgggagcggtgtgctggacgcgctgcgcgaggcggacgcgaagaaggccgggggcgggggcgggggcgggcggcgtgggtcgcgcctacccgaggcgccgggcaacctgttcgacgacagcaagcgcgggatgcccaaggacgggtggacgttcgagctgccgttcggggtggacgtcttcctcgtcctcgtctccttcacgctcatcaccaccatcatgttcggcaccgccttcctcgtgtggaagctcggcgccatacacttcaacgagtactagcctttagactgtctctacttgattggaggataaagggcgattatgcagtgctagacgagagaattgtgtgtattcgtaatgtactgtattgaccacagacactggtctgccgaagattttcgagaaaacatagaaatgtgtgattgc

SEQ ID NO: 9978 - protein, 270 aa, Zea mays subsp. mays
  peptide (1)..(270): Ceres Seq. ID no. 13493321
  misc_feature (128)..(269): Homolog of NCBI NO: 15228794 NR Description: expressed protein [Arabidopsis thaliana]
KTKCCGRANERKMAATSLSSSLPRATAKLTGVPRSSSYYTQLIFCSRHPFQKAAAAAAFQKLPPELLRLSYPARNNKHARTSWRRATDNDQAAPAAAQGTTSTPPLPGSPVPSAERSPVTPGNGQPQQPVADANGSAPSEPPKRAPLTARERLRAARVLGKYAEPSVKGSSSKPAKPEFGSGVLDALREADAKKAGGGGGGGRRGSRLPEAPGNLFDDSKRGMPKDGWTFELPFGVDVFLVLVSFTLITTIMFGTAFLVWKLGAIHFNEY

SEQ ID NO: 9979 - protein, 258 aa, Zea mays subsp. mays
  peptide (1)..(258): Ceres Seq. ID no. 13493322
  misc_feature (116)..(257): Homolog of NCBI NO: 15228794 NR Description: expressed protein [Arabidopsis thaliana]
MAATSLSSSLPRATAKLTGVPRSSSYYTQLIFCSRHPFQKAAAAAAFQKLPPELLRLSYPARNNKHARTSWRRATDNDQAAPAAAQGTTSTPPLPGSPVPSAERSPVTPGNGQPQQPVADANGSAPSEPPKRAPLTARERLRAARVLGKYAEPSVKGSSSKPAKPEFGSGVLDALREADAKKAGGGGGGGRRGSRLPEAPGNLFDDSKRGMPKDGWTFELPFGVDVFLVLVSFTLITTIMFGTAFLVWKLGAIHFNEY

SEQ ID NO: 9980 - DNA, 989 bp, Zea mays subsp. mays
  misc_feature (1)..(989): Ceres Seq. ID no. 14312601
  misc_feature: MA Experiment ID: 108522 Result: Up-regulated in Transcription
  misc_feature: MA Experiment 108522 PARAMETER Experiment Name: Zm_42deg_Heat_P Parameter: Age (day) Value: 8
  misc_feature: MA Experiment 108522 PARAMETER Experiment Name: Zm_42deg_Heat_P Parameter: Organism Value: Zea mays
  misc_feature: MA Experiment 108522 PARAMETER Experiment Name: Zm_42deg_Heat_P Parameter: Plant Line Value: 35A19
  misc_feature: MA Experiment 108522 PARAMETER Experiment Name: Zm_42deg_Heat_P Parameter: Temperature (deg C) Value: 42 vs. 22
  misc_feature: MA Experiment 108522 PARAMETER Experiment Name: Zm_42deg_Heat_P Parameter: Timepoint (hr) Value: 1
  misc_feature: MA Experiment 108522 PARAMETER Experiment Name: Zm_42deg_Heat_P Parameter: Tissue Value: Aerial
  misc_feature: MA Experiment ID: 108536 Result: Up-regulated in Transcription
  misc_feature: MA Experiment 108536 PARAMETER Experiment Name: Zm_Meristem_P Parameter: Age (day) Value: 8
  misc_feature: MA Experiment 108536 PARAMETER Experiment Name: Zm_Meristem_P Parameter: Organism Value: Zea mays
  misc_feature: MA Experiment 108536 PARAMETER Experiment Name: Zm_Meristem_P Parameter: Plant Line Value: 35A19
  misc_feature: MA Experiment 108536 PARAMETER Experiment Name: Zm_Meristem_P Parameter: Tissue Value: Shoot Meristem vs. Above Shoot Meristem
  misc_feature: MA Experiment ID: 20000629 Result: Up-regulated in Transcription
  misc_feature: MA Experiment 20000629 PARAMETER Experiment Name: Zm_Herbicide-Treatments_P Parameter: Timepoint (hr) Value: 12
  misc_feature: MA Experiment 20000629 PARAMETER Experiment Name: Zm_Herbicide-Treatments_P Parameter: Tissue Value: Aerial
  misc_feature: MA Experiment 20000629 PARAMETER Experiment Name: Zm_Herbicide-Treatments_P Parameter: Treatment Value: Trimec vs. No Treatment
  misc_feature: MA Experiment ID: 20001613 Result: Down-regulated in Transcription
  misc_feature: MA Experiment 20001613 PARAMETER Experiment Name: Zm_50ppm_KNO3_L-to-H_P Parameter: Age (day) Value: 20
  misc_feature: MA Experiment 20001613 PARAMETER Experiment Name: Zm_50ppm_KNO3_L-to-H_P Parameter: Organism Value: Zea mays
  misc_feature: MA Experiment 20001613 PARAMETER Experiment Name: Zm_50ppm_KNO3_L-to-H_P Parameter: Plant Line Value: 35A19
  misc_feature: MA Experiment 20001613 PARAMETER Experiment Name: Zm_50ppm_KNO3_L-to-H_P Parameter: Timepoint (hr) Value: 24
  misc_feature: MA Experiment 20001613 PARAMETER Experiment Name: Zm_50ppm_KNO3_L-to-H_P Parameter: Tissue Value: Roots
  misc_feature: MA Experiment 20001613 PARAMETER Experiment Name: Zm_50ppm_KNO3_L-to-H_P Parameter: Treatment Value: 50ppm KNO3 vs. 50ppm KCl
acgagtacgagctcgtcgtcaccacctactcaggtctgtaccgctaccgcgtgggcgacgtgctgcgcgtggccgggttcaagaaccaggcgcccatgttcaagttcctgcggcggaagaacgtggtgctgagcatcgactccgacaagaccgacgaggcggagcttcacgcggcggtgagcggcgcggtgcagcacctggcgccgttcggcgcgtcgctggtggagtacacgagctacgcggacgcggggaccatcccgggccactacgtgctgttctgggagctgcggctccgcgcgggggacgtgccggtgccggtgccggcgtcggtgttcgaggactgctgcctggccgtggaggaggccctgaacagcgtgtaccggcagggccgcgccgccgaccgctccatcgggccgctggagatccgggtggtgtcggacggcacgttcgacaggctcatggactacgcgctcgcccgcggcgcctccatcaaccagtacaaggtgccgcggtgcgtgcacccgggccccgtggtggagctgctggacgggcgggtgcaggccagctacgtgagccccaagtgccccaagtggagccccggcggcggtaagcagtggagcagcgacgccgccgccaagaagcccgccgccgccgccggcagcaataatggaggaggggcggtcgtcgcctgatcgtcgtccgtcgagatatactagtgaactttaattaattagctggctaattccggaaccgtcgttgttgttcgtgggagagagagactcgatcttgtggtcgatcgattgtgatagctgatctatccgtgtgcatgtatgcatgcatggctacgatcgaatgattatctagctgggtaatcatcgggtgtgtggtagcttattaagtattgtacgcgtcgtgatatcatgtgagctagcttttgtttctttttattttcttttatgtggttttgtaataaagtttgagtacgtagt

SEQ ID NO: 9981 - protein, 229 aa, Zea mays subsp. mays
  peptide (1)..(229): Ceres Seq. ID no. 14312602
  misc_feature (1)..(180): Pfam Name: GH3 auxin-responsive promoter Pfam Description: GH3 auxin-responsive promoter
  misc_feature (1)..(215): Homolog of NCBI NO: 34910142 NR Description: putative auxin-responsive GH3 [Oryza sativa
  misc_feature (1)..(208): Homolog of NCBI NO: 15239653 NR Description: auxin-responsive-related protein [Arabidopsis
  misc_feature (1)..(208): Homolog of NCBI NO: 17978966 NR Description: AT5g54510/F24B18_13 [Arabidopsis thaliana]
  misc_feature (1)..(208): Homolog of NCBI NO: 15237038 NR Description: GH3 like protein [Arabidopsis thaliana]
  misc_feature (1)..(199): Homolog of NCBI NO: 34909816 NR Description: putative auxin-responsive GH3 protein [Oryza
  misc_feature (1)..(199): Homolog of NCBI NO: 4887010 NR Description: Nt-gh3 deduced protein [Nicotiana tabacum]
  misc_feature (1)..(199): Homolog of NCBI NO: 15235538 NR Description: auxin-responsive GH3 - like protein [Arabidopsis
  misc_feature (1)..(199): Homolog of NCBI NO: 25345303 NR Description: GH3 homolog [imported] - Arabidopsis thaliana
  misc_feature (1)..(199): Homolog of NCBI NO: 15227787 NR Description: expressed protein [Arabidopsis thaliana]
  misc_feature (1)..(199): Homolog of NCBI NO: 15218026 NR Description: auxin-regulated protein GH3 -related [Arabidopsis >gi|8778768|gb|AAF79776.1|AC009317_35 T30E16.2 [Arabidopsis
EYELVVTTYSGLYRYRVGDVLRVAGFKNQAPMFKFLRRKNVVLSIDSDKTDEAELHAAVSGAVQHLAPFGASLVEYTSYADAGTIPGHYVLFWELRLRAGDVPVPVPASVFEDCCLAVEEALNSVYRQGRAADRSIGPLEIRVVSDGTFDRLMDYALARGASINQYKVPRCVHPGPVVELLDGRVQASYVSPKCPKWSPGGGKQWSSDAAAKKPAAAAGSNNGGGAVVA

SEQ ID NO: 9982 - protein, 202 aa, Zea mays subsp. mays
  peptide (1)..(202): Ceres Seq. ID no. 14312603
RVRARRHHLLRSVPLPRGRRAARGRVQEPGAHVQVPAAEERGAEHRLRQDRRGGASRGGERRGAAPGAVRRVAGGVHELRGRGDHPGPLRAVLGAAAPRGGRAGAGAGVGVRGLLPGRGGGPEQRVPAGPRRRPLHRAAGDPGGVGRHVRQAHGLRARPRRLHQPVQGAAVRAPGPRGGAAGRAGAGQLREPQVPQVEPRRR

SEQ ID NO: 9983 - protein, 198 aa, Zea mays subsp. mays
  peptide (1)..(198): Ceres Seq. ID no. 14312604
  misc_feature (1)..(149): Pfam Name: GH3 auxin-responsive promoter Pfam Description: GH3 auxin-responsive promoter
  misc_feature (1)..(184): Homolog of NCBI NO: 34910142 NR Description: putative auxin-responsive GH3 [Oryza sativa
  misc_feature (1)..(177): Homolog of NCBI NO: 15239653 NR Description: auxin-responsive-related protein [Arabidopsis
  misc_feature (1)..(177): Homolog of NCBI NO: 17978966 NR Description: AT5g54510/F24B18_13 [Arabidopsis thaliana]
  misc_feature (1)..(177): Homolog of NCBI NO: 15237038 NR Description: GH3 like protein [Arabidopsis thaliana]
  misc_feature (1)..(168): Homolog of NCBI NO: 34909816 NR Description: putative auxin-responsive GH3 protein [Oryza
  misc_feature (1)..(168): Homolog of NCBI NO: 4887010 NR Description: Nt-gh3 deduced protein [Nicotiana tabacum]
  misc_feature (1)..(168): Homolog of NCBI NO: 15235538 NR Description: auxin-responsive GH3 - like protein [Arabidopsis
  misc_feature (1)..(168): Homolog of NCBI NO: 25345303 NR Description: GH3 homolog [imported] - Arabidopsis thaliana
  misc_feature (1)..(168): Homolog of NCBI NO: 15227787 NR Description: expressed protein [Arabidopsis thaliana]
  misc_feature (1)..(168): Homolog of NCBI NO: 15218026 NR Description: auxin-regulated protein GH3 -related [Arabidopsis >gi|8778768|gb|AAF79776.1|AC009317_35 T30E16.2 [Arabidopsis
MFKFLRRKNVVLSIDSDKTDEAELHAAVSGAVQHLAPFGASLVEYTSYADAGTIPGHYVLFWELRLRAGDVPVPVPASVFEDCCLAVEEALNSVYRQGRAADRSIGPLEIRVVSDGTFDRLMDYALARGASINQYKVPRCVHPGPVVELLDGRVQASYVSPKCPKWSPGGGKQWSSDAAAKKPAAAAGSNNGGGAVVA

SEQ ID NO: 9984 - DNA, 484 bp, Zea mays subsp. mays
  misc_feature (1)..(484): Ceres Seq. ID no. 1552760
  misc_feature: MA Experiment ID: 20000487 Result: Up-regulated in Transcription
  misc_feature: MA Experiment 20000487 PARAMETER Experiment Name: Zm_50mM_NH4NO3_L_to_H_P Parameter: Organism Value: Zea mays
  misc_feature: MA Experiment 20000487 PARAMETER Experiment Name: Zm_50mM_NH4NO3_L_to_H_P Parameter: Timepoint (hr) Value: 4
  misc_feature: MA Experiment 20000487 PARAMETER Experiment Name: Zm_50mM_NH4NO3_L_to_H_P Parameter: Tissue Value: Leaves
  misc_feature: MA Experiment 20000487 PARAMETER Experiment Name: Zm_50mM_NH4NO3_L_to_H_P Parameter: Treatment Value: 50mM NH4NO3 vs. 100mM Mannitol
  misc_feature: MA Experiment ID: 20000492 Result: Up-regulated in Transcription
  misc_feature: MA Experiment 20000492 PARAMETER Experiment Name: Zm_Hybrid_Seed_Dev_P Parameter: DAP Value: 12
  misc_feature: MA Experiment 20000492 PARAMETER Experiment Name: Zm_Hybrid_Seed_Dev_P Parameter: Organism Value: Zea mays
  misc_feature: MA Experiment 20000492 PARAMETER Experiment Name: Zm_Hybrid_Seed_Dev_P Parameter: Plant Line Value: 35A19
  misc_feature: MA Experiment 20000492 PARAMETER Experiment Name: Zm_Hybrid_Seed_Dev_P Parameter: Tissue Value: Fert Kernel vs. Unfert Floret
  misc_feature: MA Experiment ID: 20000534 Result: Down-regulated in Transcription
  misc_feature: MA Experiment 20000534 PARAMETER Experiment Name: Zm_Hybrid_Pollen_P Parameter: Age (day) Value: 8
  misc_feature: MA Experiment 20000534 PARAMETER Experiment Name: Zm_Hybrid_Pollen_P Parameter: Organism Value: Zea mays
  misc_feature: MA Experiment 20000534 PARAMETER Experiment Name: Zm_Hybrid_Pollen_P Parameter: Plant Line Value: 35A19
  misc_feature: MA Experiment 20000534 PARAMETER Experiment Name: Zm_Hybrid_Pollen_P Parameter: Tissue Value: Pollen vs. Aerial
aatcttctccgtactcatacaactgctgtttccacgagaatgttatacaagcttgctcaggagaaaccttttactccaaagaggtattactccattgatcgtgttttccgcaatgaagctgttgaccggactcatcttgctgaattccaccagatagagggacttatctgtgattatggtttgacacttggtgatctgattggtgtattggaggatttcttctcaagtctaggcatgtccaagctgcgtttcaagcctgcctacaatccatatactgaacccagcatggaaattttcagttaccatgatggtttgaagaaatgggtggaagttggtaattcaggcatgttcaggccagagatgttgcttcccatgggactgccagaaggtgttaatgttattgcatggggtctttcacttgaaaggccaacgatgatcctttatggtatcgacaacataagggacctgtttggaccaaaggttg

SEQ ID NO: 9985 - protein, 161 aa, Zea mays subsp. mays
  peptide (1)..(161): Ceres Seq. ID no. 1552761
  misc_feature (1)..(160): Homolog of NCBI NO: 34851429 NR Description: similar to 0610012A19Rik protein [Rattus
  misc_feature (1)..(160): Homolog of NCBI NO: 26327551 NR Description: unnamed protein product [Mus musculus]
  misc_feature (1)..(160): Homolog of NCBI NO: 7804452 NR Description: phenylalanyl tRNA synthetase beta subunit [Homo
  misc_feature (1)..(160): Homolog of NCBI NO: 4758340 NR Description: phenylalanine-tRNA synthetase-like protein [Homo
  misc_feature (1)..(160): Homolog of NCBI NO: 11271775 NR Description: probable phenylalanine-tRNA ligase (EC 6.1.1.20)
  misc_feature (1)..(160): Homolog of NCBI NO: 28175596 NR Description: similar to phenylalanine-tRNA synthetase-like
  misc_feature (1)..(160): Homolog of NCBI NO: 7437805 NR Description: phenylalanine-tRNA ligase (EC 6.1.1.20) beta
  misc_feature (1)..(160): Homolog of NCBI NO: 22329256 NR Description: phenylalanyl-trna synthetase - like protein; id: At4g39280.1, supported by cDNA: gi_20453178 [Arabidopsis >gi|20453179|gb|AAM19830.1| AT4g39280/T22F8_180 [Arabidopsis
  misc_feature (70)..(160): Homolog of NCBI NO: 37534124 NR Description: putative phenylalanyl-tRNA synthetase alpha chain
  misc_feature (1)..(55): Homolog of NCBI NO: 37534124 NR Description: putative phenylalanyl-tRNA synthetase alpha chain
NLLRTHTTAVSTRMLYKLAQEKPFTPKRYYSIDRVFRNEAVDRTHLAEFHQIEGLICDYGLTLGDLIGVLEDFFSSLGMSKLRFKPAYNPYTEPSMEIFSYHDGLKKWVEVGNSGMFRPEMLLPMGLPEGVNVIAWGLSLERPTMILYGIDNIRDLFGPKV

SEQ ID NO: 9986 - protein, 148 aa, Zea mays subsp. mays
  peptide (1)..(148): Ceres Seq. ID no. 1552762
  misc_feature (1)..(147): Homolog of NCBI NO: 7437805 NR Description: phenylalanine-tRNA ligase (EC 6.1.1.20) beta
  misc_feature (1)..(147): Homolog of NCBI NO: 22329256 NR Description: phenylalanyl-trna synthetase - like protein; id: At4g39280.1, supported by cDNA: gi_20453178 [Arabidopsis >gi|20453179|gb|AAM19830.1| AT4g39280/T22F8_180 [Arabidopsis
  misc_feature (57)..(147): Homolog of NCBI NO: 37534124 NR Description: putative phenylalanyl-tRNA synthetase alpha chain
  misc_feature (1)..(42): Homolog of NCBI NO: 37534124 NR Description: putative phenylalanyl-tRNA synthetase alpha chain
  misc_feature (1)..(147): Homolog of NCBI NO: 34851429 NR Description: similar to 0610012A19Rik protein [Rattus
  misc_feature (1)..(147): Homolog of NCBI NO: 26327551 NR Description: unnamed protein product [Mus musculus]
  misc_feature (1)..(147): Homolog of NCBI NO: 7804452 NR Description: phenylalanyl tRNA synthetase beta subunit [Homo
  misc_feature (1)..(147): Homolog of NCBI NO: 4758340 NR Description: phenylalanine-tRNA synthetase-like protein [Homo
  misc_feature (1)..(147): Homolog of NCBI NO: 11271775 NR Description: probable phenylalanine-tRNA ligase (EC 6.1.1.20)
  misc_feature (1)..(147): Homolog of NCBI NO: 28175596 NR Description: similar to phenylalanine-tRNA synthetase-like
MLYKLAQEKPFTPKRYYSIDRVFRNEAVDRTHLAEFHQIEGLICDYGLTLGDLIGVLEDFFSSLGMSKLRFKPAYNPYTEPSMEIFSYHDGLKKWVEVGNSGMFRPEMLLPMGLPEGVNVIAWGLSLERPTMILYGIDNIRDLFGPKV

SEQ ID NO: 9987 - protein, 83 aa, Zea mays subsp. mays
  peptide (1)..(83): Ceres Seq. ID no. 1552763
  misc_feature (1)..(82): Homolog of NCBI NO: 7437805 NR Description: phenylalanine-tRNA ligase (EC 6.1.1.20) beta
  misc_feature (1)..(82): Homolog of NCBI NO: 22329256 NR Description: phenylalanyl-trna synthetase - like protein; id: At4g39280.1, supported by cDNA: gi_20453178 [Arabidopsis >gi|20453179|gb|AAM19830.1| AT4g39280/T22F8_180 [Arabidopsis
  misc_feature (1)..(82): Homolog of NCBI NO: 37534124 NR Description: putative phenylalanyl-tRNA synthetase alpha chain
  misc_feature (1)..(82): Homolog of NCBI NO: 34851429 NR Description: similar to 0610012A19Rik protein [Rattus
  misc_feature (1)..(82): Homolog of NCBI NO: 26327551 NR Description: unnamed protein product [Mus musculus]
  misc_feature (1)..(82): Homolog of NCBI NO: 7804452 NR Description: phenylalanyl tRNA synthetase beta subunit [Homo
  misc_feature (1)..(82): Homolog of NCBI NO: 4758340 NR Description: phenylalanine-tRNA synthetase-like protein [Homo
  misc_feature (1)..(82): Homolog of NCBI NO: 28175596 NR Description: similar to phenylalanine-tRNA synthetase-like
  misc_feature (1)..(82): Homolog of NCBI NO: 11271775 NR Description: probable phenylalanine-tRNA ligase (EC 6.1.1.20)
  misc_feature (1)..(82): Homolog of NCBI NO: 30585361 NR Description: Homo sapiens phenylalanine-tRNA synthetase-like
MSKLRFKPAYNPYTEPSMEIFSYHDGLKKWVEVGNSGMFRPEMLLPMGLPEGVNVIAWGLSLERPTMILYGIDNIRDLFGPKV

SEQ ID NO: 9988 - DNA, 884 bp, Zea mays subsp. mays
  misc_feature (1)..(884): Ceres Seq. ID no. 12360748
  misc_feature: MA Experiment ID: 108522 Result: Up-regulated in Transcription
  misc_feature: MA Experiment 108522 PARAMETER Experiment Name: Zm_42deg_Heat_P Parameter: Age (day) Value: 8
  misc_feature: MA Experiment 108522 PARAMETER Experiment Name: Zm_42deg_Heat_P Parameter: Organism Value: Zea mays
  misc_feature: MA Experiment 108522 PARAMETER Experiment Name: Zm_42deg_Heat_P Parameter: Plant Line Value: 35A19
  misc_feature: MA Experiment 108522 PARAMETER Experiment Name: Zm_42deg_Heat_P Parameter: Temperature (deg C) Value: 42 vs. 22
  misc_feature: MA Experiment 108522 PARAMETER Experiment Name: Zm_42deg_Heat_P Parameter: Timepoint (hr) Value: 1
  misc_feature: MA Experiment 108522 PARAMETER Experiment Name: Zm_42deg_Heat_P Parameter: Tissue Value: Aerial
  misc_feature: MA Experiment ID: 108523 Result: Up-regulated in Transcription
  misc_feature: MA Experiment 108523 PARAMETER Experiment Name: Zm_42deg_Heat_P Parameter: Age (day) Value: 8
  misc_feature: MA Experiment 108523 PARAMETER Experiment Name: Zm_42deg_Heat_P Parameter: Organism Value: Zea mays
  misc_feature: MA Experiment 108523 PARAMETER Experiment Name: Zm_42deg_Heat_P Parameter: Plant Line Value: 35A19
  misc_feature: MA Experiment 108523 PARAMETER Experiment Name: Zm_42deg_Heat_P Parameter: Temperature (deg C) Value: 42 vs. 22
  misc_feature: MA Experiment 108523 PARAMETER Experiment Name: Zm_42deg_Heat_P Parameter: Timepoint (hr) Value: 6
  misc_feature: MA Experiment 108523 PARAMETER Experiment Name: Zm_42deg_Heat_P Parameter: Tissue Value: Aerial
cacaggagaatatacgacaatcggcctagtatgaattgttctgacgagagcaaaggacctccatgtacagggtgggtagagggcatggcaccagttttttctcgcactgcttggaaatgtgtatggcatctaattcagaatgatcttattcatggatggggtcttgacatgaagcttggatattgcgctcagggtgatcgaacagagaaagttggtgttattgacagtgagtatgtagttcatcaagggataccatcattaggagggccatcacttagcagcaagacacctcgaagatcattggatttgaggacccacatacgaagacaatcatcggctgagctggagaagttcaaggagaggtggaacagggctgtaagggaagatgaaggatggagggatccttttgattcttgattacttggaaagcagagtgtgacacttcataacaaaactggccagtggccacagtcacagcagtagagtttggaagcggagagcatcttctgcttcatgtcaaaaacacttgtttggttataggatgacgagacggttggttggttataggatgatgacttacatacacacacacacatcataactttatccacatgagttaaaagcgggaacattatcgtcaatacaaggagctgatggagaagttgaaactaacaaagtaacagggggtttccgaaagtgctgtaattttccgttggaaatatctgttcgggagagttgtatagtgtcatgatatacacacttgtgcagttatttgatgaggaaacttacatagcctagagcagatgtgtttcctatattattattgccttgtacaatgtaagatgaattccatgagtcagaaatagcatcaggtctctatgctt

SEQ ID NO: 9989 - protein, 138 aa, Zea mays subsp. mays
  peptide (1)..(138): Ceres Seq. ID no. 12360749
  misc_feature (1)..(132): Pfam Name: Protein of unknown function (DUF707) Pfam Description: Protein of unknown function (DUF707)
  misc_feature (1)..(132): Homolog of NCBI NO: 15219892 NR Description: hypothetical protein; protein id: At1g61240.1 thaliana] >gi|26449863|dbj|BAC42054.1| unknown protein
  misc_feature (1)..(132): Homolog of NCBI NO: 24636978 NR Description: lysine ketoglutarate reductase trans-splicing
  misc_feature (1)..(138): Homolog of NCBI NO: 25402652 NR Description: hypothetical protein [imported] - Arabidopsis >gi|5734733|gb|AAD49998.1|AC007259_11 Hypothetical protein
  misc_feature (1)..(138): Homolog of NCBI NO: 22329488 NR Description: hypothetical protein; protein id: At1g11170.1, by cDNA: gi_18700104 [Arabidopsis thaliana] At1g11170/T28P6_16 [Arabidopsis thaliana]
  misc_feature (1)..(136): Homolog of NCBI NO: 34903420 NR Description: hypothetical protein~similar to Oryza sativa
  misc_feature (1)..(136): Homolog of NCBI NO: 15233917 NR Description: putative protein; protein id: At4g18530.1
  misc_feature (1)..(136): Homolog of NCBI NO: 19386727 NR Description: P0678F11.16 [Oryza sativa (japonica
  misc_feature (1)..(129): Homolog of NCBI NO: 33146749 NR Description: putative lysine ketoglutarate reductase
  misc_feature (25)..(129): Homolog of NCBI NO: 34899756 NR Description: OJ1773_H01.1 [Oryza sativa (japonica
  misc_feature (25)..(119): Homolog of NCBI NO: 15235499 NR Description: putative protein; protein id: At4g12840.1
HRRIYDNRPSMNCSDESKGPPCTGWVEGMAPVFSRTAWKCVWHLIQNDLIHGWGLDMKLGYCAQGDRTEKVGVIDSEYVVHQGIPSLGGPSLSSKTPRRSLDLRTHIRRQSSAELEKFKERWNRAVREDEGWRDPFDS

SEQ ID NO: 9990 - protein, 128 aa, Zea mays subsp. mays
  peptide (1)..(128): Ceres Seq. ID no. 12360750
  misc_feature (1)..(122): Pfam Name: Protein of unknown function (DUF707) Pfam Description: Protein of unknown function (DUF707)
  misc_feature (1)..(122): Homolog of NCBI NO: 15219892 NR Description: hypothetical protein; protein id: At1g61240.1 thaliana] >gi|26449863|dbj|BAC42054.1| unknown protein
  misc_feature (1)..(122): Homolog of NCBI NO: 24636978 NR Description: lysine ketoglutarate reductase trans-splicing
  misc_feature (1)..(128): Homolog of NCBI NO: 25402652 NR Description: hypothetical protein [imported] - Arabidopsis >gi|5734733|gb|AAD49998.1|AC007259_11 Hypothetical protein
  misc_feature (1)..(128): Homolog of NCBI NO: 22329488 NR Description: hypothetical protein; protein id: At1g11170.1, by cDNA: gi_18700104 [Arabidopsis thaliana] At1g11170/T28P6_16 [Arabidopsis thaliana]
  misc_feature (1)..(126): Homolog of NCBI NO: 34903420 NR Description: hypothetical protein~similar to Oryza sativa
  misc_feature (1)..(126): Homolog of NCBI NO: 15233917 NR Description: putative protein; protein id: At4g18530.1
  misc_feature (1)..(126): Homolog of NCBI NO: 19386727 NR Description: P0678F11.16 [Oryza sativa (japonica
  misc_feature (1)..(119): Homolog of NCBI NO: 33146749 NR Description: putative lysine ketoglutarate reductase
  misc_feature (15)..(119): Homolog of NCBI NO: 34899756 NR Description: OJ1773_H01.1 [Oryza sativa (japonica
  misc_feature (15)..(109): Homolog of NCBI NO: 15235499 NR Description: putative protein; protein id: At4g12840.1
MNCSDESKGPPCTGWVEGMAPVFSRTAWKCVWHLIQNDLIHGWGLDMKLGYCAQGDRTEKVGVIDSEYVVHQGIPSLGGPSLSSKTPRRSLDLRTHIRRQSSAELEKFKERWNRAVREDEGWRDPFDS

SEQ ID NO: 9991 - protein, 110 aa, Zea mays subsp. mays
  peptide (1)..(110): Ceres Seq. ID no. 12360751
  misc_feature (1)..(104): Pfam Name: Protein of unknown function (DUF707) Pfam Description: Protein of unknown function (DUF707)
  misc_feature (1)..(104): Homolog of NCBI NO: 15219892 NR Description: hypothetical protein; protein id: At1g61240.1 thaliana] >gi|26449863|dbj|BAC42054.1| unknown protein
  misc_feature (1)..(104): Homolog of NCBI NO: 24636978 NR Description: lysine ketoglutarate reductase trans-splicing
  misc_feature (1)..(110): Homolog of NCBI NO: 25402652 NR Description: hypothetical protein [imported] - Arabidopsis >gi|5734733|gb|AAD49998.1|AC007259_11 Hypothetical protein
  misc_feature (1)..(110): Homolog of NCBI NO: 22329488 NR Description: hypothetical protein; protein id: At1g11170.1, by cDNA: gi_18700104 [Arabidopsis thaliana] At1g11170/T28P6_16 [Arabidopsis thaliana]
  misc_feature (1)..(108): Homolog of NCBI NO: 34903420 NR Description: hypothetical protein~similar to Oryza sativa
  misc_feature (1)..(108): Homolog of NCBI NO: 15233917 NR Description: putative protein; protein id: At4g18530.1
  misc_feature (1)..(108): Homolog of NCBI NO: 19386727 NR Description: P0678F11.16 [Oryza sativa (japonica
  misc_feature (1)..(101): Homolog of NCBI NO: 33146749 NR Description: putative lysine ketoglutarate reductase
  misc_feature (1)..(101): Homolog of NCBI NO: 34899756 NR Description: OJ1773_H01.1 [Oryza sativa (japonica
  misc_feature (1)..(91): Homolog of NCBI NO: 15235499 NR Description: putative protein; protein id: At4g12840.1
MAPVFSRTAWKCVWHLIQNDLIHGWGLDMKLGYCAQGDRTEKVGVIDSEYVVHQGIPSLGGPSLSSKTPRRSLDLRTHIRRQSSAELEKFKERWNRAVREDEGWRDPFDS

SEQ ID NO: 9992 - DNA, 950 bp, Zea mays subsp. mays
  misc_feature (1)..(950): Ceres Seq. ID no. 12348141
  misc_feature: MA Experiment ID: 108527 Result: Up-regulated in Transcription
  misc_feature: MA Experiment 108527 PARAMETER Experiment Name: Zm_5mM_NO_P Parameter: Age (day) Value: 8
  misc_feature: MA Experiment 108527 PARAMETER Experiment Name: Zm_5mM_NO_P Parameter: Organism Value: Zea mays
  misc_feature: MA Experiment 108527 PARAMETER Experiment Name: Zm_5mM_NO_P Parameter: Plant Line Value: 35A19
  misc_feature: MA Experiment 108527 PARAMETER Experiment Name: Zm_5mM_NO_P Parameter: Timepoint (hr) Value: 6
  misc_feature: MA Experiment 108527 PARAMETER Experiment Name: Zm_5mM_NO_P Parameter: Tissue Value: Aerial
  misc_feature: MA Experiment 108527 PARAMETER Experiment Name: Zm_5mM_NO_P Parameter: Treatment Value: 5mM NO vs. No Treatment
  misc_feature: MA Experiment ID: 108559 Result: Up-regulated in Transcription
  misc_feature: MA Experiment 108559 PARAMETER Experiment Name: Zm_5mM_NO_P Parameter: Age (day) Value: 8
  misc_feature: MA Experiment 108559 PARAMETER Experiment Name: Zm_5mM_NO_P Parameter: Organism Value: Zea mays
  misc_feature: MA Experiment 108559 PARAMETER Experiment Name: Zm_5mM_NO_P Parameter: Plant Line Value: 35A19
  misc_feature: MA Experiment 108559 PARAMETER Experiment Name: Zm_5mM_NO_P Parameter: Timepoint (hr) Value: 12
  misc_feature: MA Experiment 108559 PARAMETER Experiment Name: Zm_5mM_NO_P Parameter: Tissue Value: Aerial
  misc_feature: MA Experiment 108559 PARAMETER Experiment Name: Zm_5mM_NO_P Parameter: Treatment Value: 5mM NO vs. No Treatment
gaagtcgagtagacggccgggcctctcccgttctccacggacggctagcgctactggaggcgacgcctggacggcgaccccgcacactcacagccacaccctccacctgtgtgactattcaagggcttaggccgagccgcccggccaatcgccgtccgccggaccgctgaggaatttttctttctcgtcaaaagttactgcattcattttacagtaatggctatggggttgattaatgctaatcctataatccatgagaaaaaagagaggcgtgccagacaggcaccagagaccacagatgaaaatgcagcagagcccatagatcagctggaaatatttgatcacattagagatataaaggatccagagcacccgtactcactggaacagctgaatgtggtgactgaagattcaattgaactcaatgatgaaagtaattatgtcagggttacattcaccccaacagtggagcactgcagtatggcaactattattggcctttgcatacgcgtgaaacttgtacggagtctccctcctcgttacaaggtggacataagggttgcccctggatcacatgcaactgaagctgctgtgaataagcaactgaacgacaaagaacgtgttgcggctgcattggagaacccaaacctactggacatggtcgaagagtgcttatcaccaacatttgattgaggcctgaatatcaatatatcggtgtgacatggtgttgatgttcaggagccacacatgctcattgccaatggagttcactcctgtctttcgagaaccaaaatgccttgggtgttaagtgacgtgttgcatgatttttttcctccgccccgttcagttattatatatgctactatggcgctaccctttttggacgtttttggtgcttgtgacctcactgatcaatgcgagatgtaatcagctcttgtgctgtagctttc

SEQ ID NO: 9993 - protein, 158 aa, Zea mays subsp. mays
  peptide (1)..(158): Ceres Seq. ID no. 12348142
  misc_feature (36)..(115): Pfam Name: Domain of unknown function DUF59 Pfam Description: Domain of unknown function DUF59
  misc_feature (1)..(157): Homolog of NCBI NO: 38347077 NR Description: OSJNBa0006A01.18 [Oryza sativa (japonica
  misc_feature (1)..(153): Homolog of NCBI NO: 28973748 NR Description: unknown protein [Arabidopsis thaliana]
  misc_feature (1)..(153): Homolog of NCBI NO: 15221347 NR Description: unknown protein; protein id: At1g68310.1 thaliana] >gi|20455357|sp|Q9C9G6|U195_ARATH Hypothetical protein
  misc_feature (40)..(157): Homolog of NCBI NO: 38567963 NR Description: OSJNBa0093F12.4 [Oryza sativa (japonica
  misc_feature (1)..(153): Homolog of NCBI NO: 34896898 NR Description: hypothetical protein [Oryza sativa (japonica group)] >gi|24899438|gb|AAN65008.1| hypothetical protein [Oryza
  misc_feature (7)..(154): Homolog of NCBI NO: 24662341 NR Description: CG7949-PA [Drosophila melanogaster]
  misc_feature (5)..(153): Homolog of NCBI NO: 39586567 NR Description: Hypothetical protein CBG21205 [Caenorhabditis
  misc_feature (4)..(154): Homolog of NCBI NO: 21312046 NR Description: RIKEN cDNA 1110019N10 [Mus musculus]
  misc_feature (4)..(154): Homolog of NCBI NO: 27658356 NR Description: similar to RIKEN cDNA 1110019N10 [Mus musculus]
  misc_feature (5)..(153): Homolog of NCBI NO: 17553476 NR Description: Putative cytoplasmic protein of eukaryotic origin elegans] >gi|20455346|sp|O62252|U195_CAEEL Hypothical protein in chromosome III >gi|7503486|pir||T22242 hypothetical protein
MAMGLINANPIIHEKKERRARQAPETTDENAAEPIDQLEIFDHIRDIKDPEHPYSLEQLNVVTEDSIELNDESNYVRVTFTPTVEHCSMATIIGLCIRVKLVRSLPPRYKVDIRVAPGSHATEAAVNKQLNDKERVAAALENPNLLDMVEECLSPTFD

SEQ ID NO: 9994 - protein, 156 aa, Zea mays subsp. mays
  peptide (1)..(156): Ceres Seq. ID no. 12348143
  misc_feature (34)..(113): Pfam Name: Domain of unknown function DUF59 Pfam Description: Domain of unknown function DUF59
  misc_feature (1)..(155): Homolog of NCBI NO: 38347077 NR Description: OSJNBa0006A01.18 [Oryza sativa (japonica
  misc_feature (1)..(151): Homolog of NCBI NO: 28973748 NR Description: unknown protein [Arabidopsis thaliana]
  misc_feature (1)..(151): Homolog of NCBI NO: 15221347 NR Description: unknown protein; protein id: At1g68310.1 thaliana] >gi|20455357|sp|Q9C9G6|U195_ARATH Hypothetical protein
  misc_feature (38)..(155): Homolog of NCBI NO: 38567963 NR Description: OSJNBa0093F12.4 [Oryza sativa (japonica
  misc_feature (1)..(151): Homolog of NCBI NO: 34896898 NR Description: hypothetical protein [Oryza sativa (japonica group)] >gi|24899438|gb|AAN65008.1| hypothetical protein [Oryza
  misc_feature (5)..(152): Homolog of NCBI NO: 24662341 NR Description: CG7949-PA [Drosophila melanogaster]
  misc_feature (3)..(151): Homolog of NCBI NO: 39586567 NR Description: Hypothetical protein CBG21205 [Caenorhabditis
  misc_feature (2)..(152): Homolog of NCBI NO: 21312046 NR Description: RIKEN cDNA 1110019N10 [Mus musculus]
  misc_feature (2)..(152): Homolog of NCBI NO: 27658356 NR Description: similar to RIKEN cDNA 1110019N10 [Mus musculus]
  misc_feature (3)..(151): Homolog of NCBI NO: 17553476 NR Description: Putative cytoplasmic protein of eukaryotic origin elegans] >gi|20455346|sp|O62252|U195_CAEEL Hypothical protein in chromosome III >gi|7503486|pir||T22242 hypothetical protein
MGLINANPIIHEKKERRARQAPETTDENAAEPIDQLEIFDHIRDIKDPEHPYSLEQLNVVTEDSIELNDESNYVRVTFTPTVEHCSMATIIGLCIRVKLVRSLPPRYKVDIRVAPGSHATEAAVNKQLNDKERVAAALENPNLLDMVEECLSPTFD

SEQ ID NO: 9995 - DNA, 1918 bp, Zea mays subsp. mays
  misc_feature (1)..(1918): Ceres Seq. ID no. 12356802
  misc_feature: MA Experiment ID: 108535 Result: Up-regulated in Transcription
  misc_feature: MA Experiment 108535 PARAMETER Experiment Name: Zm_Meristem_P Parameter: Age (day) Value: 8
  misc_feature: MA Experiment 108535 PARAMETER Experiment Name: Zm_Meristem_P Parameter: Organism Value: Zea mays
  misc_feature: MA Experiment 108535 PARAMETER Experiment Name: Zm_Meristem_P Parameter: Plant Line Value: 35A19
  misc_feature: MA Experiment 108535 PARAMETER Experiment Name: Zm_Meristem_P Parameter: Tissue Value: Root Meristem vs. Above Root Meristem
agattgacctgttgccctgttgagtgtgaaggaggcgcacgcgcttgagctgaagaaactgccgcgctgatctagcccgccgggatgggcgcctcggggcctgcggctccgccggcaacgcatcgccgccgctgcatccagctgctgctgctgctcgccctggccgtcgcgccgcttggcagccgtgggcttcgcgtccgtgccgcgggggcggacacgggagggctgagccgggacgcgttcccgaaggggttcgtcttcgggacggcgacgtccgcgtaccaggtcgagggcgcggcgacgtccggcggccgcgggccctgcatctgggatcccttcgtccacacccccggaaagattgctgaagacgccaacgcagatgttacaacagatgaatatcatcgctacaaggaagatgttgatctcatgaaaagcctaaattttgatgcataccggttttcaatctcctggtccaggatcttcccagatggcgaagggaaaattaatgaagaaggagtacagtattacaacaatcttatagactacatgattaagcaaggccttactccttacgccaaccttaaccactatgatcttccgcttgcgcttcagaagaagtaccaaggctggttaggcccaaaaattgtggacatatttgctgactatgctgatttttgtttcaagacttttggcaatcgagtcaagaactggttcacattaaatgagccaaggatagtagcattccttggttatgataaagggcttaacccccctaaccggtgcacacaatgcactgccggtgggaactcatcgacagaaccttacattgttgttcataacattctcctatctcatgctactgcagttgcaagataccgcaataaataccaggcaactcagaaaggcaaggtcgggatagttcttgacttcaactggtatgaaccttttacaaactcaactgaagatcaaaaagcagcgcaaagggccagggacttccatattggttggtttcttgatccattaataaatgggcaatatccaaagataatgcaagacattgtgaaagaccggctaccaagtttcacacctgaacaggccaagctagtcaagggctcatcagactatttcgggatcaatcaatatactacatactacattgcagatcaacaaactcctccgcagggaccaccgagctactcgtccgactggggcgtccaatattactttcaaaggaatggcgtgcaaattggacagatggcgcactcaatttggctttacatcgtcccatcggggcatgtatggagtcgtgaactacctaaaggaaaagtaccataatccaatcatcatcatatcggaaaacggaatggatcagcctggaaacctcacgcgcgaggagtacgtgcacgacgccgtgaggatcgacttctacaagaactacctgacggagctaaagagagggatcgacggcggcgcgaacgtgatcggctacttcgcgtggtctctcctggacaacttcgagtggctgtcgggctacacgtccaagttcggcatcgtctacgtcgacttcgcgacgctgaagcggtaccccaaggactcggcgtactggttcagagacatgctttcggggacgggctccaaggctgctaccccgcagactggttcaggcggccggccggctggttcggcttcagccacctcgaacggacctgccttgctggtctcccttttggtctccttgggtgttctgcttccatccatcttcatggtttcctcggtctaattagaaatgtattttcatagtacggatttgtagttgtgtggatgacaacatgttccttttaagaatcaggacatgttgcatcgatgcgggacctgttgtaggaatgagaccatgattcagggcttattgttcagagtc

SEQ ID NO: 9996 - protein, 416 aa, Zea mays subsp. mays
  peptide (1)..(416): Ceres Seq. ID no. 12356803
  misc_feature (49)..(403): Pfam Name: Glycosyl hydrolase family 1 Pfam Description: Glycosyl hydrolase family 1
  misc_feature (11)..(403): Homolog of NCBI NO: 18875458 NR Description: beta-glucosidase [Oryza sativa]
  misc_feature (20)..(403): Homolog of NCBI NO: 1362162 NR Description: beta-glucosidase BGQ60 precursor - barley
  misc_feature (20)..(403): Homolog of NCBI NO: 15229584 NR Description: glycosyl hydrolase family 1; protein id: supported by cDNA: 11984. [Arabidopsis thaliana]
  misc_feature (17)..(403): Homolog of NCBI NO: 17226270 NR Description: beta-mannosidase enzyme [Lycopersicon esculentum]
  misc_feature (44)..(403): Homolog of NCBI NO: 34899014 NR Description: putative non-cyanogenic beta-glucosidase
  misc_feature (21)..(403): Homolog of NCBI NO: 22331147 NR Description: glycosyl hydrolase family 1; protein id:
  misc_feature (21)..(403): Homolog of NCBI NO: 9294062 NR Description: beta-glucosidase [Arabidopsis thaliana]
  misc_feature (48)..(403): Homolog of NCBI NO: 15222734 NR Description: glycosyl hydrolase family 1; protein id: supported by cDNA: 125606., supported by cDNA: gi_15028208
  misc_feature (48)..(403): Homolog of NCBI NO: 21537259 NR Description: beta-glucosidase, putative [Arabidopsis thaliana]
  misc_feature (17)..(403): Homolog of NCBI NO: 15617209 NR Description: putative prunasin hydrolase isoform PH-L1
MGASGPAAPPATHRRRCIQLLLLLALAVAPLGSRGLRVRAAGADTGGLSRDAFPKGFVFGTATSAYQVEGAATSGGRGPCIWDPFVHTPGKIAEDANADVTTDEYHRYKEDVDLMKSLNFDAYRFSISWSRIFPDGEGKINEEGVQYYNNLIDYMIKQGLTPYANLNHYDLPLALQKKYQGWLGPKIVDIFADYADFCFKTFGNRVKNWFTLNEPRIVAFLGYDKGLNPPNRCTQCTAGGNSSTEPYIVVHNILLSHATAVARYRNKYQATQKGKVGIVLDFNWYEPFTNSTEDQKAAQRARDFHIGWFLDPLINGQYPKIMQDIVKDRLPSFTPEQAKLVKGSSDYFGINQYTTYYIADQQTPPQGPPSYSSDWGVQYYFQRNGVQIGQMAHSIWLYIVPSGHVWSRELPKGKVP

SEQ ID NO: 9997 - protein, 302 aa, Zea mays subsp. mays
  peptide (1)..(302): Ceres Seq. ID no. 12356804
  misc_feature (1)..(289): Pfam Name: Glycosyl hydrolase family 1 Pfam Description: Glycosyl hydrolase family 1
  misc_feature (1)..(289): Homolog of NCBI NO: 18875458 NR Description: beta-glucosidase [Oryza sativa]
  misc_feature (1)..(289): Homolog of NCBI NO: 1362162 NR Description: beta-glucosidase BGQ60 precursor - barley
  misc_feature (1)..(289): Homolog of NCBI NO: 15229584 NR Description: glycosyl hydrolase family 1; protein id: supported by cDNA: 11984. [Arabidopsis thaliana]
  misc_feature (1)..(289): Homolog of NCBI NO: 17226270 NR Description: beta-mannosidase enzyme [Lycopersicon esculentum]
  misc_feature (1)..(289): Homolog of NCBI NO: 34899014 NR Description: putative non-cyanogenic beta-glucosidase
  misc_feature (1)..(289): Homolog of NCBI NO: 22331147 NR Description: glycosyl hydrolase family 1; protein id:
  misc_feature (1)..(289): Homolog of NCBI NO: 9294062 NR Description: beta-glucosidase [Arabidopsis thaliana]
  misc_feature (1)..(289): Homolog of NCBI NO: 15222734 NR Description: glycosyl hydrolase family 1; protein id: supported by cDNA: 125606., supported by cDNA: gi_15028208
  misc_feature (1)..(289): Homolog of NCBI NO: 21537259 NR Description: beta-glucosidase, putative [Arabidopsis thaliana]
  misc_feature (1)..(289): Homolog of NCBI NO: 15617209 NR Description: putative prunasin hydrolase isoform PH-L1
MKSLNFDAYRFSISWSRIFPDGEGKINEEGVQYYNNLIDYMIKQGLTPYANLNHYDLPLALQKKYQGWLGPKIVDIFADYADFCFKTFGNRVKNWFTLNEPRIVAFLGYDKGLNPPNRCTQCTAGGNSSTEPYIVVHNILLSHATAVARYRNKYQATQKGKVGIVLDFNWYEPFTNSTEDQKAAQRARDFHIGWFLDPLINGQYPKIMQDIVKDRLPSFTPEQAKLVKGSSDYFGINQYTTYYIADQQTPPQGPPSYSSDWGVQYYFQRNGVQIGQMAHSIWLYIVPSGHVWSRELPKGKVP

SEQ ID NO: 9998 - protein, 262 aa, Zea mays subsp. mays
  peptide (1)..(262): Ceres Seq. ID no. 12356805
  misc_feature (1)..(249): Pfam Name: Glycosyl hydrolase family 1 Pfam Description: Glycosyl hydrolase family 1
  misc_feature (1)..(249): Homolog of NCBI NO: 18875458 NR Description: beta-glucosidase [Oryza sativa]
  misc_feature (1)..(249): Homolog of NCBI NO: 1362162 NR Description: beta-glucosidase BGQ60 precursor - barley
  misc_feature (1)..(249): Homolog of NCBI NO: 15229584 NR Description: glycosyl hydrolase family 1; protein id: supported by cDNA: 11984. [Arabidopsis thaliana]
  misc_feature (1)..(249): Homolog of NCBI NO: 17226270 NR Description: beta-mannosidase enzyme [Lycopersicon esculentum]
  misc_feature (1)..(249): Homolog of NCBI NO: 34899014 NR Description: putative non-cyanogenic beta-glucosidase
  misc_feature (1)..(249): Homolog of NCBI NO: 22331147 NR Description: glycosyl hydrolase family 1; protein id:
  misc_feature (1)..(249): Homolog of NCBI NO: 9294062 NR Description: beta-glucosidase [Arabidopsis thaliana]
  misc_feature (1)..(249): Homolog of NCBI NO: 15222734 NR Description: glycosyl hydrolase family 1; protein id: supported by cDNA: 125606., supported by cDNA: gi_15028208
  misc_feature (1)..(249): Homolog of NCBI NO: 21537259 NR Description: beta-glucosidase, putative [Arabidopsis thaliana]
  misc_feature (1)..(249): Homolog of NCBI NO: 15617209 NR Description: putative prunasin hydrolase isoform PH-L1
MIKQGLTPYANLNHYDLPLALQKKYQGWLGPKIVDIFADYADFCFKTFGNRVKNWFTLNEPRIVAFLGYDKGLNPPNRCTQCTAGGNSSTEPYIVVHNILLSHATAVARYRNKYQATQKGKVGIVLDFNWYEPFTNSTEDQKAAQRARDFHIGWFLDPLINGQYPKIMQDIVKDRLPSFTPEQAKLVKGSSDYFGINQYTTYYIADQQTPPQGPPSYSSDWGVQYYFQRNGVQIGQMAHSIWLYIVPSGHVWSRELPKGKVP

SEQ ID NO: 9999 - DNA, 1947 bp, Zea mays subsp. mays
  misc_feature (1)..(1947): Ceres Seq. ID no. 12349697
  misc_feature: MA Experiment ID: 108528 Result: Up-regulated in Transcription
  misc_feature: MA Experiment 108528 PARAMETER Experiment Name: Zm_Imbibed_Seeds_P Parameter: Age (day) Value: 5 vs. 2
  misc_feature: MA Experiment 108528 PARAMETER Experiment Name: Zm_Imbibed_Seeds_P Parameter: Organism Value: Zea mays
  misc_feature: MA Experiment 108528 PARAMETER Experiment Name: Zm_Imbibed_Seeds_P Parameter: Plant Line Value: 35A19
  misc_feature: MA Experiment 108528 PARAMETER Experiment Name: Zm_Imbibed_Seeds_P Parameter: Tissue Value: Aerial vs. Embryo
  misc_feature: MA Experiment ID: 108530 Result: Up-regulated in Transcription
  misc_feature: MA Experiment 108530 PARAMETER Experiment Name: Zm_Imbibed_Seeds_P Parameter: Age (day) Value: 6 vs. 2
  misc_feature: MA Experiment 108530 PARAMETER Experiment Name: Zm_Imbibed_Seeds_P Parameter: Organism Value: Zea mays
  misc_feature: MA Experiment 108530 PARAMETER Experiment Name: Zm_Imbibed_Seeds_P Parameter: Plant Line Value: 35A19
  misc_feature: MA Experiment 108530 PARAMETER Experiment Name: Zm_Imbibed_Seeds_P Parameter: Tissue Value: Aerial vs. Embryo
  misc_feature: MA Experiment ID: 108544 Result: Up-regulated in Transcription
  misc_feature: MA Experiment ID: 108547 Result: Up-regulated in Transcription
  misc_feature: MA Experiment 108547 PARAMETER Experiment Name: Zm_Imbibed_Seeds_P Parameter: Age (day) Value: 4 vs. 2
  misc_feature: MA Experiment 108547 PARAMETER Experiment Name: Zm_Imbibed_Seeds_P Parameter: Organism Value: Zea mays
  misc_feature: MA Experiment 108547 PARAMETER Experiment Name: Zm_Imbibed_Seeds_P Parameter: Plant Line Value: 35A19
  misc_feature: MA Experiment 108547 PARAMETER Experiment Name: Zm_Imbibed_Seeds_P Parameter: Tissue Value: Aerial vs. Embryo
  misc_feature: MA Experiment ID: 108559 Result: Down-regulated in Transcription
  misc_feature: MA Experiment 108559 PARAMETER Experiment Name: Zm_5mM_NO_P Parameter: Age (day) Value: 8
  misc_feature: MA Experiment 108559 PARAMETER Experiment Name: Zm_5mM_NO_P Parameter: Organism Value: Zea mays
  misc_feature: MA Experiment 108559 PARAMETER Experiment Name: Zm_5mM_NO_P Parameter: Plant Line Value: 35A19
  misc_feature: MA Experiment 108559 PARAMETER Experiment Name: Zm_5mM_NO_P Parameter: Timepoint (hr) Value: 12
  misc_feature: MA Experiment 108559 PARAMETER Experiment Name: Zm_5mM_NO_P Parameter: Tissue Value: Aerial
  misc_feature: MA Experiment 108559 PARAMETER Experiment Name: Zm_5mM_NO_P Parameter: Treatment Value: 5mM NO vs. No Treatment
atcatgctattctctaggaggcctctcgccgccgctttccacctcgcgcccctttcgcctccgctgctcctcttcttcgcatccgcgtcctcgtcctgctcgcccgccgcctccgccgccgccgcgtcggtctccggctccaggggttgcactgctgcaaggatggacagcggtgcggtggagacagcgtccactggggcagtatggtcatcaccttcggcagaaccgagaagcatttctgtcgggaaggaggtattctgcaacaggtcactcaacatgaggaacatcacagcagtgggatttgatatggactacactctggcacagtacaagcctgaaaccttcgagtcccttgcttactatggtacaatagagaagcttgtgaaggatctccgctaccctgaagagctgttgacttgggaatttgattggaaatatatggtcagaggactagttctcgataagaagagaggaaatatcttgaagatggatcgacacaagtatgtaaaagttgcataccatggttttaaggaactatcgaaagaagaaaaagttgctgcttatgggagtacattgataagagattcatttgatgaacctgattatgcccttatagatacacttttctcactgggtgaagcttatctatttgctcagcttgttgatttcatagacaagaatcctggaaaagtacctgcaggcacagactatccacttatgtacagagatgtgaggtctgcggttgacttgtgtcatcgtgatggaactctaaagcggatggttgcgaaggatcctgccaggtacatcaatgaggacttggcaattgtaccaatgcttgaaatgatcaggaaatctggacgctcaacattcttagtgacaaatagtttgtgggactacaccgatgttgtcatgaactacctttgtgggccatacacttcaggtgtaggctctggtctcaatcacaagtggcttcaatattttgatattgtaataacaggcagttcgaagccaagtttcttccatgatgataaccgtgcaggattgtttgaagttgagcctgattctggaaaacttctgaatgctgatattcagatcggaagcccaagatcaagtcatcaacactcaacaccagttcagaaagtttatcaggggggcaatgttggtcatctccacagattactttctgttgcttctagttcacagattctctatgttggtgatcacatatacggagatattctgcggagcaagaaagttctaggctggcggactatgctggtgattccagaactagaacaagagctgaagcttctctcagaatcaaagtctactcgaaaggagcttagacatcttagaatggagcgtgattcgattgaagacaaaatccatcatcttgaatggtctcttaagcttgatgatatctcagaaaaccagaaggagaaattgttctctgaacatgacaatctgctgaaacagagagggcatgttcgtggtcttcatcaagaagctcagaggcaacatcatcagaagtttcataaggtgtggggacagctcatgaagactgggtaccaaaattccagatttgctcatcaggttgagagatttgcttgcttgtacagcagccaggttacaaacttcggtttgtattctcctgacaaatactatcgtccgagcgaagattacatgccccacgagtttgatgtgcttgggctgtaggagcagcccctactgctggtcggagttcctcgttgtaattgatccatagcctaggaggggacatcgtagttgccgtattatataacaggaagcttcacccattgtgaaggagagaaggtttataactatagtagctacatttctacttatcagtaagtttacctgtatataaatatgtacataactgatatatgatgcgtgttatttgtgagcacgcgataagtagtactg

SEQ ID NO: 10000 - protein, 571 aa, Zea mays subsp. mays
  peptide (1)..(571): Ceres Seq. ID no. 12349698
  misc_feature (161)..(571): Pfam Name: 5' nucleotidase family Pfam Description: 5' nucleotidase family
  misc_feature (2)..(571): Homolog of NCBI NO: 34915208 NR Description: putative N5'-nucleotidase [Oryza sativa (japonica
  misc_feature (69)..(571): Homolog of NCBI NO: 22330644 NR Description: cytosolic IMP-GMP specific 5'-nucleotidase, protein id: At1g75210.1, supported by cDNA: gi_20260153
  misc_feature (69)..(529): Homolog of NCBI NO: 25353625 NR Description: hypothetical protein F22H5.7 [imported] -
  misc_feature (85)..(487): Homolog of NCBI NO: 12841987 NR Description: unnamed protein product [Mus musculus]
  misc_feature (85)..(487): Homolog of NCBI NO: 31560044 NR Description: RIKEN cDNA 2010002I23 [Mus musculus]
  misc_feature (481)..(568): Homolog of NCBI NO: 12841987 NR Description: unnamed protein product [Mus musculus]
  misc_feature (481)..(568): Homolog of NCBI NO: 31560044 NR Description: RIKEN cDNA 2010002I23 [Mus musculus]
  misc_feature (85)..(487): Homolog of NCBI NO: 40555840 NR Description: 5'-nucleotidase, cytosolic II [Mus musculus]
  misc_feature (481)..(568): Homolog of NCBI NO: 40555840 NR Description: 5'-nucleotidase, cytosolic II [Mus musculus]
  misc_feature (85)..(487): Homolog of NCBI NO: 6912598 NR Description: 5'-nucleotidase, cytosolic II; purine 5'
IMLFSRRPLAAAFHLAPLSPPLLLFFASASSSCSPAASAAAASVSGSRGCTAARMDSGAVETASTGAVWSSPSAEPRSISVGKEVFCNRSLNMRNITAVGFDMDYTLAQYKPETFESLAYYGTIEKLVKDLRYPEELLTWEFDWKYMVRGLVLDKKRGNILKMDRHKYVKVAYHGFKELSKEEKVAAYGSTLIRDSFDEPDYALIDTLFSLGEAYLFAQLVDFIDKNPGKVPAGTDYPLMYRDVRSAVDLCHRDGTLKRMVAKDPARYINEDLAIVPMLEMIRKSGRSTFLVTNSLWDYTDVVMNYLCGPYTSGVGSGLNHKWLQYFDIVITGSSKPSFFHDDNRAGLFEVEPDSGKLLNADIQIGSPRSSHQHSTPVQKVYQGGNVGHLHRLLSVASSSQILYVGDHIYGDILRSKKVLGWRTMLVIPELEQELKLLSESKSTRKELRHLRMERDSIEDKIHHLEWSLKLDDISENQKEKLFSEHDNLLKQRGHVRGLHQEAQRQHHQKFHKVWGQLMKTGYQNSRFAHQVERFACLYSSQVTNFGLYSPDKYYRPSEDYMPHEFDVLGL

SEQ ID NO: 10001 - protein, 570 aa, Zea mays subsp. mays
  peptide (1)..(570): Ceres Seq. ID no. 12349699
  misc_feature (160)..(570): Pfam Name: 5' nucleotidase family Pfam Description: 5' nucleotidase family
  misc_feature (68)..(528): Homolog of NCBI NO: 25353625 NR Description: hypothetical protein F22H5.7 [imported] -
  misc_feature (84)..(486): Homolog of NCBI NO: 12841987 NR Description: unnamed protein product [Mus musculus]
  misc_feature (84)..(486): Homolog of NCBI NO: 31560044 NR Description: RIKEN cDNA 2010002I23 [Mus musculus]
  misc_feature (480)..(567): Homolog of NCBI NO: 12841987 NR Description: unnamed protein product [Mus musculus]
  misc_feature (1)..(570): Homolog of NCBI NO: 34915208 NR Description: putative N5'-nucleotidase [Oryza sativa (japonica
  misc_feature (68)..(570): Homolog of NCBI NO: 22330644 NR Description: cytosolic IMP-GMP specific 5'-nucleotidase, protein id: At1g75210.1, supported by cDNA: gi_20260153
  misc_feature (480)..(567): Homolog of NCBI NO: 31560044 NR Description: RIKEN cDNA 2010002I23 [Mus musculus]
  misc_feature (84)..(486): Homolog of NCBI NO: 40555840 NR Description: 5'-nucleotidase, cytosolic II [Mus musculus]
  misc_feature (480)..(567): Homolog of NCBI NO: 40555840 NR Description: 5'-nucleotidase, cytosolic II [Mus musculus]
  misc_feature (84)..(486): Homolog of NCBI NO: 6912598 NR Description: 5'-nucleotidase, cytosolic II; purine 5'
MLFSRRPLAAAFHLAPLSPPLLLFFASASSSCSPAASAAAASVSGSRGCTAARMDSGAVETASTGAVWSSPSAEPRSISVGKEVFCNRSLNMRNITAVGFDMDYTLAQYKPETFESLAYYGTIEKLVKDLRYPEELLTWEFDWKYMVRGLVLDKKRGNILKMDRHKYVKVAYHGFKELSKEEKVAAYGSTLIRDSFDEPDYALIDTLFSLGEAYLFAQLVDFIDKNPGKVPAGTDYPLMYRDVRSAVDLCHRDGTLKRMVAKDPARYINEDLAIVPMLEMIRKSGRSTFLVTNSLWDYTDVVMNYLCGPYTSGVGSGLNHKWLQYFDIVITGSSKPSFFHDDNRAGLFEVEPDSGKLLNADIQIGSPRSSHQHSTPVQKVYQGGNVGHLHRLLSVASSSQILYVGDHIYGDILRSKKVLGWRTMLVIPELEQELKLLSESKSTRKELRHLRMERDSIEDKIHHLEWSLKLDDISENQKEKLFSEHDNLLKQRGHVRGLHQEAQRQHHQKFHKVWGQLMKTGYQNSRFAHQVERFACLYSSQVTNFGLYSPDKYYRPSEDYMPHEFDVLGL

SEQ ID NO: 10002 - protein, 517 aa, Zea mays subsp. mays
  peptide (1)..(517): Ceres Seq. ID no. 12349700
  misc_feature (107)..(517): Pfam Name: 5' nucleotidase family Pfam Description: 5' nucleotidase family
  misc_feature (1)..(517): Homolog of NCBI NO: 34915208 NR Description: putative N5'-nucleotidase [Oryza sativa (japonica
  misc_feature (15)..(517): Homolog of NCBI NO: 22330644 NR Description: cytosolic IMP-GMP specific 5'-nucleotidase, protein id: At1g75210.1, supported by cDNA: gi_20260153
  misc_feature (15)..(475): Homolog of NCBI NO: 25353625 NR Description: hypothetical protein F22H5.7 [imported] -
  misc_feature (31)..(433): Homolog of NCBI NO: 12841987 NR Description: unnamed protein product [Mus musculus]
  misc_feature (31)..(433): Homolog of NCBI NO: 31560044 NR Description: RIKEN cDNA 2010002I23 [Mus musculus]
  misc_feature (427)..(514): Homolog of NCBI NO: 12841987 NR Description: unnamed protein product [Mus musculus]
  misc_feature (427)..(514): Homolog of NCBI NO: 31560044 NR Description: RIKEN cDNA 2010002I23 [Mus musculus]
  misc_feature (31)..(433): Homolog of NCBI NO: 40555840 NR Description: 5'-nucleotidase, cytosolic II [Mus musculus]
  misc_feature (427)..(514): Homolog of NCBI NO: 40555840 NR Description: 5'-nucleotidase, cytosolic II [Mus musculus]
  misc_feature (31)..(433): Homolog of NCBI NO: 6912598 NR Description: 5'-nucleotidase, cytosolic II; purine 5'
MDSGAVETASTGAVWSSPSAEPRSISVGKEVFCNRSLNMRNITAVGFDMDYTLAQYKPETFESLAYYGTIEKLVKDLRYPEELLTWEFDWKYMVRGLVLDKKRGNILKMDRHKYVKVAYHGFKELSKEEKVAAYGSTLIRDSFDEPDYALIDTLFSLGEAYLFAQLVDFIDKNPGKVPAGTDYPLMYRDVRSAVDLCHRDGTLKRMVAKDPARYINEDLAIVPMLEMIRKSGRSTFLVTNSLWDYTDVVMNYLCGPYTSGVGSGLNHKWLQYFDIVITGSSKPSFFHDDNRAGLFEVEPDSGKLLNADIQIGSPRSSHQHSTPVQKVYQGGNVGHLHRLLSVASSSQILYVGDHIYGDILRSKKVLGWRTMLVIPELEQELKLLSESKSTRKELRHLRMERDSIEDKIHHLEWSLKLDDISENQKEKLFSEHDNLLKQRGHVRGLHQEAQRQHHQKFHKVWGQLMKTGYQNSRFAHQVERFACLYSSQVTNFGLYSPDKYYRPSEDYMPHEFDVLGL

SEQ ID NO: 10003 - DNA, 819 bp, Zea mays subsp. mays
  misc_feature (1)..(819): Ceres Seq. ID no. 12356960
  misc_feature: MA Experiment ID: 108535 Result: Up-regulated in Transcription
  misc_feature: MA Experiment 108535 PARAMETER Experiment Name: Zm_Meristem_P Parameter: Age (day) Value: 8
  misc_feature: MA Experiment 108535 PARAMETER Experiment Name: Zm_Meristem_P Parameter: Organism Value: Zea mays
  misc_feature: MA Experiment 108535 PARAMETER Experiment Name: Zm_Meristem_P Parameter: Plant Line Value: 35A19
  misc_feature: MA Experiment 108535 PARAMETER Experiment Name: Zm_Meristem_P Parameter: Tissue Value: Root Meristem vs. Above Root Meristem
  misc_feature: MA Experiment ID: 108536 Result: Down-regulated in Transcription
  misc_feature: MA Experiment 108536 PARAMETER Experiment Name: Zm_Meristem_P Parameter: Age (day) Value: 8
  misc_feature: MA Experiment 108536 PARAMETER Experiment Name: Zm_Meristem_P Parameter: Organism Value: Zea mays
  misc_feature: MA Experiment 108536 PARAMETER Experiment Name: Zm_Meristem_P Parameter: Plant Line Value: 35A19
  misc_feature: MA Experiment 108536 PARAMETER Experiment Name: Zm_Meristem_P Parameter: Tissue Value: Shoot Meristem vs. Above Shoot Meristem
  misc_feature: MA Experiment ID: 108543 Result: Up-regulated in Transcription
  misc_feature: MA Experiment ID: 20000477 Result: Down-regulated in Transcription
  misc_feature: MA Experiment 20000477 PARAMETER Experiment Name: Zm_5mM_SA_P Parameter: Age (day) Value: 10
  misc_feature: MA Experiment 20000477 PARAMETER Experiment Name: Zm_5mM_SA_P Parameter: Organism Value: Zea mays
  misc_feature: MA Experiment 20000477 PARAMETER Experiment Name: Zm_5mM_SA_P Parameter: Plant Line Value: 35A19
  misc_feature: MA Experiment 20000477 PARAMETER Experiment Name: Zm_5mM_SA_P Parameter: Timepoint (hr) Value: 48
  misc_feature: MA Experiment 20000477 PARAMETER Experiment Name: Zm_5mM_SA_P Parameter: Tissue Value: Aerial
  misc_feature: MA Experiment 20000477 PARAMETER Experiment Name: Zm_5mM_SA_P Parameter: Treatment Value: 5mM SA vs. No Treatment
aaggccgagctcatccaatccagtcgcctgattgcattgggatcccatggccaagctcgccgtcctcctcctcctcgccgtggccgcgtccgccacagtgccggcgcacggccgcgataccccgactgagatcaaggccgggacggacgcgaacgtcacgctggagctggccgccgcggacggcaacggcgtggggatctcgaacctgcccgcctggggcgggctcatggggcagggctactcctacttcgagcgcagcaacctggacatcttcagcggccgcgggccctgcatggcgaaggcgccgtgcgtggatgcggctggccaccgacggcaccggcgaccaccacgggtggtactgcaactacgtggaggtcaccaccacgggcccgcacaaggggtgcgggcagcagctgttcaccgtcgagcagtggctcgccaccgacgccccgcccttcaagctcgaggccgttcgcgactactgcagcggcgacgccaagggcgcctcggcggcgtgatgtggccggcggccggtaggaggagagcacagcacacacgcctggactggacctgctgggtggcttggtttggttggttggtgacgagtcgtaataagttgtgggcgcatgggcgccgcgctcgtgagtggcgtgcgccacgatgcatgcgtgtatggtgatgaactgaattggagccgtgcagcaagtcgaataatcgggagccacctcgcgtgatgtgtagtggctagtttttgtacatggacgtgttggatcttgatccatgttttgatctgatctttgagaaatggtaatccgcgtt

SEQ ID NO: 10004 - protein, 210 aa, Zea mays subsp. mays
  peptide (1)..(210): Ceres Seq. ID no. 12356961
  misc_feature (25)..(88): Pfam Name: PLAT/LH2 domain Pfam Description: PLAT/LH2 domain
  misc_feature (25)..(88): Homolog of NCBI NO: 32492140 NR Description: OSJNBa0036B21.4 [Oryza sativa (japonica
  misc_feature (30)..(88): Homolog of NCBI NO: 32492139 NR Description: OSJNBa0036B21.2 [Oryza sativa (japonica
  misc_feature (20)..(88): Homolog of NCBI NO: 28628595 NR Description: TMV induced protein 1-2 [Capsicum annuum]
  misc_feature (30)..(88): Homolog of NCBI NO: 21740887 NR Description: OSJNBa0036B21.1 [Oryza sativa (japonica
  misc_feature (1)..(88): Homolog of NCBI NO: 12667247 NR Description: dehydration stress-induced protein [Brassica
  misc_feature (1)..(88): Homolog of NCBI NO: 15236014 NR Description: putative protein; protein id: At4g39730.1, by cDNA: 5968., supported by cDNA: gi_15982878, supported by gi_19310488, supported by cDNA: gi_20147334 [Arabidopsis
  misc_feature (25)..(88): Homolog of NCBI NO: 18399899 NR Description: expressed protein; protein id: At2g22170.1, by cDNA: 15081. [Arabidopsis thaliana] >gi|25361059|pir||G84609
  misc_feature (25)..(88): Homolog of NCBI NO: 21553555 NR Description: dehydration stress-induced protein [Arabidopsis
  misc_feature (31)..(88): Homolog of NCBI NO: 7542598 NR Description: TMV-induced protein I [Capsicum annuum]
  misc_feature (1)..(88): Homolog of NCBI NO: 10241929 NR Description: elicitor inducible protein [Nicotiana tabacum]
MAKLAVLLLLAVAASATVPAHGRDTPTEIKAGTDANVTLELAAADGNGVGISNLPAWGGLMGQGYSYFERSNLDIFSGRGPCMAKAPCVDAAGHRRHRRPPRVVLQLRGGHHHGPAQGVRAAAVHRRAVARHRRPALQARGRSRLLQRRRQGRLGGVMWPAAGRRRAQHTRLDWTCWVAWFGWLVTSRNKLWAHGRRAREWRAPRCMRVW

SEQ ID NO: 10005 - protein, 171 aa, Zea mays subsp. mays
  peptide (1)..(171): Ceres Seq. ID no. 12356962
  misc_feature (105)..(156): Pfam Name: PLAT/LH2 domain Pfam Description: PLAT/LH2 domain
  misc_feature (95)..(171): Homolog of NCBI NO: 32492140 NR Description: OSJNBa0036B21.4 [Oryza sativa (japonica
  misc_feature (105)..(167): Homolog of NCBI NO: 32492139 NR Description: OSJNBa0036B21.2 [Oryza sativa (japonica
  misc_feature (95)..(161): Homolog of NCBI NO: 28628595 NR Description: TMV induced protein 1-2 [Capsicum annuum]
  misc_feature (105)..(171): Homolog of NCBI NO: 21740887 NR Description: OSJNBa0036B21.1 [Oryza sativa (japonica
  misc_feature (105)..(161): Homolog of NCBI NO: 12667247 NR Description: dehydration stress-induced protein [Brassica
  misc_feature (105)..(161): Homolog of NCBI NO: 15236014 NR Description: putative protein; protein id: At4g39730.1, by cDNA: 5968., supported by cDNA: gi_15982878, supported by gi_19310488, supported by cDNA: gi_20147334 [Arabidopsis
  misc_feature (105)..(161): Homolog of NCBI NO: 21553555 NR Description: dehydration stress-induced protein [Arabidopsis
  misc_feature (105)..(161): Homolog of NCBI NO: 18399899 NR Description: expressed protein; protein id: At2g22170.1, by cDNA: 15081. [Arabidopsis thaliana] >gi|25361059|pir||G84609
  misc_feature (95)..(161): Homolog of NCBI NO: 7542598 NR Description: TMV-induced protein I [Capsicum annuum]
  misc_feature (105)..(164): Homolog of NCBI NO: 10241929 NR Description: elicitor inducible protein [Nicotiana tabacum]
GRAHPIQSPDCIGIPWPSSPSSSSSPWPRPPQCRRTAAIPRLRSRPGRTRTSRWSWPPRTATAWGSRTCPPGAGSWGRATPTSSAATWTSSAAAGPAWRRRRAWMRLATDGTGDHHGWYCNYVEVTTTGPHKGCGQQLFTVEQWLATDAPPFKLEAVRDYCSGDAKGASAA

SEQ ID NO: 10006 - protein, 150 aa, Zea mays subsp. mays
  peptide (1)..(150): Ceres Seq. ID no. 12356963
  misc_feature (1)..(28): Homolog of NCBI NO: 32492140 NR Description: OSJNBa0036B21.4 [Oryza sativa (japonica
  misc_feature (1)..(28): Homolog of NCBI NO: 32492139 NR Description: OSJNBa0036B21.2 [Oryza sativa (japonica
  misc_feature (1)..(28): Homolog of NCBI NO: 28628595 NR Description: TMV induced protein 1-2 [Capsicum annuum]
  misc_feature (1)..(28): Homolog of NCBI NO: 21740887 NR Description: OSJNBa0036B21.1 [Oryza sativa (japonica
  misc_feature (1)..(28): Homolog of NCBI NO: 12667247 NR Description: dehydration stress-induced protein [Brassica
  misc_feature (1)..(28): Homolog of NCBI NO: 15236014 NR Description: putative protein; protein id: At4g39730.1, by cDNA: 5968., supported by cDNA: gi_15982878, supported by gi_19310488, supported by cDNA: gi_20147334 [Arabidopsis
  misc_feature (1)..(28): Homolog of NCBI NO: 18399899 NR Description: expressed protein; protein id: At2g22170.1, by cDNA: 15081. [Arabidopsis thaliana] >gi|25361059|pir||G84609
  misc_feature (1)..(28): Homolog of NCBI NO: 21553555 NR Description: dehydration stress-induced protein [Arabidopsis
  misc_feature (1)..(28): Homolog of NCBI NO: 7542598 NR Description: TMV-induced protein I [Capsicum annuum]
  misc_feature (1)..(28): Homolog of NCBI NO: 10241929 NR Description: elicitor inducible protein [Nicotiana tabacum]
MGQGYSYFERSNLDIFSGRGPCMAKAPCVDAAGHRRHRRPPRVVLQLRGGHHHGPAQGVRAAAVHRRAVARHRRPALQARGRSRLLQRRRQGRLGGVMWPAAGRRRAQHTRLDWTCWVAWFGWLVTSRNKLWAHGRRAREWRAPRCMRVW

SEQ ID NO: 10007 - DNA, 1522 bp, Zea mays subsp. mays
  misc_feature (1)..(1522): Ceres Seq. ID no. 12407056
  misc_feature: MA Experiment ID: 108522 Result: Down-regulated in Transcription
  misc_feature: MA Experiment 108522 PARAMETER Experiment Name: Zm_42deg_Heat_P Parameter: Age (day) Value: 8
  misc_feature: MA Experiment 108522 PARAMETER Experiment Name: Zm_42deg_Heat_P Parameter: Organism Value: Zea mays
  misc_feature: MA Experiment 108522 PARAMETER Experiment Name: Zm_42deg_Heat_P Parameter: Plant Line Value: 35A19
  misc_feature: MA Experiment 108522 PARAMETER Experiment Name: Zm_42deg_Heat_P Parameter: Temperature (deg C) Value: 42 vs. 22
  misc_feature: MA Experiment 108522 PARAMETER Experiment Name: Zm_42deg_Heat_P Parameter: Timepoint (hr) Value: 1
  misc_feature: MA Experiment 108522 PARAMETER Experiment Name: Zm_42deg_Heat_P Parameter: Tissue Value: Aerial
  misc_feature: MA Experiment ID: 108523 Result: Down-regulated in Transcription
  misc_feature: MA Experiment 108523 PARAMETER Experiment Name: Zm_42deg_Heat_P Parameter: Age (day) Value: 8
  misc_feature: MA Experiment 108523 PARAMETER Experiment Name: Zm_42deg_Heat_P Parameter: Organism Value: Zea mays
  misc_feature: MA Experiment 108523 PARAMETER Experiment Name: Zm_42deg_Heat_P Parameter: Plant Line Value: 35A19
  misc_feature: MA Experiment 108523 PARAMETER Experiment Name: Zm_42deg_Heat_P Parameter: Temperature (deg C) Value: 42 vs. 22
  misc_feature: MA Experiment 108523 PARAMETER Experiment Name: Zm_42deg_Heat_P Parameter: Timepoint (hr) Value: 6
  misc_feature: MA Experiment 108523 PARAMETER Experiment Name: Zm_42deg_Heat_P Parameter: Tissue Value: Aerial
  misc_feature: MA Experiment ID: 108528 Result: Up-regulated in Transcription
  misc_feature: MA Experiment 108528 PARAMETER Experiment Name: Zm_Imbibed_Seeds_P Parameter: Age (day) Value: 5 vs. 2
  misc_feature: MA Experiment 108528 PARAMETER Experiment Name: Zm_Imbibed_Seeds_P Parameter: Organism Value: Zea mays
  misc_feature: MA Experiment 108528 PARAMETER Experiment Name: Zm_Imbibed_Seeds_P Parameter: Plant Line Value: 35A19
  misc_feature: MA Experiment 108528 PARAMETER Experiment Name: Zm_Imbibed_Seeds_P Parameter: Tissue Value: Aerial vs. Embryo
  misc_feature: MA Experiment ID: 108530 Result: Up-regulated in Transcription
  misc_feature: MA Experiment 108530 PARAMETER Experiment Name: Zm_Imbibed_Seeds_P Parameter: Age (day) Value: 6 vs. 2
  misc_feature: MA Experiment 108530 PARAMETER Experiment Name: Zm_Imbibed_Seeds_P Parameter: Organism Value: Zea mays
  misc_feature: MA Experiment 108530 PARAMETER Experiment Name: Zm_Imbibed_Seeds_P Parameter: Plant Line Value: 35A19
  misc_feature: MA Experiment 108530 PARAMETER Experiment Name: Zm_Imbibed_Seeds_P Parameter: Tissue Value: Aerial vs. Embryo
  misc_feature: MA Experiment ID: 108535 Result: Down-regulated in Transcription
  misc_feature: MA Experiment 108535 PARAMETER Experiment Name: Zm_Meristem_P Parameter: Age (day) Value: 8
  misc_feature: MA Experiment 108535 PARAMETER Experiment Name: Zm_Meristem_P Parameter: Organism Value: Zea mays
  misc_feature: MA Experiment 108535 PARAMETER Experiment Name: Zm_Meristem_P Parameter: Plant Line Value: 35A19
  misc_feature: MA Experiment 108535 PARAMETER Experiment Name: Zm_Meristem_P Parameter: Tissue Value: Root Meristem vs. Above Root Meristem
  misc_feature: MA Experiment ID: 108536 Result: Down-regulated in Transcription
  misc_feature: MA Experiment 108536 PARAMETER Experiment Name: Zm_Meristem_P Parameter: Age (day) Value: 8
  misc_feature: MA Experiment 108536 PARAMETER Experiment Name: Zm_Meristem_P Parameter: Organism Value: Zea mays
  misc_feature: MA Experiment 108536 PARAMETER Experiment Name: Zm_Meristem_P Parameter: Plant Line Value: 35A19
  misc_feature: MA Experiment 108536 PARAMETER Experiment Name: Zm_Meristem_P Parameter: Tissue Value: Shoot Meristem vs. Above Shoot Meristem
  misc_feature: MA Experiment ID: 108543 Result: Up-regulated in Transcription
  misc_feature: MA Experiment ID: 108545 Result: Up-regulated in Transcription
  misc_feature: MA Experiment 108545 PARAMETER Experiment Name: Zm_Imbibed_Seeds_P Parameter: Age (day) Value: 3 vs. 2
  misc_feature: MA Experiment 108545 PARAMETER Experiment Name: Zm_Imbibed_Seeds_P Parameter: Organism Value: Zea mays
  misc_feature: MA Experiment 108545 PARAMETER Experiment Name: Zm_Imbibed_Seeds_P Parameter: Plant Line Value: 35A19
  misc_feature: MA Experiment 108545 PARAMETER Experiment Name: Zm_Imbibed_Seeds_P Parameter: Tissue Value: Aerial vs. Embryo
  misc_feature: MA Experiment ID: 108546 Result: Down-regulated in Transcription
  misc_feature: MA Experiment 108546 PARAMETER Experiment Name: Zm_Imbibed_Seeds_P Parameter: Age (day) Value: 3 vs. 2
  misc_feature: MA Experiment 108546 PARAMETER Experiment Name: Zm_Imbibed_Seeds_P Parameter: Organism Value: Zea mays
  misc_feature: MA Experiment 108546 PARAMETER Experiment Name: Zm_Imbibed_Seeds_P Parameter: Plant Line Value: 35A19
  misc_feature: MA Experiment 108546 PARAMETER Experiment Name: Zm_Imbibed_Seeds_P Parameter: Tissue Value: Roots vs. Embryo
  misc_feature: MA Experiment ID: 108547 Result: Up-regulated in Transcription
  misc_feature: MA Experiment 108547 PARAMETER Experiment Name: Zm_Imbibed_Seeds_P Parameter: Age (day) Value: 4 vs. 2
  misc_feature: MA Experiment 108547 PARAMETER Experiment Name: Zm_Imbibed_Seeds_P Parameter: Organism Value: Zea mays
  misc_feature: MA Experiment 108547 PARAMETER Experiment Name: Zm_Imbibed_Seeds_P Parameter: Plant Line Value: 35A19
  misc_feature: MA Experiment 108547 PARAMETER Experiment Name: Zm_Imbibed_Seeds_P Parameter: Tissue Value: Aerial vs. Embryo
  misc_feature: MA Experiment ID: 108597 Result: Down-regulated in Transcription
  misc_feature: MA Experiment 108597 PARAMETER Experiment Name: Zm_100uM_ABA_P Parameter: Age (day) Value: 9
  misc_feature: MA Experiment 108597 PARAMETER Experiment Name: Zm_100uM_ABA_P Parameter: Organism Value: Zea mays
  misc_feature: MA Experiment 108597 PARAMETER Experiment Name: Zm_100uM_ABA_P Parameter: Plant Line Value: 35A19
  misc_feature: MA Experiment 108597 PARAMETER Experiment Name: Zm_100uM_ABA_P Parameter: Timepoint (hr) Value: 24
  misc_feature: MA Experiment 108597 PARAMETER Experiment Name: Zm_100uM_ABA_P Parameter: Tissue Value: Aerial
  misc_feature: MA Experiment 108597 PARAMETER Experiment Name: Zm_100uM_ABA_P Parameter: Treatment Value: 100uM ABA vs. No Treatment
  misc_feature: MA Experiment ID: 108689 Result: Down-regulated in Transcription
  misc_feature: MA Experiment 108689 PARAMETER Experiment Name: Zm_Drought_Roots_P Parameter: Age (day) Value: 9
  misc_feature: MA Experiment 108689 PARAMETER Experiment Name: Zm_Drought_Roots_P Parameter: Organism Value: Zea mays
  misc_feature: MA Experiment 108689 PARAMETER Experiment Name: Zm_Drought_Roots_P Parameter: Plant Line Value: 35A19
  misc_feature: MA Experiment 108689 PARAMETER Experiment Name: Zm_Drought_Roots_P Parameter: Timepoint (hr) Value: 24
  misc_feature: MA Experiment 108689 PARAMETER Experiment Name: Zm_Drought_Roots_P Parameter: Tissue Value: Roots
  misc_feature: MA Experiment 108689 PARAMETER Experiment Name: Zm_Drought_Roots_P Parameter: Treatment Value: Drought vs. No Drought
  misc_feature: MA Experiment ID: 20000477 Result: Down-regulated in Transcription
  misc_feature: MA Experiment 20000477 PARAMETER Experiment Name: Zm_5mM_SA_P Parameter: Age (day) Value: 10
  misc_feature: MA Experiment 20000477 PARAMETER Experiment Name: Zm_5mM_SA_P Parameter: Organism Value: Zea mays
  misc_feature: MA Experiment 20000477 PARAMETER Experiment Name: Zm_5mM_SA_P Parameter: Plant Line Value: 35A19
  misc_feature: MA Experiment 20000477 PARAMETER Experiment Name: Zm_5mM_SA_P Parameter: Timepoint (hr) Value: 48
  misc_feature: MA Experiment 20000477 PARAMETER Experiment Name: Zm_5mM_SA_P Parameter: Tissue Value: Aerial
  misc_feature: MA Experiment 20000477 PARAMETER Experiment Name: Zm_5mM_SA_P Parameter: Treatment Value: 5mM SA vs. No Treatment
  misc_feature: MA Experiment ID: 20000478 Result: Down-regulated in Transcription
  misc_feature: MA Experiment 20000478 PARAMETER Experiment Name: Zm_5mM_SA_P Parameter: Age (day) Value: 11
  misc_feature: MA Experiment 20000478 PARAMETER Experiment Name: Zm_5mM_SA_P Parameter: Organism Value: Zea mays
  misc_feature: MA Experiment 20000478 PARAMETER Experiment Name: Zm_5mM_SA_P Parameter: Plant Line Value: 35A19
  misc_feature: MA Experiment 20000478 PARAMETER Experiment Name: Zm_5mM_SA_P Parameter: Timepoint (hr) Value: 72
  misc_feature: MA Experiment 20000478 PARAMETER Experiment Name: Zm_5mM_SA_P Parameter: Tissue Value: Aerial
  misc_feature: MA Experiment 20000478 PARAMETER Experiment Name: Zm_5mM_SA_P Parameter: Treatment Value: 5mM SA vs. No Treatment
  misc_feature: MA Experiment ID: 20000480 Result: Down-regulated in Transcription
  misc_feature: MA Experiment 20000480 PARAMETER Experiment Name: Zm_Drought_P Parameter: Age (day) Value: 11
  misc_feature: MA Experiment 20000480 PARAMETER Experiment Name: Zm_Drought_P Parameter: Organism Value: Zea mays
  misc_feature: MA Experiment 20000480 PARAMETER Experiment Name: Zm_Drought_P Parameter: Plant Line Value: 35A19
  misc_feature: MA Experiment 20000480 PARAMETER Experiment Name: Zm_Drought_P Parameter: Timepoint (hr) Value: 72
  misc_feature: MA Experiment 20000480 PARAMETER Experiment Name: Zm_Drought_P Parameter: Tissue Value: Aerial
  misc_feature: MA Experiment 20000480 PARAMETER Experiment Name: Zm_Drought_P Parameter: Treatment Value: Drought vs. No Drought
acgcaggaggtagcgttccactcgcttcgcggtggccatggtctcgtctccttcccctcccttgcccaccggtgtaagtgtgcctccctccctccttcctcctgcctcctctcctctgttaccgcggttctgccgtggctgagtatacgagtcgttcactgcacaatggtgcgccgtcaggcctccgagccgaagcagcagcgaggcggcaccaaggcggcgccggagaaggccgacaagaagtacgcgcacgtcccgacgccgctccaccacggtcacggcggtgccagcaacaagacaacaccccgcggggccaaggacgccgccggcccggcggcgtacgtcgcggcggtgtccttctccgactgccgcttcaagcagcgcgccctcgcgccggcgtcgcccggcgccgtcatccgctcgctgttcgtctccctcacccgccgctccaccccgcgctcgtcgccgtcggccacgccggcctcggcaggcgccgacgcgggggacggcgagcagtggcgcctcgccgcggccgacctctcccgcaggctcgccgcggccacgcgcacgcgggacgaggcgctggaggagaccacgcgcctgaagcactccctcgccgagctggagcacaagctcgcgcgcctcgaggcgcgcgtgctcccgacccccgcggccgccttccccgtcgactccttcctccgcgccgtctcgaccgcccgcgccgccgtgcggaacctcgcgcgcgcgctgtctgcccacctccgcagcccctccagccccggcccgagcctcgagagcttcctcaaccgcgcgttccacgccgacttcgagctggacaccgacgccgatgctcacaccacggaccccgcgggccggtgccaggccaacctcgcggcgtaccacgccgtcgcggtgctcacgtgggaggaggtcctcctccacggcaccaagcactacagcgaggggctcagccgcttctgcgacgccaagatgagcgaggtggtgtcctcgctcggctgggcgcgcgcgcggccgtggcctgagccgctgctgcaggccttcttcctcgccgccaagggcgtgtggggcgtccgcctcctggcgcgctccgtccacccgccgctccccgttgtgcgcgccgagcgaggcgcgcgcttcgacccgcggttcatggaggacgccgcggccagccgggcggggacgctggaaccggccagcgtgaagatgatgatggcgccagggttccacgtctacctggccggcgcgggcgtggtgaaatgcagggtcgtctgcttctacaccagcagtaacgcccgcacagacggccacagagatggcgggagcagcgccaacggcagcgtggggttggggagtagctgtagtgacattaatgggagtgctacagatgtggttgatagctgtagagcagtgaagtagggtaaaatgttgcccttgcacaggtagaaagaacacggggattttacttgttcgctaaaaaaacatgatgatctgcgtttaggcg

SEQ ID NO: 10008 - protein, 478 aa, Zea mays subsp. mays
  peptide (1)..(478): Ceres Seq. ID no. 12407057
  misc_feature (250)..(465): Homolog of NCBI NO: 22329507 NR Description: hypothetical protein; protein id: At1g12330.1
  misc_feature (78)..(216): Homolog of NCBI NO: 22329507 NR Description: hypothetical protein; protein id: At1g12330.1
  misc_feature (264)..(435): Homolog of NCBI NO: 15239939 NR Description: putative protein; protein id: At5g12900.1
  misc_feature (136)..(217): Homolog of NCBI NO: 15239939 NR Description: putative protein; protein id: At5g12900.1
TQEVAFHSLRGGHGLVSFPSLAHRCKCASLPPSSCLLSSVTAVLPWLSIRVVHCTMVRRQASEPKQQRGGTKAAPEKADKKYAHVPTPLHHGHGGASNKTTPRGAKDAAGPAAYVAAVSFSDCRFKQRALAPASPGAVIRSLFVSLTRRSTPRSSPSATPASAGADAGDGEQWRLAAADLSRRLAAATRTRDEALEETTRLKHSLAELEHKLARLEARVLPTPAAAFPVDSFLRAVSTARAAVRNLARALSAHLRSPSSPGPSLESFLNRAFHADFELDTDADAHTTDPAGRCQANLAAYHAVAVLTWEEVLLHGTKHYSEGLSRFCDAKMSEVVSSLGWARARPWPEPLLQAFFLAAKGVWGVRLLARSVHPPLPVVRAERGARFDPRFMEDAAASRAGTLEPASVKMMMAPGFHVYLAGAGVVKCRVVCFYTSSNARTDGHRDGGSSANGSVGLGSSCSDINGSATDVVDSCRAVK

SEQ ID NO: 10009 - protein, 423 aa, Zea mays subsp. mays
  peptide (1)..(423): Ceres Seq. ID no. 12407058
  misc_feature (195)..(410): Homolog of NCBI NO: 22329507 NR Description: hypothetical protein; protein id: At1g12330.1
  misc_feature (23)..(161): Homolog of NCBI NO: 22329507 NR Description: hypothetical protein; protein id: At1g12330.1
  misc_feature (209)..(380): Homolog of NCBI NO: 15239939 NR Description: putative protein; protein id: At5g12900.1
  misc_feature (81)..(162): Homolog of NCBI NO: 15239939 NR Description: putative protein; protein id: At5g12900.1
MVRRQASEPKQQRGGTKAAPEKADKKYAHVPTPLHHGHGGASNKTTPRGAKDAAGPAAYVAAVSFSDCRFKQRALAPASPGAVIRSLFVSLTRRSTPRSSPSATPASAGADAGDGEQWRLAAADLSRRLAAATRTRDEALEETTRLKHSLAELEHKLARLEARVLPTPAAAFPVDSFLRAVSTARAAVRNLARALSAHLRSPSSPGPSLESFLNRAFHADFELDTDADAHTTDPAGRCQANLAAYHAVAVLTWEEVLLHGTKHYSEGLSRFCDAKMSEVVSSLGWARARPWPEPLLQAFFLAAKGVWGVRLLARSVHPPLPVVRAERGARFDPRFMEDAAASRAGTLEPASVKMMMAPGFHVYLAGAGVVKCRVVCFYTSSNARTDGHRDGGSSANGSVGLGSSCSDINGSATDVVDSCRAVK

SEQ ID NO: 10010 - DNA, 1938 bp, Zea mays subsp. mays
  misc_feature (1)..(1938): Ceres Seq. ID no. 12407120
  misc_feature: MA Experiment ID: 20000480 Result: Down-regulated in Transcription
  misc_feature: MA Experiment 20000480 PARAMETER Experiment Name: Zm_Drought_P Parameter: Age (day) Value: 11
  misc_feature: MA Experiment 20000480 PARAMETER Experiment Name: Zm_Drought_P Parameter: Organism Value: Zea mays
  misc_feature: MA Experiment 20000480 PARAMETER Experiment Name: Zm_Drought_P Parameter: Plant Line Value: 35A19
  misc_feature: MA Experiment 20000480 PARAMETER Experiment Name: Zm_Drought_P Parameter: Timepoint (hr) Value: 72
  misc_feature: MA Experiment 20000480 PARAMETER Experiment Name: Zm_Drought_P Parameter: Tissue Value: Aerial
  misc_feature: MA Experiment 20000480 PARAMETER Experiment Name: Zm_Drought_P Parameter: Treatment Value: Drought vs. No Drought
aataaagtccacaaccatttcatttcttctttccccaattcccgtccatcagctcgcaccagcgaccagagcagcagaccaagcaagcgcgagggagagaagagacgaagaagaaaagaaaagccggagctctgccgagcttagtccgcggaggcggcgaccggcgacgcgtaaccatggagcgggcggaggaggcgcagcccgccgccgagcggagggcgccctcgacggcgccgtcggcgcgggtgtcgatctgggagtcggtacgcgcgtgcggggtgtgggggaaggagctggacaaggccgagctgtggaggcaggtcgtcatgccacgctacctgcgccgggccgtcgcggccgccgtcaaggccaaggacgaggccgccggcgtggcggtggcggcggcggccgcggaggaccgcgcgggggaggacgccgacggcccggcggtggcgcccgtggtggtgttcgtcaactcgcgcagtggcgggcgccacgggcccgagctcaaggtgcggctgcacgagctcatcaccgaggagcaggtctttgatctttcagttgtgaagccttcagattttgttcaccatggtttgagttgtttggagaggttagctgaccaaggcgataaccgtgcgaaggctgttcgtgagaaaatgaggattgtggttgctgggggtgacggtacagttggttgggtgcttggatgtctctcagatctttataagatgaaaagggaaccggttccacctacaggaatcattccacttggtacaggaaatgatcttgctagatcgtttggatggggtggctcttttccctttggttggcgctcagctgtaaagcgttatctcagcaaagcttccagatctcccatttgccgtcttgacagctggcaaactgtaattcagatgccagaaggagaaatagaagagttgccatatgcacttaagaaagtagaacctggagaccggttggaggtcagccaggagaacggtacagagttatccgaaaaggcttctttctataaaggagtattctacaactaccttagcattgggatggatgctcaggttgcatatggcttccatcatcttcgtgatgaaaagccatatcttgcacaaggaccagttgcaaataagttgatttatgctggatatagctgcactcaggggtggttttgtacaccttgcacagcgagtccacagctaagggggcttaagaacattttgcggctttccattaaaaaggccaattgttcagagtgggagcaagtgaaaatgccttcaagcgttagatccctagttgtgttaaatttatacaattatggcagtggaaggcatccatggggtgatctaagacctgagtatctcgaaaagaaaggctttgttgaagcccattcagatgatggcttgcttgaaatatttggtctgaaggaaggttggcatgcttcatttgtcatggccgagcttatcaaagcaaagcacattgcccaggctgcggctatcaagttcgaaatgaggggtggcgagtggaaccgagcatatgttcagatggacggagagccgtggaaacaaccgctcctacaggagcactcaaccatcgtggaaataaacaaagttccgtaccattctctcatgataaacggggagtaatgagatttttcctctgtcaaccagattgtaccagggctgcattcatagatcgttaggatcgtgtacagttcaggagcagcgggcactagatccttagaactgggtcggacggactgcagcgaggatggcatgcatgttcgttttggccttttgtcgtgctatggtcgaagccatggccggagcgtggtgtggcaccatgcattgttgtattcgtaccataatatgtgcgttgttgtatcctaagttctttttgaaagaaacatgatttatttgtttgtattgc

SEQ ID NO: 10011 - protein, 492 aa, Zea mays subsp. mays
  peptide (1)..(492): Ceres Seq. ID no. 12407121
  misc_feature (287)..(464): Pfam Name: Diacylglycerol kinase accessory domain (presumed) Pfam Description: Diacylglycerol kinase accessory domain
  misc_feature (10)..(492): Homolog of NCBI NO: 30680460 NR Description: diacylglycerol kinase -related [Arabidopsis >gi|18086345|gb|AAL57635.1| At2g18730/MSF3.11 [Arabidopsis >gi|22655324|gb|AAM98254.1| At2g18730/MSF3.11 [Arabidopsis
  misc_feature (20)..(492): Homolog of NCBI NO: 25407626 NR Description: hypothetical protein AT4g30340 [imported] - thaliana >gi|7269934|emb|CAB81027.1| putative protein
  misc_feature (40)..(492): Homolog of NCBI NO: 15242824 NR Description: diacylglycerol kinase-like protein; protein id:
  misc_feature (84)..(492): Homolog of NCBI NO: 25411895 NR Description: probable diacylglycerol kinase [imported] - thaliana >gi|4185139|gb|AAD08942.1| putative diacylglycerol
  misc_feature (71)..(491): Homolog of NCBI NO: 40253749 NR Description: putative diacylglycerol kinase variant A [Oryza
  misc_feature (20)..(370): Homolog of NCBI NO: 18417574 NR Description: putative protein; protein id: At4g30340.1, by cDNA: gi_13430523, supported by cDNA: gi_21280997 [Arabidopsis >gi|13430524|gb|AAK25884.1|AF360174_1 unknown protein
  misc_feature (74)..(480): Homolog of NCBI NO: 18399515 NR Description: putative diacylglycerol kinase; protein id: supported by cDNA: 15863. [Arabidopsis thaliana]
  misc_feature (74)..(480): Homolog of NCBI NO: 30681194 NR Description: diacylglycerol kinase -related [Arabidopsis >gi|13430776|gb|AAK26010.1|AF360300_1 putative diacylglycerol [Arabidopsis thaliana] >gi|24030462|gb|AAN41383.1| putative
  misc_feature (74)..(480): Homolog of NCBI NO: 25412001 NR Description: probable diacylglycerol kinase [imported] -
  misc_feature (74)..(480): Homolog of NCBI NO: 21553717 NR Description: putative diacylglycerol kinase [Arabidopsis
MERAEEAQPAAERRAPSTAPSARVSIWESVRACGVWGKELDKAELWRQVVMPRYLRRAVAAAVKAKDEAAGVAVAAAAAEDRAGEDADGPAVAPVVVFVNSRSGGRHGPELKVRLHELITEEQVFDLSVVKPSDFVHHGLSCLERLADQGDNRAKAVREKMRIVVAGGDGTVGWVLGCLSDLYKMKREPVPPTGIIPLGTGNDLARSFGWGGSFPFGWRSAVKRYLSKASRSPICRLDSWQTVIQMPEGEIEELPYALKKVEPGDRLEVSQENGTELSEKASFYKGVFYNYLSIGMDAQVAYGFHHLRDEKPYLAQGPVANKLIYAGYSCTQGWFCTPCTASPQLRGLKNILRLSIKKANCSEWEQVKMPSSVRSLVVLNLYNYGSGRHPWGDLRPEYLEKKGFVEAHSDDGLLEIFGLKEGWHASFVMAELIKAKHIAQAAAIKFEMRGGEWNRAYVQMDGEPWKQPLLQEHSTIVEINKVPYHSLMINGE

SEQ ID NO: 10012 - protein, 442 aa, Zea mays subsp. mays
  peptide (1)..(442): Ceres Seq. ID no. 12407122
  misc_feature (237)..(414): Pfam Name: Diacylglycerol kinase accessory domain (presumed) Pfam Description: Diacylglycerol kinase accessory domain
  misc_feature (1)..(442): Homolog of NCBI NO: 30680460 NR Description: diacylglycerol kinase -related [Arabidopsis >gi|18086345|gb|AAL57635.1| At2g18730/MSF3.11 [Arabidopsis >gi|22655324|gb|AAM98254.1| At2g18730/MSF3.11 [Arabidopsis
  misc_feature (1)..(442): Homolog of NCBI NO: 25407626 NR Description: hypothetical protein AT4g30340 [imported] - thaliana >gi|7269934|emb|CAB81027.1| putative protein
  misc_feature (1)..(442): Homolog of NCBI NO: 15242824 NR Description: diacylglycerol kinase-like protein; protein id:
  misc_feature (34)..(442): Homolog of NCBI NO: 25411895 NR Description: probable diacylglycerol kinase [imported] - thaliana >gi|4185139|gb|AAD08942.1| putative diacylglycerol
  misc_feature (21)..(441): Homolog of NCBI NO: 40253749 NR Description: putative diacylglycerol kinase variant A [Oryza
  misc_feature (1)..(320): Homolog of NCBI NO: 18417574 NR Description: putative protein; protein id: At4g30340.1, by cDNA: gi_13430523, supported by cDNA: gi_21280997 [Arabidopsis >gi|13430524|gb|AAK25884.1|AF360174_1 unknown protein
  misc_feature (24)..(430): Homolog of NCBI NO: 18399515 NR Description: putative diacylglycerol kinase; protein id: supported by cDNA: 15863. [Arabidopsis thaliana]
  misc_feature (24)..(430): Homolog of NCBI NO: 30681194 NR Description: diacylglycerol kinase -related [Arabidopsis >gi|13430776|gb|AAK26010.1|AF360300_1 putative diacylglycerol [Arabidopsis thaliana] >gi|24030462|gb|AAN41383.1| putative
  misc_feature (24)..(430): Homolog of NCBI NO: 25412001 NR Description: probable diacylglycerol kinase [imported] -
  misc_feature (24)..(430): Homolog of NCBI NO: 21553717 NR Description: putative diacylglycerol kinase [Arabidopsis
MPRYLRRAVAAAVKAKDEAAGVAVAAAAAEDRAGEDADGPAVAPVVVFVNSRSGGRHGPELKVRLHELITEEQVFDLSVVKPSDFVHHGLSCLERLADQGDNRAKAVREKMRIVVAGGDGTVGWVLGCLSDLYKMKREPVPPTGIIPLGTGNDLARSFGWGGSFPFGWRSAVKRYLSKASRSPICRLDSWQTVIQMPEGEIEELPYALKKVEPGDRLEVSQENGTELSEKASFYKGVFYNYLSIGMDAQVAYGFHHLRDEKPYLAQGPVANKLIYAGYSCTQGWFCTPCTASPQLRGLKNILRLSIKKANCSEWEQVKMPSSVRSLVVLNLYNYGSGRHPWGDLRPEYLEKKGFVEAHSDDGLLEIFGLKEGWHASFVMAELIKAKHIAQAAAIKFEMRGGEWNRAYVQMDGEPWKQPLLQEHSTIVEINKVPYHSLMINGE

SEQ ID NO: 10013 - protein, 332 aa, Zea mays subsp. mays
  peptide (1)..(332): Ceres Seq. ID no. 12407123
  misc_feature (127)..(304): Pfam Name: Diacylglycerol kinase accessory domain (presumed) Pfam Description: Diacylglycerol kinase accessory domain
  misc_feature (1)..(332): Homolog of NCBI NO: 30680460 NR Description: diacylglycerol kinase -related [Arabidopsis >gi|18086345|gb|AAL57635.1| At2g18730/MSF3.11 [Arabidopsis >gi|22655324|gb|AAM98254.1| At2g18730/MSF3.11 [Arabidopsis
  misc_feature (1)..(332): Homolog of NCBI NO: 25407626 NR Description: hypothetical protein AT4g30340 [imported] - thaliana >gi|7269934|emb|CAB81027.1| putative protein
  misc_feature (1)..(332): Homolog of NCBI NO: 15242824 NR Description: diacylglycerol kinase-like protein; protein id:
  misc_feature (1)..(332): Homolog of NCBI NO: 25411895 NR Description: probable diacylglycerol kinase [imported] - thaliana >gi|4185139|gb|AAD08942.1| putative diacylglycerol
  misc_feature (1)..(331): Homolog of NCBI NO: 40253749 NR Description: putative diacylglycerol kinase variant A [Oryza
  misc_feature (1)..(210): Homolog of NCBI NO: 18417574 NR Description: putative protein; protein id: At4g30340.1, by cDNA: gi_13430523, supported by cDNA: gi_21280997 [Arabidopsis >gi|13430524|gb|AAK25884.1|AF360174_1 unknown protein
  misc_feature (1)..(320): Homolog of NCBI NO: 18399515 NR Description: putative diacylglycerol kinase; protein id: supported by cDNA: 15863. [Arabidopsis thaliana]
  misc_feature (1)..(320): Homolog of NCBI NO: 30681194 NR Description: diacylglycerol kinase -related [Arabidopsis >gi|13430776|gb|AAK26010.1|AF360300_1 putative diacylglycerol [Arabidopsis thaliana] >gi|24030462|gb|AAN41383.1| putative
  misc_feature (1)..(320): Homolog of NCBI NO: 25412001 NR Description: probable diacylglycerol kinase [imported] -
  misc_feature (1)..(320): Homolog of NCBI NO: 21553717 NR Description: putative diacylglycerol kinase [Arabidopsis
MRIVVAGGDGTVGWVLGCLSDLYKMKREPVPPTGIIPLGTGNDLARSFGWGGSFPFGWRSAVKRYLSKASRSPICRLDSWQTVIQMPEGEIEELPYALKKVEPGDRLEVSQENGTELSEKASFYKGVFYNYLSIGMDAQVAYGFHHLRDEKPYLAQGPVANKLIYAGYSCTQGWFCTPCTASPQLRGLKNILRLSIKKANCSEWEQVKMPSSVRSLVVLNLYNYGSGRHPWGDLRPEYLEKKGFVEAHSDDGLLEIFGLKEGWHASFVMAELIKAKHIAQAAAIKFEMRGGEWNRAYVQMDGEPWKQPLLQEHSTIVEINKVPYHSLMINGE

SEQ ID NO: 10014 - DNA, 1426 bp, Zea mays subsp. mays
  misc_feature (1)..(1426): Ceres Seq. ID no. 12404995
  misc_feature: MA Experiment ID: 108504 Result: Up-regulated in Transcription
  misc_feature: MA Experiment 108504 PARAMETER Experiment Name: Zm_Drought_P Parameter: Age (day) Value: 8
  misc_feature: MA Experiment 108504 PARAMETER Experiment Name: Zm_Drought_P Parameter: Organism Value: Zea mays
  misc_feature: MA Experiment 108504 PARAMETER Experiment Name: Zm_Drought_P Parameter: Plant Line Value: 35A19
  misc_feature: MA Experiment 108504 PARAMETER Experiment Name: Zm_Drought_P Parameter: Timepoint (hr) Value: 12
  misc_feature: MA Experiment 108504 PARAMETER Experiment Name: Zm_Drought_P Parameter: Tissue Value: Aerial
  misc_feature: MA Experiment 108504 PARAMETER Experiment Name: Zm_Drought_P Parameter: Treatment Value: Drought vs. No Drought
  misc_feature: MA Experiment ID: 108527 Result: Up-regulated in Transcription
  misc_feature: MA Experiment 108527 PARAMETER Experiment Name: Zm_5mM_NO_P Parameter: Age (day) Value: 8
  misc_feature: MA Experiment 108527 PARAMETER Experiment Name: Zm_5mM_NO_P Parameter: Organism Value: Zea mays
  misc_feature: MA Experiment 108527 PARAMETER Experiment Name: Zm_5mM_NO_P Parameter: Plant Line Value: 35A19
  misc_feature: MA Experiment 108527 PARAMETER Experiment Name: Zm_5mM_NO_P Parameter: Timepoint (hr) Value: 6
  misc_feature: MA Experiment 108527 PARAMETER Experiment Name: Zm_5mM_NO_P Parameter: Tissue Value: Aerial
  misc_feature: MA Experiment 108527 PARAMETER Experiment Name: Zm_5mM_NO_P Parameter: Treatment Value: 5mM NO vs. No Treatment
  misc_feature: MA Experiment ID: 108540 Result: Up-regulated in Transcription
  misc_feature: MA Experiment 108540 PARAMETER Experiment Name: Zm_20percent_PEG_P Parameter: Age (day) Value: 8
  misc_feature: MA Experiment 108540 PARAMETER Experiment Name: Zm_20percent_PEG_P Parameter: Organism Value: Zea mays
  misc_feature: MA Experiment 108540 PARAMETER Experiment Name: Zm_20percent_PEG_P Parameter: Plant Line Value: 35A19
  misc_feature: MA Experiment 108540 PARAMETER Experiment Name: Zm_20percent_PEG_P Parameter: Timepoint (hr) Value: 6
  misc_feature: MA Experiment 108540 PARAMETER Experiment Name: Zm_20percent_PEG_P Parameter: Tissue Value: Aerial
  misc_feature: MA Experiment 108540 PARAMETER Experiment Name: Zm_20percent_PEG_P Parameter: Treatment Value: 20percent PEG vs. No Treatment
  misc_feature: MA Experiment ID: 108543 Result: Down-regulated in Transcription
  misc_feature: MA Experiment ID: 108544 Result: Down-regulated in Transcription
  misc_feature: MA Experiment ID: 108548 Result: Down-regulated in Transcription
  misc_feature: MA Experiment 108548 PARAMETER Experiment Name: Zm_20uM_KNO3_H-to-L_P Parameter: Age (day) Value: 11
  misc_feature: MA Experiment 108548 PARAMETER Experiment Name: Zm_20uM_KNO3_H-to-L_P Parameter: Organism Value: Zea mays
  misc_feature: MA Experiment 108548 PARAMETER Experiment Name: Zm_20uM_KNO3_H-to-L_P Parameter: Plant Line Value: 35A19
  misc_feature: MA Experiment 108548 PARAMETER Experiment Name: Zm_20uM_KNO3_H-to-L_P Parameter: Timepoint (hr) Value: 4
  misc_feature: MA Experiment 108548 PARAMETER Experiment Name: Zm_20uM_KNO3_H-to-L_P Parameter: Tissue Value: Roots
  misc_feature: MA Experiment 108548 PARAMETER Experiment Name: Zm_20uM_KNO3_H-to-L_P Parameter: Treatment Value: 20uM KNO3 vs. 60mM KNO3
  misc_feature: MA Experiment ID: 108556 Result: Up-regulated in Transcription
  misc_feature: MA Experiment 108556 PARAMETER Experiment Name: Zm_Drought_P Parameter: Age (day) Value: 9
  misc_feature: MA Experiment 108556 PARAMETER Experiment Name: Zm_Drought_P Parameter: Organism Value: Zea mays
  misc_feature: MA Experiment 108556 PARAMETER Experiment Name: Zm_Drought_P Parameter: Plant Line Value: 35A19
  misc_feature: MA Experiment 108556 PARAMETER Experiment Name: Zm_Drought_P Parameter: Timepoint (hr) Value: 24
  misc_feature: MA Experiment 108556 PARAMETER Experiment Name: Zm_Drought_P Parameter: Tissue Value: Aerial
  misc_feature: MA Experiment 108556 PARAMETER Experiment Name: Zm_Drought_P Parameter: Treatment Value: Drought vs. No Drought
  misc_feature: MA Experiment ID: 108597 Result: Up-regulated in Transcription
  misc_feature: MA Experiment 108597 PARAMETER Experiment Name: Zm_100uM_ABA_P Parameter: Age (day) Value: 9
  misc_feature: MA Experiment 108597 PARAMETER Experiment Name: Zm_100uM_ABA_P Parameter: Organism Value: Zea mays
  misc_feature: MA Experiment 108597 PARAMETER Experiment Name: Zm_100uM_ABA_P Parameter: Plant Line Value: 35A19
  misc_feature: MA Experiment 108597 PARAMETER Experiment Name: Zm_100uM_ABA_P Parameter: Timepoint (hr) Value: 24
  misc_feature: MA Experiment 108597 PARAMETER Experiment Name: Zm_100uM_ABA_P Parameter: Tissue Value: Aerial
  misc_feature: MA Experiment 108597 PARAMETER Experiment Name: Zm_100uM_ABA_P Parameter: Treatment Value: 100uM ABA vs. No Treatment
  misc_feature: MA Experiment ID: 108687 Result: Up-regulated in Transcription
  misc_feature: MA Experiment 108687 PARAMETER Experiment Name: Zm_Embryos-Flowers__P Parameter: Tissue Value: Embryo vs. Aerial+
  misc_feature: MA Experiment ID: 108688 Result: Down-regulated in Transcription
  misc_feature: MA Experiment 108688 PARAMETER Experiment Name: Zm_Embryos-Flowers__P Parameter: Tissue Value: Immature Flowers vs. Aerial+
  misc_feature: MA Experiment ID: 108689 Result: Up-regulated in Transcription
  misc_feature: MA Experiment 108689 PARAMETER Experiment Name: Zm_Drought_Roots_P Parameter: Age (day) Value: 9
  misc_feature: MA Experiment 108689 PARAMETER Experiment Name: Zm_Drought_Roots_P Parameter: Organism Value: Zea mays
  misc_feature: MA Experiment 108689 PARAMETER Experiment Name: Zm_Drought_Roots_P Parameter: Plant Line Value: 35A19
  misc_feature: MA Experiment 108689 PARAMETER Experiment Name: Zm_Drought_Roots_P Parameter: Timepoint (hr) Value: 24
  misc_feature: MA Experiment 108689 PARAMETER Experiment Name: Zm_Drought_Roots_P Parameter: Tissue Value: Roots
  misc_feature: MA Experiment 108689 PARAMETER Experiment Name: Zm_Drought_Roots_P Parameter: Treatment Value: Drought vs. No Drought
  misc_feature: MA Experiment ID: 20000477 Result: Up-regulated in Transcription
  misc_feature: MA Experiment 20000477 PARAMETER Experiment Name: Zm_5mM_SA_P Parameter: Age (day) Value: 10
  misc_feature: MA Experiment 20000477 PARAMETER Experiment Name: Zm_5mM_SA_P Parameter: Organism Value: Zea mays
  misc_feature: MA Experiment 20000477 PARAMETER Experiment Name: Zm_5mM_SA_P Parameter: Plant Line Value: 35A19
  misc_feature: MA Experiment 20000477 PARAMETER Experiment Name: Zm_5mM_SA_P Parameter: Timepoint (hr) Value: 48
  misc_feature: MA Experiment 20000477 PARAMETER Experiment Name: Zm_5mM_SA_P Parameter: Tissue Value: Aerial
  misc_feature: MA Experiment 20000477 PARAMETER Experiment Name: Zm_5mM_SA_P Parameter: Treatment Value: 5mM SA vs. No Treatment
  misc_feature: MA Experiment ID: 20000478 Result: Up-regulated in Transcription
  misc_feature: MA Experiment 20000478 PARAMETER Experiment Name: Zm_5mM_SA_P Parameter: Age (day) Value: 11
  misc_feature: MA Experiment 20000478 PARAMETER Experiment Name: Zm_5mM_SA_P Parameter: Organism Value: Zea mays
  misc_feature: MA Experiment 20000478 PARAMETER Experiment Name: Zm_5mM_SA_P Parameter: Plant Line Value: 35A19
  misc_feature: MA Experiment 20000478 PARAMETER Experiment Name: Zm_5mM_SA_P Parameter: Timepoint (hr) Value: 72
  misc_feature: MA Experiment 20000478 PARAMETER Experiment Name: Zm_5mM_SA_P Parameter: Tissue Value: Aerial
  misc_feature: MA Experiment 20000478 PARAMETER Experiment Name: Zm_5mM_SA_P Parameter: Treatment Value: 5mM SA vs. No Treatment
  misc_feature: MA Experiment ID: 20000479 Result: Up-regulated in Transcription
  misc_feature: MA Experiment 20000479 PARAMETER Experiment Name: Zm_Drought_P Parameter: Age (day) Value: 10
  misc_feature: MA Experiment 20000479 PARAMETER Experiment Name: Zm_Drought_P Parameter: Organism Value: Zea mays
  misc_feature: MA Experiment 20000479 PARAMETER Experiment Name: Zm_Drought_P Parameter: Plant Line Value: 35A19
  misc_feature: MA Experiment 20000479 PARAMETER Experiment Name: Zm_Drought_P Parameter: Timepoint (hr) Value: 48
  misc_feature: MA Experiment 20000479 PARAMETER Experiment Name: Zm_Drought_P Parameter: Tissue Value: Aerial
  misc_feature: MA Experiment 20000479 PARAMETER Experiment Name: Zm_Drought_P Parameter: Treatment Value: Drought vs. No Drought
aactctcgtatcgccggcgtatttagcttgcttcagggggcacgtggcggtggaagcttccctggcggtggtggtggtgcttggttgatgtcgatggcgcaggtctgctgtgactcggctgtagcggtgacggcggcaccggtggttggtgcggaggcggaggccagggccagggcgcgcgccgagaggcggagccgggccggagagtccggggcgtggaagcacgcggcggccgctggcacggccgatgccacgaggaagcggagtctcgggtcgggggagctgctgctggcgcggaagcacggggcggcgtcggtggccggccgcaggagggagatggaggacgccgtgtccgtgcgtgacgcgttctgcgcggagggcacggccgacggcgggaggcgcgacttctacggagtgttcgacggccacggctgctcgcacgtggccgaggcgtgccgggaccggatgcacgagctggtcgccgaggagctcgccgccaccgccgccgacagctccgtctccgcagcagcggcctggaccgcggcgatggaacgcagcttcgcgcggatggacgccgaggtgacgtcggccggagggcgcgccgccgccgccagaagcagcacctgccgctgcgacgcgcacaggtgcgaccatgtgggctctacggccgtggtggccgtcgtggaggagcacccgccgtccgtggtggccaactgcggcgacagccgcgccgtgctctgccgtggggacggcgcgccgccgctgccgctgtcgtcggaccacaagcccgaccgccccgacgagctggagcgcatcgagtccgccggcgggcgcgtcatcttctgggagggcgcgcgcgttctgggcgtcctcgccatgtcccgcgccgtcggggacggatacctgaagccgtacgtgtcgtccgttcctgaggtgactgtgaccgaccggtccgacggcgacgagtgcctcatcctgggcagcgacgggctctgggacgtggtgagcaacgaggccgcgtgcgaggtggcgcgcgcctgcctccgcaggggccgggccaagtggtgcgccgaggccgccgcgttgctcaccaagctggccctcgcgaggagaagctccgacaacgtctcggtggtcgtcgtcgatctccggaggaggaatcactagttctgtgcagttgtcaactagtactagtacagtaggatggctggtgcgcacaagggatttcgcgggggtgcgctaattgggtttttttttcttgcgttttcattcaaaaagtttttttttttttttgctgtactctccctgaatcaaaaagttcagaggagcccttagattaattattgtggtagagccggaatttggtccggataccattcggagaggtggtcgcgtagaaaaaaactcagaaaggggagacggtctc

SEQ ID NO: 10015 - protein, 388 aa, Zea mays subsp. mays
  peptide (1)..(388): Ceres Seq. ID no. 12404996
  misc_feature (100)..(347): Pfam Name: Protein phosphatase 2C Pfam Description: Protein phosphatase 2C
  misc_feature (32)..(352): Homolog of NCBI NO: 34902050 NR Description: putative Serine/threonine phosphatases [Oryza
  misc_feature (354)..(386): Homolog of NCBI NO: 34902050 NR Description: putative Serine/threonine phosphatases [Oryza
  misc_feature (39)..(347): Homolog of NCBI NO: 34908256 NR Description: putative protein phosphatase 2C [Oryza sativa
  misc_feature (337)..(385): Homolog of NCBI NO: 34908256 NR Description: putative protein phosphatase 2C [Oryza sativa
  misc_feature (100)..(385): Homolog of NCBI NO: 15227078 NR Description: protein phosphatase 2C (PP2C), putative; protein At2g29380.1 [Arabidopsis thaliana] >gi|25352214|pir||F84695
  misc_feature (97)..(354): Homolog of NCBI NO: 15222398 NR Description: protein phosphatase 2C (PP2C), putative; protein At1g07430.1, supported by cDNA: 118185., supported by cDNA: supported by cDNA: gi_20259128 [Arabidopsis thaliana] thaliana
  misc_feature (349)..(386): Homolog of NCBI NO: 15222398 NR Description: protein phosphatase 2C (PP2C), putative; protein At1g07430.1, supported by cDNA: 118185., supported by cDNA: supported by cDNA: gi_20259128 [Arabidopsis thaliana] thaliana
  misc_feature (100)..(349): Homolog of NCBI NO: 10432446 NR Description: protein phosphatase 2C [Nicotiana tabacum]
  misc_feature (356)..(385): Homolog of NCBI NO: 10432446 NR Description: protein phosphatase 2C [Nicotiana tabacum]
  misc_feature (100)..(385): Homolog of NCBI NO: 33309516 NR Description: protein phosphatase 2C [Prunus avium]
NSRIAGVFSLLQGARGGGSFPGGGGGAWLMSMAQVCCDSAVAVTAAPVVGAEAEARARARAERRSRAGESGAWKHAAAAGTADATRKRSLGSGELLLARKHGAASVAGRRREMEDAVSVRDAFCAEGTADGGRRDFYGVFDGHGCSHVAEACRDRMHELVAEELAATAADSSVSAAAAWTAAMERSFARMDAEVTSAGGRAAAARSSTCRCDAHRCDHVGSTAVVAVVEEHPPSVVANCGDSRAVLCRGDGAPPLPLSSDHKPDRPDELERIESAGGRVIFWEGARVLGVLAMSRAVGDGYLKPYVSSVPEVTVTDRSDGDECLILGSDGLWDVVSNEAACEVARACLRRGRAKWCAEAAALLTKLALARRSSDNVSVVVVDLRRRNH

SEQ ID NO: 10016 - protein, 359 aa, Zea mays subsp. mays
  peptide (1)..(359): Ceres Seq. ID no. 12404997
  misc_feature (71)..(318): Pfam Name: Protein phosphatase 2C Pfam Description: Protein phosphatase 2C
  misc_feature (71)..(320): Homolog of NCBI NO: 10432446 NR Description: protein phosphatase 2C [Nicotiana tabacum]
  misc_feature (327)..(356): Homolog of NCBI NO: 10432446 NR Description: protein phosphatase 2C [Nicotiana tabacum]
  misc_feature (325)..(357): Homolog of NCBI NO: 34902050 NR Description: putative Serine/threonine phosphatases [Oryza
  misc_feature (308)..(356): Homolog of NCBI NO: 34908256 NR Description: putative protein phosphatase 2C [Oryza sativa
  misc_feature (68)..(325): Homolog of NCBI NO: 15222398 NR Description: protein phosphatase 2C (PP2C), putative; protein At1g07430.1, supported by cDNA: 118185., supported by cDNA: supported by cDNA: gi_20259128 [Arabidopsis thaliana] thaliana
  misc_feature (320)..(357): Homolog of NCBI NO: 15222398 NR Description: protein phosphatase 2C (PP2C), putative; protein At1g07430.1, supported by cDNA: 118185., supported by cDNA: supported by cDNA: gi_20259128 [Arabidopsis thaliana] thaliana
  misc_feature (71)..(356): Homolog of NCBI NO: 15227078 NR Description: protein phosphatase 2C (PP2C), putative; protein At2g29380.1 [Arabidopsis thaliana] >gi|25352214|pir||F84695
  misc_feature (10)..(318): Homolog of NCBI NO: 34908256 NR Description: putative protein phosphatase 2C [Oryza sativa
  misc_feature (3)..(323): Homolog of NCBI NO: 34902050 NR Description: putative Serine/threonine phosphatases [Oryza
  misc_feature (71)..(356): Homolog of NCBI NO: 33309516 NR Description: protein phosphatase 2C [Prunus avium]
MSMAQVCCDSAVAVTAAPVVGAEAEARARARAERRSRAGESGAWKHAAAAGTADATRKRSLGSGELLLARKHGAASVAGRRREMEDAVSVRDAFCAEGTADGGRRDFYGVFDGHGCSHVAEACRDRMHELVAEELAATAADSSVSAAAAWTAAMERSFARMDAEVTSAGGRAAAARSSTCRCDAHRCDHVGSTAVVAVVEEHPPSVVANCGDSRAVLCRGDGAPPLPLSSDHKPDRPDELERIESAGGRVIFWEGARVLGVLAMSRAVGDGYLKPYVSSVPEVTVTDRSDGDECLILGSDGLWDVVSNEAACEVARACLRRGRAKWCAEAAALLTKLALARRSSDNVSVVVVDLRRRNH

SEQ ID NO: 10017 - protein, 357 aa, Zea mays subsp. mays
  peptide (1)..(357): Ceres Seq. ID no. 12404998
  misc_feature (69)..(316): Pfam Name: Protein phosphatase 2C Pfam Description: Protein phosphatase 2C
  misc_feature (1)..(321): Homolog of NCBI NO: 34902050 NR Description: putative Serine/threonine phosphatases [Oryza
  misc_feature (323)..(355): Homolog of NCBI NO: 34902050 NR Description: putative Serine/threonine phosphatases [Oryza
  misc_feature (8)..(316): Homolog of NCBI NO: 34908256 NR Description: putative protein phosphatase 2C [Oryza sativa
  misc_feature (306)..(354): Homolog of NCBI NO: 34908256 NR Description: putative protein phosphatase 2C [Oryza sativa
  misc_feature (69)..(354): Homolog of NCBI NO: 15227078 NR Description: protein phosphatase 2C (PP2C), putative; protein At2g29380.1 [Arabidopsis thaliana] >gi|25352214|pir||F84695
  misc_feature (66)..(323): Homolog of NCBI NO: 15222398 NR Description: protein phosphatase 2C (PP2C), putative; protein At1g07430.1, supported by cDNA: 118185., supported by cDNA: supported by cDNA: gi_20259128 [Arabidopsis thaliana] thaliana
  misc_feature (318)..(355): Homolog of NCBI NO: 15222398 NR Description: protein phosphatase 2C (PP2C), putative; protein At1g07430.1, supported by cDNA: 118185., supported by cDNA: supported by cDNA: gi_20259128 [Arabidopsis thaliana] thaliana
  misc_feature (69)..(318): Homolog of NCBI NO: 10432446 NR Description: protein phosphatase 2C [Nicotiana tabacum]
  misc_feature (325)..(354): Homolog of NCBI NO: 10432446 NR Description: protein phosphatase 2C [Nicotiana tabacum]
  misc_feature (69)..(354): Homolog of NCBI NO: 33309516 NR Description: protein phosphatase 2C [Prunus avium]
MAQVCCDSAVAVTAAPVVGAEAEARARARAERRSRAGESGAWKHAAAAGTADATRKRSLGSGELLLARKHGAASVAGRRREMEDAVSVRDAFCAEGTADGGRRDFYGVFDGHGCSHVAEACRDRMHELVAEELAATAADSSVSAAAAWTAAMERSFARMDAEVTSAGGRAAAARSSTCRCDAHRCDHVGSTAVVAVVEEHPPSVVANCGDSRAVLCRGDGAPPLPLSSDHKPDRPDELERIESAGGRVIFWEGARVLGVLAMSRAVGDGYLKPYVSSVPEVTVTDRSDGDECLILGSDGLWDVVSNEAACEVARACLRRGRAKWCAEAAALLTKLALARRSSDNVSVVVVDLRRRNH

SEQ ID NO: 10018 - DNA, 1733 bp, Zea mays subsp. mays
  misc_feature (1)..(1733): Ceres Seq. ID no. 12369271
  misc_feature: MA Experiment ID: 108504 Result: Down-regulated in Transcription
  misc_feature: MA Experiment 108504 PARAMETER Experiment Name: Zm_Drought_P Parameter: Age (day) Value: 8
  misc_feature: MA Experiment 108504 PARAMETER Experiment Name: Zm_Drought_P Parameter: Organism Value: Zea mays
  misc_feature: MA Experiment 108504 PARAMETER Experiment Name: Zm_Drought_P Parameter: Plant Line Value: 35A19
  misc_feature: MA Experiment 108504 PARAMETER Experiment Name: Zm_Drought_P Parameter: Timepoint (hr) Value: 12
  misc_feature: MA Experiment 108504 PARAMETER Experiment Name: Zm_Drought_P Parameter: Tissue Value: Aerial
  misc_feature: MA Experiment 108504 PARAMETER Experiment Name: Zm_Drought_P Parameter: Treatment Value: Drought vs. No Drought
  misc_feature: MA Experiment ID: 108528 Result: Up-regulated in Transcription
  misc_feature: MA Experiment 108528 PARAMETER Experiment Name: Zm_Imbibed_Seeds_P Parameter: Age (day) Value: 5 vs. 2
  misc_feature: MA Experiment 108528 PARAMETER Experiment Name: Zm_Imbibed_Seeds_P Parameter: Organism Value: Zea mays
  misc_feature: MA Experiment 108528 PARAMETER Experiment Name: Zm_Imbibed_Seeds_P Parameter: Plant Line Value: 35A19
  misc_feature: MA Experiment 108528 PARAMETER Experiment Name: Zm_Imbibed_Seeds_P Parameter: Tissue Value: Aerial vs. Embryo
  misc_feature: MA Experiment ID: 108535 Result: Up-regulated in Transcription
  misc_feature: MA Experiment 108535 PARAMETER Experiment Name: Zm_Meristem_P Parameter: Age (day) Value: 8
  misc_feature: MA Experiment 108535 PARAMETER Experiment Name: Zm_Meristem_P Parameter: Organism Value: Zea mays
  misc_feature: MA Experiment 108535 PARAMETER Experiment Name: Zm_Meristem_P Parameter: Plant Line Value: 35A19
  misc_feature: MA Experiment 108535 PARAMETER Experiment Name: Zm_Meristem_P Parameter: Tissue Value: Root Meristem vs. Above Root Meristem
  misc_feature: MA Experiment ID: 108547 Result: Up-regulated in Transcription
  misc_feature: MA Experiment 108547 PARAMETER Experiment Name: Zm_Imbibed_Seeds_P Parameter: Age (day) Value: 4 vs. 2
  misc_feature: MA Experiment 108547 PARAMETER Experiment Name: Zm_Imbibed_Seeds_P Parameter: Organism Value: Zea mays
  misc_feature: MA Experiment 108547 PARAMETER Experiment Name: Zm_Imbibed_Seeds_P Parameter: Plant Line Value: 35A19
  misc_feature: MA Experiment 108547 PARAMETER Experiment Name: Zm_Imbibed_Seeds_P Parameter: Tissue Value: Aerial vs. Embryo
  misc_feature: MA Experiment ID: 108556 Result: Down-regulated in Transcription
  misc_feature: MA Experiment 108556 PARAMETER Experiment Name: Zm_Drought_P Parameter: Age (day) Value: 9
  misc_feature: MA Experiment 108556 PARAMETER Experiment Name: Zm_Drought_P Parameter: Organism Value: Zea mays
  misc_feature: MA Experiment 108556 PARAMETER Experiment Name: Zm_Drought_P Parameter: Plant Line Value: 35A19
  misc_feature: MA Experiment 108556 PARAMETER Experiment Name: Zm_Drought_P Parameter: Timepoint (hr) Value: 24
  misc_feature: MA Experiment 108556 PARAMETER Experiment Name: Zm_Drought_P Parameter: Tissue Value: Aerial
  misc_feature: MA Experiment 108556 PARAMETER Experiment Name: Zm_Drought_P Parameter: Treatment Value: Drought vs. No Drought
  misc_feature: MA Experiment ID: 108689 Result: Down-regulated in Transcription
  misc_feature: MA Experiment 108689 PARAMETER Experiment Name: Zm_Drought_Roots_P Parameter: Age (day) Value: 9
  misc_feature: MA Experiment 108689 PARAMETER Experiment Name: Zm_Drought_Roots_P Parameter: Organism Value: Zea mays
  misc_feature: MA Experiment 108689 PARAMETER Experiment Name: Zm_Drought_Roots_P Parameter: Plant Line Value: 35A19
  misc_feature: MA Experiment 108689 PARAMETER Experiment Name: Zm_Drought_Roots_P Parameter: Timepoint (hr) Value: 24
  misc_feature: MA Experiment 108689 PARAMETER Experiment Name: Zm_Drought_Roots_P Parameter: Tissue Value: Roots
  misc_feature: MA Experiment 108689 PARAMETER Experiment Name: Zm_Drought_Roots_P Parameter: Treatment Value: Drought vs. No Drought
  misc_feature: MA Experiment ID: 20000477 Result: Down-regulated in Transcription
  misc_feature: MA Experiment 20000477 PARAMETER Experiment Name: Zm_5mM_SA_P Parameter: Age (day) Value: 10
  misc_feature: MA Experiment 20000477 PARAMETER Experiment Name: Zm_5mM_SA_P Parameter: Organism Value: Zea mays
  misc_feature: MA Experiment 20000477 PARAMETER Experiment Name: Zm_5mM_SA_P Parameter: Plant Line Value: 35A19
  misc_feature: MA Experiment 20000477 PARAMETER Experiment Name: Zm_5mM_SA_P Parameter: Timepoint (hr) Value: 48
  misc_feature: MA Experiment 20000477 PARAMETER Experiment Name: Zm_5mM_SA_P Parameter: Tissue Value: Aerial
  misc_feature: MA Experiment 20000477 PARAMETER Experiment Name: Zm_5mM_SA_P Parameter: Treatment Value: 5mM SA vs. No Treatment
  misc_feature: MA Experiment ID: 20000478 Result: Down-regulated in Transcription
  misc_feature: MA Experiment 20000478 PARAMETER Experiment Name: Zm_5mM_SA_P Parameter: Age (day) Value: 11
  misc_feature: MA Experiment 20000478 PARAMETER Experiment Name: Zm_5mM_SA_P Parameter: Organism Value: Zea mays
  misc_feature: MA Experiment 20000478 PARAMETER Experiment Name: Zm_5mM_SA_P Parameter: Plant Line Value: 35A19
  misc_feature: MA Experiment 20000478 PARAMETER Experiment Name: Zm_5mM_SA_P Parameter: Timepoint (hr) Value: 72
  misc_feature: MA Experiment 20000478 PARAMETER Experiment Name: Zm_5mM_SA_P Parameter: Tissue Value: Aerial
  misc_feature: MA Experiment 20000478 PARAMETER Experiment Name: Zm_5mM_SA_P Parameter: Treatment Value: 5mM SA vs. No Treatment
  misc_feature: MA Experiment ID: 20000480 Result: Down-regulated in Transcription
  misc_feature: MA Experiment 20000480 PARAMETER Experiment Name: Zm_Drought_P Parameter: Age (day) Value: 11
  misc_feature: MA Experiment 20000480 PARAMETER Experiment Name: Zm_Drought_P Parameter: Organism Value: Zea mays
  misc_feature: MA Experiment 20000480 PARAMETER Experiment Name: Zm_Drought_P Parameter: Plant Line Value: 35A19
  misc_feature: MA Experiment 20000480 PARAMETER Experiment Name: Zm_Drought_P Parameter: Timepoint (hr) Value: 72
  misc_feature: MA Experiment 20000480 PARAMETER Experiment Name: Zm_Drought_P Parameter: Tissue Value: Aerial
  misc_feature: MA Experiment 20000480 PARAMETER Experiment Name: Zm_Drought_P Parameter: Treatment Value: Drought vs. No Drought
  misc_feature: MA Experiment ID: 20000535 Result: Up-regulated in Transcription
  misc_feature: MA Experiment 20000535 PARAMETER Experiment Name: Zm_Hybrid_Seed_Dev_P Parameter: DAP Value: 30 vs. 12
  misc_feature: MA Experiment 20000535 PARAMETER Experiment Name: Zm_Hybrid_Seed_Dev_P Parameter: Organism Value: Zea mays
  misc_feature: MA Experiment 20000535 PARAMETER Experiment Name: Zm_Hybrid_Seed_Dev_P Parameter: Plant Line Value: 35A19
  misc_feature: MA Experiment 20000535 PARAMETER Experiment Name: Zm_Hybrid_Seed_Dev_P Parameter: Tissue Value: Embryo vs. Unfert Floret
  misc_feature: MA Experiment ID: 20000626 Result: Down-regulated in Transcription
  misc_feature: MA Experiment 20000626 PARAMETER Experiment Name: Zm_Herbicide-Treatments_P Parameter: Timepoint (hr) Value: 12
  misc_feature: MA Experiment 20000626 PARAMETER Experiment Name: Zm_Herbicide-Treatments_P Parameter: Tissue Value: Aerial
  misc_feature: MA Experiment 20000626 PARAMETER Experiment Name: Zm_Herbicide-Treatments_P Parameter: Treatment Value: Roundup vs. No Treatment
accgagaatctttcaccctcctgacctctctctctcctcttctccctcccgtgagtgagtgagctggagtcaagctagccgagcgagtgatggcatggggagcttgcactgctgcggcagctgctctccttctgctcctcctcctcctcgccgccgccgcagcaggtggtaacggcggcgtgcattgccttgaccttgaccttgaggaggggaggcggcaccacctgagcaggagagccttgcaagggaggcagaggcggcaccacctgaggtcaagggcggtgggtggcgccacggtgctcgagctgaggcaccacagcttcagccctgcaccggccaacagcagggaggaggaggcggacgctctcctgtccgccgacgccgcgcgcgtctcgtcgctgcaagggcgcatagagcactaccggctgacgacgaccagctcgtcggccgaggtggcggtgacggcgtccaaggcgcaggtgcccgtcagctcgggcgcgaggctccggacgctgaactacgtggccaccgtggggctgggcggcggcgaggcgacggtgatcgtggacacggccagcgagctgacgtgggtgcagtgcgcgccgtgcgagtcgtgccacgaccagcagggcccgctgttcgacccgtcctcgtcgccgtcctacgccgcggtgccgtgcgactccccctcctgcgacgcgctgcagcagcagctggccacgggcgcgggcgcgccgccgtgcgacgccgggcggccggcggcctgcagctacgcgctcagctaccgcgacggctcctactcccgcggcgtgctggcgcacgacaggctgagcctggccggggaggtcatcgacggcttcgtgttcgggtgcggcaccagcaaccagggcccgccgttcggcggcacgtcgggcctcatggggctcggccgcagccagctctcgctcgtgtcgcagaccgtggaccagttcggcggcgtgttctcctactgcctcccgctcagcagggagtccgacgcgtcgggctcgctggtgctgggcgacgacccgtcggcgtaccgcaactcgaccccggtcgtgtacacctcgatggtgtccaactccgacccgctgctccaggggcccttctacctggtgaacctgaccgggatcacggtcggcggccaggaggtggagtccacgggcttctcggccagggcgatcgtcgactcgggcaccgtgatcaccagcctcgtgccgtcggtctacaacgccgtcagggccgagttcatgagccagctcgcggagtacccgcaggcgccagggttctccatcctcgacacctgcttcaacatgaccgggctcaaggaagtccaggtgcccagcctgactctcgtgttcgacggcggcgcggaggtggaggtggactccggcggcgtgctctacttcgtcagcagcgactcctcacaggtgtgcctggccgtggcctccctgaaatccgaggacgagacctccatcatcggcaactaccagcagaagaacctgagggtcgtcttcgacacctcggcgtctcaggttggtttcgcgcaggagacgtgtggttatatttgactttgactcggattgggattgggattgggatgcagcgggcggccatgggctctatatatgtgaatacctttatacttacttgcagatttgtttcgagattacccctggtgattggcaaatggtaacaaggtgttcagttgttgg

SEQ ID NO: 10019 - protein, 499 aa, Zea mays subsp. mays
  peptide (1)..(499): Ceres Seq. ID no. 12369272
  misc_feature (94)..(490): Pfam Name: Eukaryotic aspartyl protease Pfam Description: Eukaryotic aspartyl protease
  misc_feature (62)..(496): Homolog of NCBI NO: 18412482 NR Description: putative aspartyl protease; protein id: supported by cDNA: 7650., supported by cDNA: gi_19699358 thaliana] >gi|19699359|gb|AAL91289.1| At1g79720/F19K16_30
  misc_feature (68)..(496): Homolog of NCBI NO: 25406599 NR Description: probable aspartyl proteinase, 105611-106921 - Arabidopsis thaliana >gi|7715602|gb|AAF68120.1|AC010793_15 [Arabidopsis thaliana] >gi|12324588|gb|AAG52249.1|AC011717_17
  misc_feature (62)..(496): Homolog of NCBI NO: 21595063 NR Description: putative aspartyl protease [Arabidopsis thaliana]
  misc_feature (93)..(496): Homolog of NCBI NO: 7489168 NR Description: nucleoid DNA-binding protein cnd41, chloroplast - tobacco >gi|2541876|dbj|BAA22813.1| CND41, chloroplast nucleoid
  misc_feature (93)..(496): Homolog of NCBI NO: 24430421 NR Description: 41 kD chloroplast nucleoid DNA binding protein
  misc_feature (46)..(496): Homolog of NCBI NO: 11358588 NR Description: nucleoid DNA-binding protein cnd41-like protein -
  misc_feature (60)..(496): Homolog of NCBI NO: 22326716 NR Description: nucleoid DNA-binding protein cnd41 - like protein id: At5g10770.1, supported by cDNA: gi_18700102 thaliana] >gi|18700103|gb|AAL77663.1| AT5g10770/T30N20_40
  misc_feature (68)..(496): Homolog of NCBI NO: 34912520 NR Description: chloroplast nucleoid DNA-binding protein
  misc_feature (61)..(314): Homolog of NCBI NO: 38344196 NR Description: OSJNBa0064G10.12 [Oryza sativa (japonica
  misc_feature (342)..(496): Homolog of NCBI NO: 38344196 NR Description: OSJNBa0064G10.12 [Oryza sativa (japonica
MAWGACTAAAAALLLLLLLLAAAAAGGNGGVHCLDLDLEEGRRHHLSRRALQGRQRRHHLRSRAVGGATVLELRHHSFSPAPANSREEEADALLSADAARVSSLQGRIEHYRLTTTSSSAEVAVTASKAQVPVSSGARLRTLNYVATVGLGGGEATVIVDTASELTWVQCAPCESCHDQQGPLFDPSSSPSYAAVPCDSPSCDALQQQLATGAGAPPCDAGRPAACSYALSYRDGSYSRGVLAHDRLSLAGEVIDGFVFGCGTSNQGPPFGGTSGLMGLGRSQLSLVSQTVDQFGGVFSYCLPLSRESDASGSLVLGDDPSAYRNSTPVVYTSMVSNSDPLLQGPFYLVNLTGITVGGQEVESTGFSARAIVDSGTVITSLVPSVYNAVRAEFMSQLAEYPQAPGFSILDTCFNMTGLKEVQVPSLTLVFDGGAEVEVDSGGVLYFVSSDSSQVCLAVASLKSEDETSIIGNYQQKNLRVVFDTSASQVGFAQETCGYI

SEQ ID NO: 10020 - DNA, 1931 bp, Zea mays subsp. mays
  misc_feature (1)..(1931): Ceres Seq. ID no. 13636275
  misc_feature: MA Experiment ID: 108523 Result: Down-regulated in Transcription
  misc_feature: MA Experiment 108523 PARAMETER Experiment Name: Zm_42deg_Heat_P Parameter: Age (day) Value: 8
  misc_feature: MA Experiment 108523 PARAMETER Experiment Name: Zm_42deg_Heat_P Parameter: Organism Value: Zea mays
  misc_feature: MA Experiment 108523 PARAMETER Experiment Name: Zm_42deg_Heat_P Parameter: Plant Line Value: 35A19
  misc_feature: MA Experiment 108523 PARAMETER Experiment Name: Zm_42deg_Heat_P Parameter: Temperature (deg C) Value: 42 vs. 22
  misc_feature: MA Experiment 108523 PARAMETER Experiment Name: Zm_42deg_Heat_P Parameter: Timepoint (hr) Value: 6
  misc_feature: MA Experiment 108523 PARAMETER Experiment Name: Zm_42deg_Heat_P Parameter: Tissue Value: Aerial
  misc_feature: MA Experiment ID: 108529 Result: Down-regulated in Transcription
  misc_feature: MA Experiment 108529 PARAMETER Experiment Name: Zm_Imbibed_Seeds_P Parameter: Age (day) Value: 5 vs. 2
  misc_feature: MA Experiment 108529 PARAMETER Experiment Name: Zm_Imbibed_Seeds_P Parameter: Organism Value: Zea mays
  misc_feature: MA Experiment 108529 PARAMETER Experiment Name: Zm_Imbibed_Seeds_P Parameter: Plant Line Value: 35A19
  misc_feature: MA Experiment 108529 PARAMETER Experiment Name: Zm_Imbibed_Seeds_P Parameter: Tissue Value: Roots vs. Embryo
  misc_feature: MA Experiment ID: 108543 Result: Up-regulated in Transcription
  misc_feature: MA Experiment ID: 108544 Result: Down-regulated in Transcription
  misc_feature: MA Experiment ID: 108545 Result: Up-regulated in Transcription
  misc_feature: MA Experiment 108545 PARAMETER Experiment Name: Zm_Imbibed_Seeds_P Parameter: Age (day) Value: 3 vs. 2
  misc_feature: MA Experiment 108545 PARAMETER Experiment Name: Zm_Imbibed_Seeds_P Parameter: Organism Value: Zea mays
  misc_feature: MA Experiment 108545 PARAMETER Experiment Name: Zm_Imbibed_Seeds_P Parameter: Plant Line Value: 35A19
  misc_feature: MA Experiment 108545 PARAMETER Experiment Name: Zm_Imbibed_Seeds_P Parameter: Tissue Value: Aerial vs. Embryo
  misc_feature: MA Experiment ID: 108546 Result: Down-regulated in Transcription
  misc_feature: MA Experiment 108546 PARAMETER Experiment Name: Zm_Imbibed_Seeds_P Parameter: Age (day) Value: 3 vs. 2
  misc_feature: MA Experiment 108546 PARAMETER Experiment Name: Zm_Imbibed_Seeds_P Parameter: Organism Value: Zea mays
  misc_feature: MA Experiment 108546 PARAMETER Experiment Name: Zm_Imbibed_Seeds_P Parameter: Plant Line Value: 35A19
  misc_feature: MA Experiment 108546 PARAMETER Experiment Name: Zm_Imbibed_Seeds_P Parameter: Tissue Value: Roots vs. Embryo
  misc_feature: MA Experiment ID: 108556 Result: Down-regulated in Transcription
  misc_feature: MA Experiment 108556 PARAMETER Experiment Name: Zm_Drought_P Parameter: Age (day) Value: 9
  misc_feature: MA Experiment 108556 PARAMETER Experiment Name: Zm_Drought_P Parameter: Organism Value: Zea mays
  misc_feature: MA Experiment 108556 PARAMETER Experiment Name: Zm_Drought_P Parameter: Plant Line Value: 35A19
  misc_feature: MA Experiment 108556 PARAMETER Experiment Name: Zm_Drought_P Parameter: Timepoint (hr) Value: 24
  misc_feature: MA Experiment 108556 PARAMETER Experiment Name: Zm_Drought_P Parameter: Tissue Value: Aerial
  misc_feature: MA Experiment 108556 PARAMETER Experiment Name: Zm_Drought_P Parameter: Treatment Value: Drought vs. No Drought
  misc_feature: MA Experiment ID: 108689 Result: Down-regulated in Transcription
  misc_feature: MA Experiment 108689 PARAMETER Experiment Name: Zm_Drought_Roots_P Parameter: Age (day) Value: 9
  misc_feature: MA Experiment 108689 PARAMETER Experiment Name: Zm_Drought_Roots_P Parameter: Organism Value: Zea mays
  misc_feature: MA Experiment 108689 PARAMETER Experiment Name: Zm_Drought_Roots_P Parameter: Plant Line Value: 35A19
  misc_feature: MA Experiment 108689 PARAMETER Experiment Name: Zm_Drought_Roots_P Parameter: Timepoint (hr) Value: 24
  misc_feature: MA Experiment 108689 PARAMETER Experiment Name: Zm_Drought_Roots_P Parameter: Tissue Value: Roots
  misc_feature: MA Experiment 108689 PARAMETER Experiment Name: Zm_Drought_Roots_P Parameter: Treatment Value: Drought vs. No Drought
  misc_feature: MA Experiment ID: 20000477 Result: Down-regulated in Transcription
  misc_feature: MA Experiment 20000477 PARAMETER Experiment Name: Zm_5mM_SA_P Parameter: Age (day) Value: 10
  misc_feature: MA Experiment 20000477 PARAMETER Experiment Name: Zm_5mM_SA_P Parameter: Organism Value: Zea mays
  misc_feature: MA Experiment 20000477 PARAMETER Experiment Name: Zm_5mM_SA_P Parameter: Plant Line Value: 35A19
  misc_feature: MA Experiment 20000477 PARAMETER Experiment Name: Zm_5mM_SA_P Parameter: Timepoint (hr) Value: 48
  misc_feature: MA Experiment 20000477 PARAMETER Experiment Name: Zm_5mM_SA_P Parameter: Tissue Value: Aerial
  misc_feature: MA Experiment 20000477 PARAMETER Experiment Name: Zm_5mM_SA_P Parameter: Treatment Value: 5mM SA vs. No Treatment
  misc_feature: MA Experiment ID: 20000478 Result: Down-regulated in Transcription
  misc_feature: MA Experiment 20000478 PARAMETER Experiment Name: Zm_5mM_SA_P Parameter: Age (day) Value: 11
  misc_feature: MA Experiment 20000478 PARAMETER Experiment Name: Zm_5mM_SA_P Parameter: Organism Value: Zea mays
  misc_feature: MA Experiment 20000478 PARAMETER Experiment Name: Zm_5mM_SA_P Parameter: Plant Line Value: 35A19
  misc_feature: MA Experiment 20000478 PARAMETER Experiment Name: Zm_5mM_SA_P Parameter: Timepoint (hr) Value: 72
  misc_feature: MA Experiment 20000478 PARAMETER Experiment Name: Zm_5mM_SA_P Parameter: Tissue Value: Aerial
  misc_feature: MA Experiment 20000478 PARAMETER Experiment Name: Zm_5mM_SA_P Parameter: Treatment Value: 5mM SA vs. No Treatment
  misc_feature: MA Experiment ID: 20000479 Result: Down-regulated in Transcription
  misc_feature: MA Experiment 20000479 PARAMETER Experiment Name: Zm_Drought_P Parameter: Age (day) Value: 10
  misc_feature: MA Experiment 20000479 PARAMETER Experiment Name: Zm_Drought_P Parameter: Organism Value: Zea mays
  misc_feature: MA Experiment 20000479 PARAMETER Experiment Name: Zm_Drought_P Parameter: Plant Line Value: 35A19
  misc_feature: MA Experiment 20000479 PARAMETER Experiment Name: Zm_Drought_P Parameter: Timepoint (hr) Value: 48
  misc_feature: MA Experiment 20000479 PARAMETER Experiment Name: Zm_Drought_P Parameter: Tissue Value: Aerial
  misc_feature: MA Experiment 20000479 PARAMETER Experiment Name: Zm_Drought_P Parameter: Treatment Value: Drought vs. No Drought
  misc_feature: MA Experiment ID: 20000480 Result: Down-regulated in Transcription
  misc_feature: MA Experiment 20000480 PARAMETER Experiment Name: Zm_Drought_P Parameter: Age (day) Value: 11
  misc_feature: MA Experiment 20000480 PARAMETER Experiment Name: Zm_Drought_P Parameter: Organism Value: Zea mays
  misc_feature: MA Experiment 20000480 PARAMETER Experiment Name: Zm_Drought_P Parameter: Plant Line Value: 35A19
  misc_feature: MA Experiment 20000480 PARAMETER Experiment Name: Zm_Drought_P Parameter: Timepoint (hr) Value: 72
  misc_feature: MA Experiment 20000480 PARAMETER Experiment Name: Zm_Drought_P Parameter: Tissue Value: Aerial
  misc_feature: MA Experiment 20000480 PARAMETER Experiment Name: Zm_Drought_P Parameter: Treatment Value: Drought vs. No Drought
  misc_feature: MA Experiment ID: 20000488 Result: Down-regulated in Transcription
  misc_feature: MA Experiment 20000488 PARAMETER Experiment Name: Zm_50mM_NH4NO3_L_to_H_P Parameter: Organism Value: Zea mays
  misc_feature: MA Experiment 20000488 PARAMETER Experiment Name: Zm_50mM_NH4NO3_L_to_H_P Parameter: Timepoint (hr) Value: 8
  misc_feature: MA Experiment 20000488 PARAMETER Experiment Name: Zm_50mM_NH4NO3_L_to_H_P Parameter: Tissue Value: Leaves
  misc_feature: MA Experiment 20000488 PARAMETER Experiment Name: Zm_50mM_NH4NO3_L_to_H_P Parameter: Treatment Value: 50mM NH4NO3 vs. 100mM Mannitol
  misc_feature: MA Experiment ID: 20000626 Result: Down-regulated in Transcription
  misc_feature: MA Experiment 20000626 PARAMETER Experiment Name: Zm_Herbicide-Treatments_P Parameter: Timepoint (hr) Value: 12
  misc_feature: MA Experiment 20000626 PARAMETER Experiment Name: Zm_Herbicide-Treatments_P Parameter: Tissue Value: Aerial
  misc_feature: MA Experiment 20000626 PARAMETER Experiment Name: Zm_Herbicide-Treatments_P Parameter: Treatment Value: Roundup vs. No Treatment
actactagtgatcagaccagtgagctagcgactgtaccatgcagcagctgtaggagagcctggtggtaggtaggataggagtagcgccagccgccaagtgcgcgtccgggctggctgcttcgacgagcaggagggagccgcaccgccgggctcccgcaatgtcgcctcctccgcccccgccgctgctgcgcaacgagctgtcgcgcaggacggcggtgctgggcctgcgcctgtgggtgctggtgggcatcgccgtcggggccgccttcgtgctgctcctcgtgctcatctccctccacctcgccgcggcgcggcggaggcggcccaggaagggcgtcgcgcacgcgccggcgggggcgccgccgctgtccccgtccaccatcccgcccgtgtccaaggagatccaggaggtggccgtccacgtcggctcgctccgccactacctggagacggggcacgcgttcctcaaggacggcggcgacggcgacggcgacggcgagtccgtggcgcacgggtcgcagcgcgtccacatcgaggccggcaagggccagcgcatggtcgcggcggcttccgacgcgctgtcggcggccgtgggccccgaggtgtcgcacctcggctggggccactggtacacgctgcgggagctggaggaggccaccgccgcgttcgctcccgagcacgtcgtcggcgagggcgggtacggcatcgtctaccgcggcgtcctcgccgacggctaccaggtcgccgtgaagaacctcctcaacaacaggggacaagccgagcgggagttcagggtggaggtggaggccatcggccgcgtccggcacaagaatctggtccggctactgggctactgcgccgagggcgcccaacggatacttgtgtacgagtacgtggacaacggcaacctcgagcagtggctgcacggcgacgtcggggcagtgagcccgctcacctgggacgtccggatgaacatcgtgctcggcatggccaaagggatcacgtacctgcacgaggggctggaacccaaggtggtgcacagggacatcaagtcgagcaacatcctgctggacaggaggtggaacccgaaggtctcggacttcggcctcgccaagctcctgggggcggacagcaactacgtcaccaccagagtgatgggaacgtttggctacggccccagagtacgctagcaccggcatgctgaacgagaggagcgacgtgtacagcttcgggatcctgatcatggagatcatctccggccgaagccccgtcgactacgccaggcctgccggagaggtaaaccttgtagagtggctcaagaacaaggtgaccaacagggactacgaggccatcgtggacccgaagctgccggagaagccgtcctccaaggcgctcaagaaggcgctcctggtcgcgctgaggtgcgtggatcccgactcgcagaaacggcccaagatggggcacgtaatccacatgctcgaagtcgacgacttcccgtatcgagaggatcgtcgaactcttcggccgggcaacggcagccccctggagaaggcgaggaatccggcggcggggtcatgcgacggcagcagctgctacgggggcgacacgaccaccgcgagcacgccgtccagactagtgcaggacatgtagtagtgatgtgtttgtagccagctgctgctggccttctgagctctgcctgcgggctgcggggcaacatggagatggacatgctgcaactctgctccgtcgttaattaaaggttcccttcctaggtgttgattttggactcaacagtgacttgacgtaagttttgccgcccgatggccaactgtttgtatagggaactgctgctcttcatctcaggccctaagtttgactgttctttgattcgcgtcatgatgtaaaaataaaagcgtgcgtctgtattggtc

SEQ ID NO: 10021 - protein, 343 aa, Zea mays subsp. mays
  peptide (1)..(343): Ceres Seq. ID no. 13636276
  misc_feature (173)..(338): Pfam Name: Protein kinase domain Pfam Description: Protein kinase domain
  misc_feature (173)..(338): Pfam Name: Protein kinase domain Pfam Description: Protein kinase domain
  misc_feature (147)..(338): Homolog of NCBI NO: 34897534 NR Description: OSJNBa0042L16.4 [Oryza sativa (japonica
  misc_feature (12)..(85): Homolog of NCBI NO: 34897534 NR Description: OSJNBa0042L16.4 [Oryza sativa (japonica
  misc_feature (10)..(338): Homolog of NCBI NO: 14194119 NR Description: At1g01540/F22L4_6 [Arabidopsis thaliana]
  misc_feature (10)..(338): Homolog of NCBI NO: 15223428 NR Description: protein kinase family [Arabidopsis thaliana] putative kinase [Arabidopsis thaliana]
  misc_feature (7)..(338): Homolog of NCBI NO: 15234142 NR Description: protein kinase family [Arabidopsis thaliana]
  misc_feature (12)..(85): Homolog of NCBI NO: 34897534 NR Description: OSJNBa0042L16.4 [Oryza sativa (japonica
  misc_feature (10)..(338): Homolog of NCBI NO: 15223428 NR Description: protein kinase family [Arabidopsis thaliana] putative kinase [Arabidopsis thaliana]
  misc_feature (1)..(17): Homolog of NCBI NO: 37536398 NR Description: putative receptor-like protein kinase [Oryza
  misc_feature (14)..(338): Homolog of NCBI NO: 37536398 NR Description: putative receptor-like protein kinase [Oryza
  misc_feature (10)..(118): Homolog of NCBI NO: 37535714 NR Description: putative kinase [Oryza sativa (japonica
  misc_feature (127)..(338): Homolog of NCBI NO: 37535714 NR Description: putative kinase [Oryza sativa (japonica
  misc_feature (10)..(338): Homolog of NCBI NO: 15235432 NR Description: protein kinase family [Arabidopsis thaliana]
  misc_feature (7)..(338): Homolog of NCBI NO: 15234142 NR Description: protein kinase family [Arabidopsis thaliana]
  misc_feature (10)..(338): Homolog of NCBI NO: 14194119 NR Description: At1g01540/F22L4_6 [Arabidopsis thaliana]
  misc_feature (147)..(338): Homolog of NCBI NO: 34897534 NR Description: OSJNBa0042L16.4 [Oryza sativa (japonica
  misc_feature (10)..(338): Homolog of NCBI NO: 15235432 NR Description: protein kinase family [Arabidopsis thaliana]
  misc_feature (127)..(338): Homolog of NCBI NO: 37535714 NR Description: putative kinase [Oryza sativa (japonica
  misc_feature (10)..(118): Homolog of NCBI NO: 37535714 NR Description: putative kinase [Oryza sativa (japonica
  misc_feature (14)..(338): Homolog of NCBI NO: 37536398 NR Description: putative receptor-like protein kinase [Oryza
  misc_feature (1)..(17): Homolog of NCBI NO: 37536398 NR Description: putative receptor-like protein kinase [Oryza
MSPPPPPPLLRNELSRRTAVLGLRLWVLVGIAVGAAFVLLLVLISLHLAAARRRRPRKGVAHAPAGAPPLSPSTIPPVSKEIQEVAVHVGSLRHYLETGHAFLKDGGDGDGDGESVAHGSQRVHIEAGKGQRMVAAASDALSAAVGPEVSHLGWGHWYTLRELEEATAAFAPEHVVGEGGYGIVYRGVLADGYQVAVKNLLNNRGQAEREFRVEVEAIGRVRHKNLVRLLGYCAEGAQRILVYEYVDNGNLEQWLHGDVGAVSPLTWDVRMNIVLGMAKGITYLHEGLEPKVVHRDIKSSNILLDRRWNPKVSDFGLAKLLGADSNYVTTRVMGTFGYGPRVR

SEQ ID NO: 10022 - protein, 211 aa, Zea mays subsp. mays
  peptide (1)..(211): Ceres Seq. ID no. 13636277
  misc_feature (41)..(206): Pfam Name: Protein kinase domain Pfam Description: Protein kinase domain
  misc_feature (41)..(206): Pfam Name: Protein kinase domain Pfam Description: Protein kinase domain
  misc_feature (15)..(206): Homolog of NCBI NO: 34897534 NR Description: OSJNBa0042L16.4 [Oryza sativa (japonica
  misc_feature (1)..(206): Homolog of NCBI NO: 14194119 NR Description: At1g01540/F22L4_6 [Arabidopsis thaliana]
  misc_feature (1)..(206): Homolog of NCBI NO: 15223428 NR Description: protein kinase family [Arabidopsis thaliana] putative kinase [Arabidopsis thaliana]
  misc_feature (1)..(206): Homolog of NCBI NO: 15234142 NR Description: protein kinase family [Arabidopsis thaliana]
  misc_feature (1)..(206): Homolog of NCBI NO: 15235432 NR Description: protein kinase family [Arabidopsis thaliana]
  misc_feature (1)..(206): Homolog of NCBI NO: 14194119 NR Description: At1g01540/F22L4_6 [Arabidopsis thaliana]
  misc_feature (1)..(206): Homolog of NCBI NO: 15234142 NR Description: protein kinase family [Arabidopsis thaliana]
  misc_feature (1)..(206): Homolog of NCBI NO: 30690058 NR Description: protein kinase family [Arabidopsis thaliana]
  misc_feature (10)..(206): Homolog of NCBI NO: 15231637 NR Description: protein kinase family [Arabidopsis thaliana]
  misc_feature (1)..(206): Homolog of NCBI NO: 25518287 NR Description: hypothetical protein F22L4.8 - Arabidopsis >gi|8920590|gb|AAF81312.1|AC061957_8 Contains a strong similarity an unknown protein from Arabidopsis thaliana gi|2505874 and
  misc_feature (1)..(206): Homolog of NCBI NO: 37536398 NR Description: putative receptor-like protein kinase [Oryza
  misc_feature (1)..(206): Homolog of NCBI NO: 37535714 NR Description: putative kinase [Oryza sativa (japonica
  misc_feature (1)..(206): Homolog of NCBI NO: 15235432 NR Description: protein kinase family [Arabidopsis thaliana]
  misc_feature (1)..(206): Homolog of NCBI NO: 15223428 NR Description: protein kinase family [Arabidopsis thaliana] putative kinase [Arabidopsis thaliana]
  misc_feature (15)..(206): Homolog of NCBI NO: 34897534 NR Description: OSJNBa0042L16.4 [Oryza sativa (japonica
  misc_feature (1)..(206): Homolog of NCBI NO: 37535714 NR Description: putative kinase [Oryza sativa (japonica
  misc_feature (1)..(206): Homolog of NCBI NO: 37536398 NR Description: putative receptor-like protein kinase [Oryza
  misc_feature (1)..(206): Homolog of NCBI NO: 25518287 NR Description: hypothetical protein F22L4.8 - Arabidopsis >gi|8920590|gb|AAF81312.1|AC061957_8 Contains a strong similarity an unknown protein from Arabidopsis thaliana gi|2505874 and
  misc_feature (10)..(206): Homolog of NCBI NO: 15231637 NR Description: protein kinase family [Arabidopsis thaliana]
  misc_feature (1)..(206): Homolog of NCBI NO: 30690058 NR Description: protein kinase family [Arabidopsis thaliana]
MVAAASDALSAAVGPEVSHLGWGHWYTLRELEEATAAFAPEHVVGEGGYGIVYRGVLADGYQVAVKNLLNNRGQAEREFRVEVEAIGRVRHKNLVRLLGYCAEGAQRILVYEYVDNGNLEQWLHGDVGAVSPLTWDVRMNIVLGMAKGITYLHEGLEPKVVHRDIKSSNILLDRRWNPKVSDFGLAKLLGADSNYVTTRVMGTFGYGPRVR

SEQ ID NO: 10023 - DNA, 1250 bp, Zea mays subsp. mays
  misc_feature (1)..(1250): Ceres Seq. ID no. 12382282
  misc_feature: MA Experiment ID: 108527 Result: Down-regulated in Transcription
  misc_feature: MA Experiment 108527 PARAMETER Experiment Name: Zm_5mM_NO_P Parameter: Age (day) Value: 8
  misc_feature: MA Experiment 108527 PARAMETER Experiment Name: Zm_5mM_NO_P Parameter: Organism Value: Zea mays
  misc_feature: MA Experiment 108527 PARAMETER Experiment Name: Zm_5mM_NO_P Parameter: Plant Line Value: 35A19
  misc_feature: MA Experiment 108527 PARAMETER Experiment Name: Zm_5mM_NO_P Parameter: Timepoint (hr) Value: 6
  misc_feature: MA Experiment 108527 PARAMETER Experiment Name: Zm_5mM_NO_P Parameter: Tissue Value: Aerial
  misc_feature: MA Experiment 108527 PARAMETER Experiment Name: Zm_5mM_NO_P Parameter: Treatment Value: 5mM NO vs. No Treatment
  misc_feature: MA Experiment ID: 108535 Result: Down-regulated in Transcription
  misc_feature: MA Experiment 108535 PARAMETER Experiment Name: Zm_Meristem_P Parameter: Age (day) Value: 8
  misc_feature: MA Experiment 108535 PARAMETER Experiment Name: Zm_Meristem_P Parameter: Organism Value: Zea mays
  misc_feature: MA Experiment 108535 PARAMETER Experiment Name: Zm_Meristem_P Parameter: Plant Line Value: 35A19
  misc_feature: MA Experiment 108535 PARAMETER Experiment Name: Zm_Meristem_P Parameter: Tissue Value: Root Meristem vs. Above Root Meristem
  misc_feature: MA Experiment ID: 108543 Result: Up-regulated in Transcription
  misc_feature: MA Experiment ID: 108559 Result: Down-regulated in Transcription
  misc_feature: MA Experiment 108559 PARAMETER Experiment Name: Zm_5mM_NO_P Parameter: Age (day) Value: 8
  misc_feature: MA Experiment 108559 PARAMETER Experiment Name: Zm_5mM_NO_P Parameter: Organism Value: Zea mays
  misc_feature: MA Experiment 108559 PARAMETER Experiment Name: Zm_5mM_NO_P Parameter: Plant Line Value: 35A19
  misc_feature: MA Experiment 108559 PARAMETER Experiment Name: Zm_5mM_NO_P Parameter: Timepoint (hr) Value: 12
  misc_feature: MA Experiment 108559 PARAMETER Experiment Name: Zm_5mM_NO_P Parameter: Tissue Value: Aerial
  misc_feature: MA Experiment 108559 PARAMETER Experiment Name: Zm_5mM_NO_P Parameter: Treatment Value: 5mM NO vs. No Treatment
  misc_feature: MA Experiment ID: 20000535 Result: Down-regulated in Transcription
  misc_feature: MA Experiment 20000535 PARAMETER Experiment Name: Zm_Hybrid_Seed_Dev_P Parameter: DAP Value: 30 vs. 12
  misc_feature: MA Experiment 20000535 PARAMETER Experiment Name: Zm_Hybrid_Seed_Dev_P Parameter: Organism Value: Zea mays
  misc_feature: MA Experiment 20000535 PARAMETER Experiment Name: Zm_Hybrid_Seed_Dev_P Parameter: Plant Line Value: 35A19
  misc_feature: MA Experiment 20000535 PARAMETER Experiment Name: Zm_Hybrid_Seed_Dev_P Parameter: Tissue Value: Embryo vs. Unfert Floret
  misc_feature: MA Experiment ID: 20000626 Result: Up-regulated in Transcription
  misc_feature: MA Experiment 20000626 PARAMETER Experiment Name: Zm_Herbicide-Treatments_P Parameter: Timepoint (hr) Value: 12
  misc_feature: MA Experiment 20000626 PARAMETER Experiment Name: Zm_Herbicide-Treatments_P Parameter: Tissue Value: Aerial
  misc_feature: MA Experiment 20000626 PARAMETER Experiment Name: Zm_Herbicide-Treatments_P Parameter: Treatment Value: Roundup vs. No Treatment
aagaaaaggagaaccactgctcgcgctttgcaccagaccactagctccgagaagcggcaggcaggcaggcactcgaacaaatcagcagagcagggacacatgatatatataatatataaaccgagagagcacagagcaacccaagagagcaactgagcagccagccgtggaggaagagatgtacccataccgcatgagcaacgtgatgatcgggtacctgaacctggccacgctcctggcctcgctccccatcatcggggcggggctgtggctggcaaggggtagctcctcctcctccaccaccacgtgctcgtcgatcctgcagacgccgctcctcgccgtgggcttcgcggcgctgctggtctcgctcgccggcttcgtgggcgcctgcttccacgtggcctgggcgctgcggctgtacctcgccgccgtcgcgctgctcgtcgccttcctcctcggcctcaccgcgttcggcttcgcggtcaccgcgggcggcggcggcgcgcaggtgtacggccggccgtaccgggagtaccgcgtcacggactactcggcgtggctccagaagcgcatgcaggacgacaggtactggcgccccgccctcgcctgcgtcgtcgggtccaaggcctgccccaagatccagaactggacgcccatggactacctccagcacgatctcacgccaatacagtccggctgctgcaagccgccgacggcgtgccagtacagcggaggcatgccagtcggggcgcaggacgaggactgctaccggtggaacaacgccccggacatcctctgctaccggtgcgactcgtgcagggccggcgtgatggagcaggtgcgccaggactggcacaagatctttgtgctcgacgtcgccgtgctcgccgctctcgtctgcatctgctcatgcgggtgctgcgccttcaggaacgctcgccgctcccggtcccagtacccatacggggtaaaccaaacgtccaagataaacccacgctgggactactggtggcgatgatggggtggtagaagagaacaaatctactaggctagctgtagcttctcaatgcctgtatgatattttgatccaatcttctgtggaaaaaagataaaataacacttgggatctgtatgtgttattagcccctgtggtactatgtttgtttccaggtctgcagagtttagggtttagggtttctgtaaatatttgagttaagaggagactaagccatgaagtaaaagagatgcct

SEQ ID NO: 10024 - protein, 279 aa, Zea mays subsp. mays
  peptide (1)..(279): Ceres Seq. ID no. 12382283
  misc_feature (7)..(239): Pfam Name: Tetraspanin family Pfam Description: Tetraspanin family
  misc_feature (6)..(278): Homolog of NCBI NO: 34906104 NR Description: putative senescence-assocated protein [Oryza
  misc_feature (4)..(279): Homolog of NCBI NO: 30682045 NR Description: senescence-associated protein family [Arabidopsis
  misc_feature (4)..(278): Homolog of NCBI NO: 9294106 NR Description: senescence-associated protein-like [Arabidopsis
  misc_feature (5)..(279): Homolog of NCBI NO: 28392978 NR Description: unknown protein [Arabidopsis thaliana]
  misc_feature (4)..(260): Homolog of NCBI NO: 29367553 NR Description: senescence-associated protein-like protein [Oryza
  misc_feature (5)..(272): Homolog of NCBI NO: 15231187 NR Description: putative protein; protein id: At3g45600.1, by cDNA: 11427., supported by cDNA: gi_14423445 [Arabidopsis
  misc_feature (1)..(252): Homolog of NCBI NO: 3551954 NR Description: senescence-associated protein 5 [Hemerocallis
  misc_feature (7)..(263): Homolog of NCBI NO: 15238641 NR Description: senescence-associated protein - like; protein id:
  misc_feature (5)..(263): Homolog of NCBI NO: 20197174 NR Description: hypothetical protein [Arabidopsis thaliana]
  misc_feature (6)..(253): Homolog of NCBI NO: 15237490 NR Description: senescence-associated protein 5-like protein; id: At5g46700.1, supported by cDNA: gi_17979385 [Arabidopsis
MYPYRMSNVMIGYLNLATLLASLPIIGAGLWLARGSSSSSTTTCSSILQTPLLAVGFAALLVSLAGFVGACFHVAWALRLYLAAVALLVAFLLGLTAFGFAVTAGGGGAQVYGRPYREYRVTDYSAWLQKRMQDDRYWRPALACVVGSKACPKIQNWTPMDYLQHDLTPIQSGCCKPPTACQYSGGMPVGAQDEDCYRWNNAPDILCYRCDSCRAGVMEQVRQDWHKIFVLDVAVLAALVCICSCGCCAFRNARRSRSQYPYGVNQTSKINPRWDYWWR

SEQ ID NO: 10025 - protein, 274 aa, Zea mays subsp. mays
  peptide (1)..(274): Ceres Seq. ID no. 12382284
  misc_feature (2)..(234): Pfam Name: Tetraspanin family Pfam Description: Tetraspanin family
  misc_feature (1)..(273): Homolog of NCBI NO: 34906104 NR Description: putative senescence-assocated protein [Oryza
  misc_feature (1)..(274): Homolog of NCBI NO: 30682045 NR Description: senescence-associated protein family [Arabidopsis
  misc_feature (1)..(273): Homolog of NCBI NO: 9294106 NR Description: senescence-associated protein-like [Arabidopsis
  misc_feature (1)..(274): Homolog of NCBI NO: 28392978 NR Description: unknown protein [Arabidopsis thaliana]
  misc_feature (1)..(255): Homolog of NCBI NO: 29367553 NR Description: senescence-associated protein-like protein [Oryza
  misc_feature (1)..(267): Homolog of NCBI NO: 15231187 NR Description: putative protein; protein id: At3g45600.1, by cDNA: 11427., supported by cDNA: gi_14423445 [Arabidopsis
  misc_feature (1)..(247): Homolog of NCBI NO: 3551954 NR Description: senescence-associated protein 5 [Hemerocallis
  misc_feature (2)..(258): Homolog of NCBI NO: 15238641 NR Description: senescence-associated protein - like; protein id:
  misc_feature (1)..(258): Homolog of NCBI NO: 20197174 NR Description: hypothetical protein [Arabidopsis thaliana]
  misc_feature (1)..(248): Homolog of NCBI NO: 15237490 NR Description: senescence-associated protein 5-like protein; id: At5g46700.1, supported by cDNA: gi_17979385 [Arabidopsis
MSNVMIGYLNLATLLASLPIIGAGLWLARGSSSSSTTTCSSILQTPLLAVGFAALLVSLAGFVGACFHVAWALRLYLAAVALLVAFLLGLTAFGFAVTAGGGGAQVYGRPYREYRVTDYSAWLQKRMQDDRYWRPALACVVGSKACPKIQNWTPMDYLQHDLTPIQSGCCKPPTACQYSGGMPVGAQDEDCYRWNNAPDILCYRCDSCRAGVMEQVRQDWHKIFVLDVAVLAALVCICSCGCCAFRNARRSRSQYPYGVNQTSKINPRWDYWWR

SEQ ID NO: 10026 - protein, 270 aa, Zea mays subsp. mays
  peptide (1)..(270): Ceres Seq. ID no. 12382285
  misc_feature (1)..(230): Pfam Name: Tetraspanin family Pfam Description: Tetraspanin family
  misc_feature (1)..(269): Homolog of NCBI NO: 34906104 NR Description: putative senescence-assocated protein [Oryza
  misc_feature (1)..(270): Homolog of NCBI NO: 30682045 NR Description: senescence-associated protein family [Arabidopsis
  misc_feature (1)..(269): Homolog of NCBI NO: 9294106 NR Description: senescence-associated protein-like [Arabidopsis
  misc_feature (1)..(270): Homolog of NCBI NO: 28392978 NR Description: unknown protein [Arabidopsis thaliana]
  misc_feature (1)..(251): Homolog of NCBI NO: 29367553 NR Description: senescence-associated protein-like protein [Oryza
  misc_feature (1)..(263): Homolog of NCBI NO: 15231187 NR Description: putative protein; protein id: At3g45600.1, by cDNA: 11427., supported by cDNA: gi_14423445 [Arabidopsis
  misc_feature (1)..(243): Homolog of NCBI NO: 3551954 NR Description: senescence-associated protein 5 [Hemerocallis
  misc_feature (1)..(254): Homolog of NCBI NO: 15238641 NR Description: senescence-associated protein - like; protein id:
  misc_feature (1)..(254): Homolog of NCBI NO: 20197174 NR Description: hypothetical protein [Arabidopsis thaliana]
  misc_feature (1)..(244): Homolog of NCBI NO: 15237490 NR Description: senescence-associated protein 5-like protein; id: At5g46700.1, supported by cDNA: gi_17979385 [Arabidopsis
MIGYLNLATLLASLPIIGAGLWLARGSSSSSTTTCSSILQTPLLAVGFAALLVSLAGFVGACFHVAWALRLYLAAVALLVAFLLGLTAFGFAVTAGGGGAQVYGRPYREYRVTDYSAWLQKRMQDDRYWRPALACVVGSKACPKIQNWTPMDYLQHDLTPIQSGCCKPPTACQYSGGMPVGAQDEDCYRWNNAPDILCYRCDSCRAGVMEQVRQDWHKIFVLDVAVLAALVCICSCGCCAFRNARRSRSQYPYGVNQTSKINPRWDYWWR

SEQ ID NO: 10027 - DNA, 1697 bp, Zea mays subsp. mays
  misc_feature (1)..(1697): Ceres Seq. ID no. 12349504
  misc_feature: MA Experiment ID: 108522 Result: Up-regulated in Transcription
  misc_feature: MA Experiment 108522 PARAMETER Experiment Name: Zm_42deg_Heat_P Parameter: Age (day) Value: 8
  misc_feature: MA Experiment 108522 PARAMETER Experiment Name: Zm_42deg_Heat_P Parameter: Organism Value: Zea mays
  misc_feature: MA Experiment 108522 PARAMETER Experiment Name: Zm_42deg_Heat_P Parameter: Plant Line Value: 35A19
  misc_feature: MA Experiment 108522 PARAMETER Experiment Name: Zm_42deg_Heat_P Parameter: Temperature (deg C) Value: 42 vs. 22
  misc_feature: MA Experiment 108522 PARAMETER Experiment Name: Zm_42deg_Heat_P Parameter: Timepoint (hr) Value: 1
  misc_feature: MA Experiment 108522 PARAMETER Experiment Name: Zm_42deg_Heat_P Parameter: Tissue Value: Aerial
ctactgctactgtcagtgtcggcacgaggaagtgtgctaagagaggagacagcatctggggtgcatggttcttcttcaatcactacttcaagcctgctcttgtggagaagccaaaggggaaggtgacgcgagacgcgtctgggagcatctcgggctttgacaagtccgatctacgccttgatgtcttcctggtgcagcatgacatggagaacatgtacatgtgggttttcaaggagcggcccgacaatgccctcgggaagatgcagctcaggagcttcatgaatgggcattccaagcacggggagccgtctttcccattcagtgctgataagggcttttccaggtcacaccgcatgcagcgaaagcaataccgggggctttcgaacccgcagtgccttcatgggattgagatcgtgggctcaccgaatttgtcagcagttcctgatgcagacttgaagaggtgggctgaacttacaggcagggaacttaatttctcaataccatctgaagccagcgactttgaggcatggaggaatcttcccagcactgattttgaacttgacaggtcacatccaccggcagcaaagagtgccactcatggatctcatagccataagaagggattgaatggttcaggtcttaacctttcaactccaccatcatcagacgatgggatggacctttcaccaaaatgtgccaaacgccgcaagggtttctttggccatggcgtagaggaggactgtgtgatggcaaacaattcttgttctgacagagagcaagaggtagaagctcacgccagcgagccatcatggatgcatgagttcaccggtgttgccaagcacgcaagcgggcctgtcactgctgccaagacaatatacgaggacgaggaagggtacctaatcgtggtgagcatgcttttctccgacccgcatagcgtcaaggtgtcctggaggaacacgctcacgcatggcatcgtgaagataacgtgcgtgagcactgcccggatgccctacatcaagagacacgacaggacgttcaagctgacggacccttcccccgagcactgccctcccggcgagtttgtgagggagatacctctggccacaaggattccagaagacgcgaagatcgaggcgtattacgacgagacgggaactggactggaaatcatggtcccaaagcaccgggttggaccggaggagcatgaagttcgggtgtgcatgaggcccccgcatcttggcgacagcgatcttgtgctatcctagaacgaggaaaacaggtagctttcggattttccagtgccatgtttattgccatgagatactcgaacgtaacaggtggtgccatggatcagtgagagccatcatatttgctgctaaacatgtagcttataagttgagaaattcttttcctccataagtccccgttcggttaggctggaataagactaggaactattccaggtgaccaattgttatactacaaattatacagttatttcagctgggatccttcctggagtagattcctgaataaccgaacgggacctaaaagttctgtggtttaggcgaaagttacctcctacctctgttaattccccccctcccctctgtacctctgttacacaagtacatcactattggcgatcttccttgactatctgaaagctggctagtgttaagattctgtgtatattc

SEQ ID NO: 10028 - protein, 420 aa, Zea mays subsp. mays
  peptide (1)..(420): Ceres Seq. ID no. 12349505
  misc_feature (4)..(420): Homolog of NCBI NO: 34895866 NR Description: P0009G03.13 [Oryza sativa (japonica
  misc_feature (7)..(420): Homolog of NCBI NO: 34908142 NR Description: putative SLT1 protein (ion homeostasis related
  misc_feature (6)..(420): Homolog of NCBI NO: 18404463 NR Description: expressed protein; protein id: At2g37570.1, by cDNA: gi_11611668, supported by cDNA: gi_15451173, supported
  misc_feature (6)..(420): Homolog of NCBI NO: 11611667 NR Description: SLT1 protein [Nicotiana tabacum]
  misc_feature (9)..(409): Homolog of NCBI NO: 18399669 NR Description: expressed protein; protein id: At3g12570.1, by cDNA: gi_13430761 [Arabidopsis thaliana] gene_id:T16H11.6~pir||T02523~strong similarity to unknown protein
  misc_feature (9)..(413): Homolog of NCBI NO: 11280862 NR Description: hypothetical protein T22P11.70 - Arabidopsis >gi|7413637|emb|CAB85985.1| putative protein [Arabidopsis
  misc_feature (9)..(413): Homolog of NCBI NO: 18413934 NR Description: putative protein; protein id: At5g02480.1, by cDNA: gi_13430449, supported by cDNA: gi_15724273 [Arabidopsis >gi|13430450|gb|AAK25847.1|AF360137_1 unknown protein
TATVSVGTRKCAKRGDSIWGAWFFFNHYFKPALVEKPKGKVTRDASGSISGFDKSDLRLDVFLVQHDMENMYMWVFKERPDNALGKMQLRSFMNGHSKHGEPSFPFSADKGFSRSHRMQRKQYRGLSNPQCLHGIEIVGSPNLSAVPDADLKRWAELTGRELNFSIPSEASDFEAWRNLPSTDFELDRSHPPAAKSATHGSHSHKKGLNGSGLNLSTPPSSDDGMDLSPKCAKRRKGFFGHGVEEDCVMANNSCSDREQEVEAHASEPSWMHEFTGVAKHASGPVTAAKTIYEDEEGYLIVVSMLFSDPHSVKVSWRNTLTHGIVKITCVSTARMPYIKRHDRTFKLTDPSPEHCPPGEFVREIPLATRIPEDAKIEAYYDETGTGLEIMVPKHRVGPEEHEVRVCMRPPHLGDSDLVLS

SEQ ID NO: 10029 - protein, 353 aa, Zea mays subsp. mays
  peptide (1)..(353): Ceres Seq. ID no. 12349506
  misc_feature (1)..(353): Homolog of NCBI NO: 34895866 NR Description: P0009G03.13 [Oryza sativa (japonica
  misc_feature (1)..(353): Homolog of NCBI NO: 34908142 NR Description: putative SLT1 protein (ion homeostasis related
  misc_feature (1)..(353): Homolog of NCBI NO: 18404463 NR Description: expressed protein; protein id: At2g37570.1, by cDNA: gi_11611668, supported by cDNA: gi_15451173, supported
  misc_feature (1)..(353): Homolog of NCBI NO: 11611667 NR Description: SLT1 protein [Nicotiana tabacum]
  misc_feature (1)..(342): Homolog of NCBI NO: 18399669 NR Description: expressed protein; protein id: At3g12570.1, by cDNA: gi_13430761 [Arabidopsis thaliana] gene_id:T16H11.6~pir||T02523~strong similarity to unknown protein
  misc_feature (1)..(346): Homolog of NCBI NO: 11280862 NR Description: hypothetical protein T22P11.70 - Arabidopsis >gi|7413637|emb|CAB85985.1| putative protein [Arabidopsis
  misc_feature (1)..(346): Homolog of NCBI NO: 18413934 NR Description: putative protein; protein id: At5g02480.1, by cDNA: gi_13430449, supported by cDNA: gi_15724273 [Arabidopsis >gi|13430450|gb|AAK25847.1|AF360137_1 unknown protein
MENMYMWVFKERPDNALGKMQLRSFMNGHSKHGEPSFPFSADKGFSRSHRMQRKQYRGLSNPQCLHGIEIVGSPNLSAVPDADLKRWAELTGRELNFSIPSEASDFEAWRNLPSTDFELDRSHPPAAKSATHGSHSHKKGLNGSGLNLSTPPSSDDGMDLSPKCAKRRKGFFGHGVEEDCVMANNSCSDREQEVEAHASEPSWMHEFTGVAKHASGPVTAAKTIYEDEEGYLIVVSMLFSDPHSVKVSWRNTLTHGIVKITCVSTARMPYIKRHDRTFKLTDPSPEHCPPGEFVREIPLATRIPEDAKIEAYYDETGTGLEIMVPKHRVGPEEHEVRVCMRPPHLGDSDLVLS

SEQ ID NO: 10030 - protein, 350 aa, Zea mays subsp. mays
  peptide (1)..(350): Ceres Seq. ID no. 12349507
  misc_feature (1)..(350): Homolog of NCBI NO: 34895866 NR Description: P0009G03.13 [Oryza sativa (japonica
  misc_feature (1)..(350): Homolog of NCBI NO: 34908142 NR Description: putative SLT1 protein (ion homeostasis related
  misc_feature (1)..(350): Homolog of NCBI NO: 18404463 NR Description: expressed protein; protein id: At2g37570.1, by cDNA: gi_11611668, supported by cDNA: gi_15451173, supported
  misc_feature (1)..(350): Homolog of NCBI NO: 11611667 NR Description: SLT1 protein [Nicotiana tabacum]
  misc_feature (1)..(339): Homolog of NCBI NO: 18399669 NR Description: expressed protein; protein id: At3g12570.1, by cDNA: gi_13430761 [Arabidopsis thaliana] gene_id:T16H11.6~pir||T02523~strong similarity to unknown protein
  misc_feature (1)..(343): Homolog of NCBI NO: 11280862 NR Description: hypothetical protein T22P11.70 - Arabidopsis >gi|7413637|emb|CAB85985.1| putative protein [Arabidopsis
  misc_feature (1)..(343): Homolog of NCBI NO: 18413934 NR Description: putative protein; protein id: At5g02480.1, by cDNA: gi_13430449, supported by cDNA: gi_15724273 [Arabidopsis >gi|13430450|gb|AAK25847.1|AF360137_1 unknown protein
MYMWVFKERPDNALGKMQLRSFMNGHSKHGEPSFPFSADKGFSRSHRMQRKQYRGLSNPQCLHGIEIVGSPNLSAVPDADLKRWAELTGRELNFSIPSEASDFEAWRNLPSTDFELDRSHPPAAKSATHGSHSHKKGLNGSGLNLSTPPSSDDGMDLSPKCAKRRKGFFGHGVEEDCVMANNSCSDREQEVEAHASEPSWMHEFTGVAKHASGPVTAAKTIYEDEEGYLIVVSMLFSDPHSVKVSWRNTLTHGIVKITCVSTARMPYIKRHDRTFKLTDPSPEHCPPGEFVREIPLATRIPEDAKIEAYYDETGTGLEIMVPKHRVGPEEHEVRVCMRPPHLGDSDLVLS

SEQ ID NO: 10031 - DNA, 1828 bp, Zea mays subsp. mays
  misc_feature (1)..(1828): Ceres Seq. ID no. 12357360
  misc_feature: MA Experiment ID: 108515 Result: Up-regulated in Transcription
  misc_feature: MA Experiment 108515 PARAMETER Experiment Name: Zm_2mM_SA_P Parameter: Age (day) Value: 8
  misc_feature: MA Experiment 108515 PARAMETER Experiment Name: Zm_2mM_SA_P Parameter: Organism Value: Zea mays
  misc_feature: MA Experiment 108515 PARAMETER Experiment Name: Zm_2mM_SA_P Parameter: Plant Line Value: 35A19
  misc_feature: MA Experiment 108515 PARAMETER Experiment Name: Zm_2mM_SA_P Parameter: Timepoint (hr) Value: 12
  misc_feature: MA Experiment 108515 PARAMETER Experiment Name: Zm_2mM_SA_P Parameter: Tissue Value: Aerial
  misc_feature: MA Experiment 108515 PARAMETER Experiment Name: Zm_2mM_SA_P Parameter: Treatment Value: 2mM SA vs. No Treatment
  misc_feature: MA Experiment ID: 108522 Result: Down-regulated in Transcription
  misc_feature: MA Experiment 108522 PARAMETER Experiment Name: Zm_42deg_Heat_P Parameter: Age (day) Value: 8
  misc_feature: MA Experiment 108522 PARAMETER Experiment Name: Zm_42deg_Heat_P Parameter: Organism Value: Zea mays
  misc_feature: MA Experiment 108522 PARAMETER Experiment Name: Zm_42deg_Heat_P Parameter: Plant Line Value: 35A19
  misc_feature: MA Experiment 108522 PARAMETER Experiment Name: Zm_42deg_Heat_P Parameter: Temperature (deg C) Value: 42 vs. 22
  misc_feature: MA Experiment 108522 PARAMETER Experiment Name: Zm_42deg_Heat_P Parameter: Timepoint (hr) Value: 1
  misc_feature: MA Experiment 108522 PARAMETER Experiment Name: Zm_42deg_Heat_P Parameter: Tissue Value: Aerial
  misc_feature: MA Experiment ID: 108523 Result: Down-regulated in Transcription
  misc_feature: MA Experiment 108523 PARAMETER Experiment Name: Zm_42deg_Heat_P Parameter: Age (day) Value: 8
  misc_feature: MA Experiment 108523 PARAMETER Experiment Name: Zm_42deg_Heat_P Parameter: Organism Value: Zea mays
  misc_feature: MA Experiment 108523 PARAMETER Experiment Name: Zm_42deg_Heat_P Parameter: Plant Line Value: 35A19
  misc_feature: MA Experiment 108523 PARAMETER Experiment Name: Zm_42deg_Heat_P Parameter: Temperature (deg C) Value: 42 vs. 22
  misc_feature: MA Experiment 108523 PARAMETER Experiment Name: Zm_42deg_Heat_P Parameter: Timepoint (hr) Value: 6
  misc_feature: MA Experiment 108523 PARAMETER Experiment Name: Zm_42deg_Heat_P Parameter: Tissue Value: Aerial
  misc_feature: MA Experiment ID: 108526 Result: Up-regulated in Transcription
  misc_feature: MA Experiment 108526 PARAMETER Experiment Name: Zm_5mM_NO_P Parameter: Age (day) Value: 8
  misc_feature: MA Experiment 108526 PARAMETER Experiment Name: Zm_5mM_NO_P Parameter: Organism Value: Zea mays
  misc_feature: MA Experiment 108526 PARAMETER Experiment Name: Zm_5mM_NO_P Parameter: Plant Line Value: 35A19
  misc_feature: MA Experiment 108526 PARAMETER Experiment Name: Zm_5mM_NO_P Parameter: Timepoint (hr) Value: 1
  misc_feature: MA Experiment 108526 PARAMETER Experiment Name: Zm_5mM_NO_P Parameter: Tissue Value: Aerial
  misc_feature: MA Experiment 108526 PARAMETER Experiment Name: Zm_5mM_NO_P Parameter: Treatment Value: 5mM NO vs. No Treatment
  misc_feature: MA Experiment ID: 108527 Result: Up-regulated in Transcription
  misc_feature: MA Experiment 108527 PARAMETER Experiment Name: Zm_5mM_NO_P Parameter: Age (day) Value: 8
  misc_feature: MA Experiment 108527 PARAMETER Experiment Name: Zm_5mM_NO_P Parameter: Organism Value: Zea mays
  misc_feature: MA Experiment 108527 PARAMETER Experiment Name: Zm_5mM_NO_P Parameter: Plant Line Value: 35A19
  misc_feature: MA Experiment 108527 PARAMETER Experiment Name: Zm_5mM_NO_P Parameter: Timepoint (hr) Value: 6
  misc_feature: MA Experiment 108527 PARAMETER Experiment Name: Zm_5mM_NO_P Parameter: Tissue Value: Aerial
  misc_feature: MA Experiment 108527 PARAMETER Experiment Name: Zm_5mM_NO_P Parameter: Treatment Value: 5mM NO vs. No Treatment
  misc_feature: MA Experiment ID: 108528 Result: Down-regulated in Transcription
  misc_feature: MA Experiment 108528 PARAMETER Experiment Name: Zm_Imbibed_Seeds_P Parameter: Age (day) Value: 5 vs. 2
  misc_feature: MA Experiment 108528 PARAMETER Experiment Name: Zm_Imbibed_Seeds_P Parameter: Organism Value: Zea mays
  misc_feature: MA Experiment 108528 PARAMETER Experiment Name: Zm_Imbibed_Seeds_P Parameter: Plant Line Value: 35A19
  misc_feature: MA Experiment 108528 PARAMETER Experiment Name: Zm_Imbibed_Seeds_P Parameter: Tissue Value: Aerial vs. Embryo
  misc_feature: MA Experiment ID: 108529 Result: Down-regulated in Transcription
  misc_feature: MA Experiment 108529 PARAMETER Experiment Name: Zm_Imbibed_Seeds_P Parameter: Age (day) Value: 5 vs. 2
  misc_feature: MA Experiment 108529 PARAMETER Experiment Name: Zm_Imbibed_Seeds_P Parameter: Organism Value: Zea mays
  misc_feature: MA Experiment 108529 PARAMETER Experiment Name: Zm_Imbibed_Seeds_P Parameter: Plant Line Value: 35A19
  misc_feature: MA Experiment 108529 PARAMETER Experiment Name: Zm_Imbibed_Seeds_P Parameter: Tissue Value: Roots vs. Embryo
  misc_feature: MA Experiment ID: 108530 Result: Down-regulated in Transcription
  misc_feature: MA Experiment 108530 PARAMETER Experiment Name: Zm_Imbibed_Seeds_P Parameter: Age (day) Value: 6 vs. 2
  misc_feature: MA Experiment 108530 PARAMETER Experiment Name: Zm_Imbibed_Seeds_P Parameter: Organism Value: Zea mays
  misc_feature: MA Experiment 108530 PARAMETER Experiment Name: Zm_Imbibed_Seeds_P Parameter: Plant Line Value: 35A19
  misc_feature: MA Experiment 108530 PARAMETER Experiment Name: Zm_Imbibed_Seeds_P Parameter: Tissue Value: Aerial vs. Embryo
  misc_feature: MA Experiment ID: 108534 Result: Up-regulated in Transcription
  misc_feature: MA Experiment 108534 PARAMETER Experiment Name: Zm_4deg_Cold_P Parameter: Age (hr) Value: 8
  misc_feature: MA Experiment 108534 PARAMETER Experiment Name: Zm_4deg_Cold_P Parameter: Organism Value: Zea mays
  misc_feature: MA Experiment 108534 PARAMETER Experiment Name: Zm_4deg_Cold_P Parameter: Plant Line Value: 35A19
  misc_feature: MA Experiment 108534 PARAMETER Experiment Name: Zm_4deg_Cold_P Parameter: Temperature (deg C) Value: 4 vs. 22
  misc_feature: MA Experiment 108534 PARAMETER Experiment Name: Zm_4deg_Cold_P Parameter: Timepoint (hr) Value: 6
  misc_feature: MA Experiment 108534 PARAMETER Experiment Name: Zm_4deg_Cold_P Parameter: Tissue Value: Aerial
  misc_feature: MA Experiment ID: 108542 Result: Down-regulated in Transcription
  misc_feature: MA Experiment 108542 PARAMETER Experiment Name: Zm_150mM_NaCl_P Parameter: Age (day) Value: 8
  misc_feature: MA Experiment 108542 PARAMETER Experiment Name: Zm_150mM_NaCl_P Parameter: Organism Value: Zea mays
  misc_feature: MA Experiment 108542 PARAMETER Experiment Name: Zm_150mM_NaCl_P Parameter: Plant Line Value: 35A19
  misc_feature: MA Experiment 108542 PARAMETER Experiment Name: Zm_150mM_NaCl_P Parameter: Timepoint (hr) Value: 6
  misc_feature: MA Experiment 108542 PARAMETER Experiment Name: Zm_150mM_NaCl_P Parameter: Tissue Value: Aerial
  misc_feature: MA Experiment 108542 PARAMETER Experiment Name: Zm_150mM_NaCl_P Parameter: Treatment Value: 150mM NaCl vs. No Treatment
  misc_feature: MA Experiment ID: 108543 Result: Up-regulated in Transcription
  misc_feature: MA Experiment ID: 108544 Result: Down-regulated in Transcription
  misc_feature: MA Experiment ID: 108545 Result: Down-regulated in Transcription
  misc_feature: MA Experiment 108545 PARAMETER Experiment Name: Zm_Imbibed_Seeds_P Parameter: Age (day) Value: 3 vs. 2
  misc_feature: MA Experiment 108545 PARAMETER Experiment Name: Zm_Imbibed_Seeds_P Parameter: Organism Value: Zea mays
  misc_feature: MA Experiment 108545 PARAMETER Experiment Name: Zm_Imbibed_Seeds_P Parameter: Plant Line Value: 35A19
  misc_feature: MA Experiment 108545 PARAMETER Experiment Name: Zm_Imbibed_Seeds_P Parameter: Tissue Value: Aerial vs. Embryo
  misc_feature: MA Experiment ID: 108547 Result: Down-regulated in Transcription
  misc_feature: MA Experiment 108547 PARAMETER Experiment Name: Zm_Imbibed_Seeds_P Parameter: Age (day) Value: 4 vs. 2
  misc_feature: MA Experiment 108547 PARAMETER Experiment Name: Zm_Imbibed_Seeds_P Parameter: Organism Value: Zea mays
  misc_feature: MA Experiment 108547 PARAMETER Experiment Name: Zm_Imbibed_Seeds_P Parameter: Plant Line Value: 35A19
  misc_feature: MA Experiment 108547 PARAMETER Experiment Name: Zm_Imbibed_Seeds_P Parameter: Tissue Value: Aerial vs. Embryo
  misc_feature: MA Experiment ID: 108556 Result: Down-regulated in Transcription
  misc_feature: MA Experiment 108556 PARAMETER Experiment Name: Zm_Drought_P Parameter: Age (day) Value: 9
  misc_feature: MA Experiment 108556 PARAMETER Experiment Name: Zm_Drought_P Parameter: Organism Value: Zea mays
  misc_feature: MA Experiment 108556 PARAMETER Experiment Name: Zm_Drought_P Parameter: Plant Line Value: 35A19
  misc_feature: MA Experiment 108556 PARAMETER Experiment Name: Zm_Drought_P Parameter: Timepoint (hr) Value: 24
  misc_feature: MA Experiment 108556 PARAMETER Experiment Name: Zm_Drought_P Parameter: Tissue Value: Aerial
  misc_feature: MA Experiment 108556 PARAMETER Experiment Name: Zm_Drought_P Parameter: Treatment Value: Drought vs. No Drought
  misc_feature: MA Experiment ID: 108689 Result: Down-regulated in Transcription
  misc_feature: MA Experiment 108689 PARAMETER Experiment Name: Zm_Drought_Roots_P Parameter: Age (day) Value: 9
  misc_feature: MA Experiment 108689 PARAMETER Experiment Name: Zm_Drought_Roots_P Parameter: Organism Value: Zea mays
  misc_feature: MA Experiment 108689 PARAMETER Experiment Name: Zm_Drought_Roots_P Parameter: Plant Line Value: 35A19
  misc_feature: MA Experiment 108689 PARAMETER Experiment Name: Zm_Drought_Roots_P Parameter: Timepoint (hr) Value: 24
  misc_feature: MA Experiment 108689 PARAMETER Experiment Name: Zm_Drought_Roots_P Parameter: Tissue Value: Roots
  misc_feature: MA Experiment 108689 PARAMETER Experiment Name: Zm_Drought_Roots_P Parameter: Treatment Value: Drought vs. No Drought
  misc_feature: MA Experiment ID: 20000487 Result: Down-regulated in Transcription
  misc_feature: MA Experiment 20000487 PARAMETER Experiment Name: Zm_50mM_NH4NO3_L_to_H_P Parameter: Organism Value: Zea mays
  misc_feature: MA Experiment 20000487 PARAMETER Experiment Name: Zm_50mM_NH4NO3_L_to_H_P Parameter: Timepoint (hr) Value: 4
  misc_feature: MA Experiment 20000487 PARAMETER Experiment Name: Zm_50mM_NH4NO3_L_to_H_P Parameter: Tissue Value: Leaves
  misc_feature: MA Experiment 20000487 PARAMETER Experiment Name: Zm_50mM_NH4NO3_L_to_H_P Parameter: Treatment Value: 50mM NH4NO3 vs. 100mM Mannitol
  misc_feature: MA Experiment ID: 20000488 Result: Down-regulated in Transcription
  misc_feature: MA Experiment 20000488 PARAMETER Experiment Name: Zm_50mM_NH4NO3_L_to_H_P Parameter: Organism Value: Zea mays
  misc_feature: MA Experiment 20000488 PARAMETER Experiment Name: Zm_50mM_NH4NO3_L_to_H_P Parameter: Timepoint (hr) Value: 8
  misc_feature: MA Experiment 20000488 PARAMETER Experiment Name: Zm_50mM_NH4NO3_L_to_H_P Parameter: Tissue Value: Leaves
  misc_feature: MA Experiment 20000488 PARAMETER Experiment Name: Zm_50mM_NH4NO3_L_to_H_P Parameter: Treatment Value: 50mM NH4NO3 vs. 100mM Mannitol
  misc_feature: MA Experiment ID: 20000532 Result: Up-regulated in Transcription
  misc_feature: MA Experiment 20000532 PARAMETER Experiment Name: Zm_0.001percent_MeJA_P Parameter: Age (day) Value: 10
  misc_feature: MA Experiment 20000532 PARAMETER Experiment Name: Zm_0.001percent_MeJA_P Parameter: Organism Value: Zea mays
  misc_feature: MA Experiment 20000532 PARAMETER Experiment Name: Zm_0.001percent_MeJA_P Parameter: Plant Line Value: 35A19
  misc_feature: MA Experiment 20000532 PARAMETER Experiment Name: Zm_0.001percent_MeJA_P Parameter: Timepoint (hr) Value: 48
  misc_feature: MA Experiment 20000532 PARAMETER Experiment Name: Zm_0.001percent_MeJA_P Parameter: Tissue Value: Aerial
  misc_feature: MA Experiment 20000532 PARAMETER Experiment Name: Zm_0.001percent_MeJA_P Parameter: Treatment Value: 0.001percent MeJA vs. No Treatment
  misc_feature: MA Experiment ID: 20000535 Result: Up-regulated in Transcription
  misc_feature: MA Experiment 20000535 PARAMETER Experiment Name: Zm_Hybrid_Seed_Dev_P Parameter: DAP Value: 30 vs. 12
  misc_feature: MA Experiment 20000535 PARAMETER Experiment Name: Zm_Hybrid_Seed_Dev_P Parameter: Organism Value: Zea mays
  misc_feature: MA Experiment 20000535 PARAMETER Experiment Name: Zm_Hybrid_Seed_Dev_P Parameter: Plant Line Value: 35A19
  misc_feature: MA Experiment 20000535 PARAMETER Experiment Name: Zm_Hybrid_Seed_Dev_P Parameter: Tissue Value: Embryo vs. Unfert Floret
  misc_feature: MA Experiment ID: 20000626 Result: Up-regulated in Transcription
  misc_feature: MA Experiment 20000626 PARAMETER Experiment Name: Zm_Herbicide-Treatments_P Parameter: Timepoint (hr) Value: 12
  misc_feature: MA Experiment 20000626 PARAMETER Experiment Name: Zm_Herbicide-Treatments_P Parameter: Tissue Value: Aerial
  misc_feature: MA Experiment 20000626 PARAMETER Experiment Name: Zm_Herbicide-Treatments_P Parameter: Treatment Value: Roundup vs. No Treatment
  misc_feature: MA Experiment ID: 20001608 Result: Down-regulated in Transcription
  misc_feature: MA Experiment 20001608 PARAMETER Experiment Name: Zm_50ppm_KNO3_L-to-H_P Parameter: Age (day) Value: 21
  misc_feature: MA Experiment 20001608 PARAMETER Experiment Name: Zm_50ppm_KNO3_L-to-H_P Parameter: Organism Value: Zea mays
  misc_feature: MA Experiment 20001608 PARAMETER Experiment Name: Zm_50ppm_KNO3_L-to-H_P Parameter: Plant Line Value: 35A19
  misc_feature: MA Experiment 20001608 PARAMETER Experiment Name: Zm_50ppm_KNO3_L-to-H_P Parameter: Timepoint (hr) Value: 48
  misc_feature: MA Experiment 20001608 PARAMETER Experiment Name: Zm_50ppm_KNO3_L-to-H_P Parameter: Tissue Value: Shoots
  misc_feature: MA Experiment 20001608 PARAMETER Experiment Name: Zm_50ppm_KNO3_L-to-H_P Parameter: Treatment Value: 50ppm KNO3 vs. 50ppm KCl
  misc_feature: MA Experiment ID: 20001612 Result: Down-regulated in Transcription
  misc_feature: MA Experiment 20001612 PARAMETER Experiment Name: Zm_50ppm_KNO3_L-to-H_P Parameter: Age (day) Value: 19
  misc_feature: MA Experiment 20001612 PARAMETER Experiment Name: Zm_50ppm_KNO3_L-to-H_P Parameter: Organism Value: Zea mays
  misc_feature: MA Experiment 20001612 PARAMETER Experiment Name: Zm_50ppm_KNO3_L-to-H_P Parameter: Plant Line Value: 35A19
  misc_feature: MA Experiment 20001612 PARAMETER Experiment Name: Zm_50ppm_KNO3_L-to-H_P Parameter: Timepoint (hr) Value: 8
  misc_feature: MA Experiment 20001612 PARAMETER Experiment Name: Zm_50ppm_KNO3_L-to-H_P Parameter: Tissue Value: Roots
  misc_feature: MA Experiment 20001612 PARAMETER Experiment Name: Zm_50ppm_KNO3_L-to-H_P Parameter: Treatment Value: 50ppm KNO3 vs. 50ppm KCl
  misc_feature: MA Experiment ID: 20001613 Result: Down-regulated in Transcription
  misc_feature: MA Experiment 20001613 PARAMETER Experiment Name: Zm_50ppm_KNO3_L-to-H_P Parameter: Age (day) Value: 20
  misc_feature: MA Experiment 20001613 PARAMETER Experiment Name: Zm_50ppm_KNO3_L-to-H_P Parameter: Organism Value: Zea mays
  misc_feature: MA Experiment 20001613 PARAMETER Experiment Name: Zm_50ppm_KNO3_L-to-H_P Parameter: Plant Line Value: 35A19
  misc_feature: MA Experiment 20001613 PARAMETER Experiment Name: Zm_50ppm_KNO3_L-to-H_P Parameter: Timepoint (hr) Value: 24
  misc_feature: MA Experiment 20001613 PARAMETER Experiment Name: Zm_50ppm_KNO3_L-to-H_P Parameter: Tissue Value: Roots
  misc_feature: MA Experiment 20001613 PARAMETER Experiment Name: Zm_50ppm_KNO3_L-to-H_P Parameter: Treatment Value: 50ppm KNO3 vs. 50ppm KCl
aaaaaaaccagcgactcacacacccgcgcgccgcttctgtagggccccaaccaaccgcgcagggagaaaaccaccacagcacatgcagcgcctcgcctcctcccggaggctcctccaggccgcgctcgcccccgcccgggccaactccagcctctccgcggccgccgtcgccgcgcccgcgccagcgaatggcgccttcccgaagatgccggccttcgactacacgccgccgccgtacgacgggccgcgcgccgaggagatcttccggaagcgcgctcagttcctcagcccatccctttttcatttctacgatcgcccattgaacatagtcgaaggaaagatgcagtacctatttgatgaggatggccgtcgttacctggatgctttcggtggcattgcaacagtttgttgtgggcactgccatccagatgttgttgaagccatagtaaaccaggcaaagcggatccagcactccacagttctatatctcaatcatgcaattgcagattttgccgaggcattggcttccaaaatgcctggtgatctgaaggttgttttcttcacaaattcaggcacggaggcaaatgagcttgcactgatgattgcacggctttacactggttgcaatgacattatctctcttaggaatggataccatgggaatgctgctggaacaatgggtgctactgctcaatccaattggaaattcaatgttgttcagacgggagtacaccatgcgcttaatccagaccccttcagaggtgcttttggttctgacggggagaaatacgccagagatgttcaggaaatggtcgaatttggaactacagggagagttggtgggttcatttcggaagccatacagggggttggtggaatagtggaactggcaccaggatacttgcccgtggcatacagtatggtaaggaaagccggtgggctctgcatcgccgacgaagttcaggcaggagtcgcgagaactggaagccacttctggggattcgaagggcatggtgtcatcccggacatagtcaccatggccaagggtatcgggaatggcatacccataggagctgtagtaacgacgccagagatcgctcaggtgttgacccgcagaagctacttcaatacctttggtggtaaccctgtcagcactgcaggcgggcatgcggtgctcaaagtgctggagaaggagaagctccaggagaatgcgtttgttgtgggctcctacctaaaggaacagcttaacaatctgaaagacaagcatgagatcatcggtgacgttaggggcaaaggcttccttcttggagttgagctggtgacagaccatgaaaagaaaaccccagccaaagctgagatctcacgtgtcatgaaccatatgaaagatatgggagtgttggttggtaagggtggtttctacgggaacgtttttaggataacaccaccgttgtgcttcaccaaagaggattccgacttcttcattgaggtgatggacattgcgctctcgaagctgtgaggcaagcagggcgaagatgatgtgcaaaccctggtccgtcgccatgggatttttgcccatgaataatattaagattaatgagacagcacctcgttgtctcttaatctaagacgatgccatgtcatccggtggcatggtattcctaatcctacctgccaaatcactggtattgctcgctgtctcgtaatcagacccatggagcaatatgattcttgtaaactctagcttcatccaatctgttcctcctgatctaactagtctgaatagcagctgttcgtttgtgaccaatatcaacttcttttcagatgctcc

SEQ ID NO: 10032 - protein, 504 aa, Zea mays subsp. mays
  peptide (1)..(504): Ceres Seq. ID no. 12357361
  misc_feature (97)..(504): Pfam Name: Aminotransferase class-III Pfam Description: Aminotransferase class-III
  misc_feature (260)..(503): Homolog of NCBI NO: 16198011 NR Description: LD24726p [Drosophila melanogaster]
  misc_feature (260)..(503): Homolog of NCBI NO: 28574759 NR Description: CG11241-PA [Drosophila melanogaster]
  misc_feature (28)..(504): Homolog of NCBI NO: 15224499 NR Description: putative beta-alanine-pyruvate aminotransferase; id: At2g38400.1, supported by cDNA: 147543., supported by cDNA: supported by cDNA: gi_5731260 [Arabidopsis thaliana]
  misc_feature (31)..(504): Homolog of NCBI NO: 5731259 NR Description: alanine:glyoxylate aminotransferase 2 homolog
  misc_feature (272)..(494): Homolog of NCBI NO: 7434175 NR Description: hypothetical protein T19P19.50 - Arabidopsis >gi|3080435|emb|CAA18752.1| putative protein [Arabidopsis >gi|7270950|emb|CAB80629.1| putative protein [Arabidopsis
  misc_feature (31)..(242): Homolog of NCBI NO: 7434175 NR Description: hypothetical protein T19P19.50 - Arabidopsis >gi|3080435|emb|CAA18752.1| putative protein [Arabidopsis >gi|7270950|emb|CAB80629.1| putative protein [Arabidopsis
  misc_feature (31)..(504): Homolog of NCBI NO: 18420498 NR Description: putative protein; protein id: At4g39660.1, by cDNA: gi_15809991, supported by cDNA: gi_5731258 [Arabidopsis >gi|15809992|gb|AAL06923.1| AT4g39660/T19P19_50 [Arabidopsis
  misc_feature (28)..(504): Homolog of NCBI NO: 15028237 NR Description: putative beta-alanine-pyruvate aminotransferase
  misc_feature (28)..(504): Homolog of NCBI NO: 15231974 NR Description: putative aminotransferase; protein id: supported by cDNA: gi_20466699 [Arabidopsis thaliana] putative aminotransferase [Arabidopsis thaliana]
  misc_feature (31)..(257): Homolog of NCBI NO: 16198011 NR Description: LD24726p [Drosophila melanogaster]
KKPATHTPARRFCRAPTNRAGRKPPQHMQRLASSRRLLQAALAPARANSSLSAAAVAAPAPANGAFPKMPAFDYTPPPYDGPRAEEIFRKRAQFLSPSLFHFYDRPLNIVEGKMQYLFDEDGRRYLDAFGGIATVCCGHCHPDVVEAIVNQAKRIQHSTVLYLNHAIADFAEALASKMPGDLKVVFFTNSGTEANELALMIARLYTGCNDIISLRNGYHGNAAGTMGATAQSNWKFNVVQTGVHHALNPDPFRGAFGSDGEKYARDVQEMVEFGTTGRVGGFISEAIQGVGGIVELAPGYLPVAYSMVRKAGGLCIADEVQAGVARTGSHFWGFEGHGVIPDIVTMAKGIGNGIPIGAVVTTPEIAQVLTRRSYFNTFGGNPVSTAGGHAVLKVLEKEKLQENAFVVGSYLKEQLNNLKDKHEIIGDVRGKGFLLGVELVTDHEKKTPAKAEISRVMNHMKDMGVLVGKGGFYGNVFRITPPLCFTKEDSDFFIEVMDIALSKL

SEQ ID NO: 10033 - protein, 477 aa, Zea mays subsp. mays
  peptide (1)..(477): Ceres Seq. ID no. 12357362
  misc_feature (70)..(477): Pfam Name: Aminotransferase class-III Pfam Description: Aminotransferase class-III
  misc_feature (1)..(477): Homolog of NCBI NO: 15231974 NR Description: putative aminotransferase; protein id: supported by cDNA: gi_20466699 [Arabidopsis thaliana] putative aminotransferase [Arabidopsis thaliana]
  misc_feature (1)..(477): Homolog of NCBI NO: 15224499 NR Description: putative beta-alanine-pyruvate aminotransferase; id: At2g38400.1, supported by cDNA: 147543., supported by cDNA: supported by cDNA: gi_5731260 [Arabidopsis thaliana]
  misc_feature (1)..(477): Homolog of NCBI NO: 15028237 NR Description: putative beta-alanine-pyruvate aminotransferase
  misc_feature (4)..(477): Homolog of NCBI NO: 5731259 NR Description: alanine:glyoxylate aminotransferase 2 homolog
  misc_feature (4)..(477): Homolog of NCBI NO: 18420498 NR Description: putative protein; protein id: At4g39660.1, by cDNA: gi_15809991, supported by cDNA: gi_5731258 [Arabidopsis >gi|15809992|gb|AAL06923.1| AT4g39660/T19P19_50 [Arabidopsis
  misc_feature (245)..(467): Homolog of NCBI NO: 7434175 NR Description: hypothetical protein T19P19.50 - Arabidopsis >gi|3080435|emb|CAA18752.1| putative protein [Arabidopsis >gi|7270950|emb|CAB80629.1| putative protein [Arabidopsis
  misc_feature (4)..(215): Homolog of NCBI NO: 7434175 NR Description: hypothetical protein T19P19.50 - Arabidopsis >gi|3080435|emb|CAA18752.1| putative protein [Arabidopsis >gi|7270950|emb|CAB80629.1| putative protein [Arabidopsis
  misc_feature (233)..(476): Homolog of NCBI NO: 16198011 NR Description: LD24726p [Drosophila melanogaster]
  misc_feature (233)..(476): Homolog of NCBI NO: 28574759 NR Description: CG11241-PA [Drosophila melanogaster]
  misc_feature (4)..(230): Homolog of NCBI NO: 16198011 NR Description: LD24726p [Drosophila melanogaster]
MQRLASSRRLLQAALAPARANSSLSAAAVAAPAPANGAFPKMPAFDYTPPPYDGPRAEEIFRKRAQFLSPSLFHFYDRPLNIVEGKMQYLFDEDGRRYLDAFGGIATVCCGHCHPDVVEAIVNQAKRIQHSTVLYLNHAIADFAEALASKMPGDLKVVFFTNSGTEANELALMIARLYTGCNDIISLRNGYHGNAAGTMGATAQSNWKFNVVQTGVHHALNPDPFRGAFGSDGEKYARDVQEMVEFGTTGRVGGFISEAIQGVGGIVELAPGYLPVAYSMVRKAGGLCIADEVQAGVARTGSHFWGFEGHGVIPDIVTMAKGIGNGIPIGAVVTTPEIAQVLTRRSYFNTFGGNPVSTAGGHAVLKVLEKEKLQENAFVVGSYLKEQLNNLKDKHEIIGDVRGKGFLLGVELVTDHEKKTPAKAEISRVMNHMKDMGVLVGKGGFYGNVFRITPPLCFTKEDSDFFIEVMDIALSKL

SEQ ID NO: 10034 - protein, 436 aa, Zea mays subsp. mays
  peptide (1)..(436): Ceres Seq. ID no. 12357363
  misc_feature (29)..(436): Pfam Name: Aminotransferase class-III Pfam Description: Aminotransferase class-III
  misc_feature (1)..(436): Homolog of NCBI NO: 15231974 NR Description: putative aminotransferase; protein id: supported by cDNA: gi_20466699 [Arabidopsis thaliana] putative aminotransferase [Arabidopsis thaliana]
  misc_feature (1)..(436): Homolog of NCBI NO: 15224499 NR Description: putative beta-alanine-pyruvate aminotransferase; id: At2g38400.1, supported by cDNA: 147543., supported by cDNA: supported by cDNA: gi_5731260 [Arabidopsis thaliana]
  misc_feature (1)..(436): Homolog of NCBI NO: 15028237 NR Description: putative beta-alanine-pyruvate aminotransferase
  misc_feature (1)..(436): Homolog of NCBI NO: 5731259 NR Description: alanine:glyoxylate aminotransferase 2 homolog
  misc_feature (1)..(436): Homolog of NCBI NO: 18420498 NR Description: putative protein; protein id: At4g39660.1, by cDNA: gi_15809991, supported by cDNA: gi_5731258 [Arabidopsis >gi|15809992|gb|AAL06923.1| AT4g39660/T19P19_50 [Arabidopsis
  misc_feature (204)..(426): Homolog of NCBI NO: 7434175 NR Description: hypothetical protein T19P19.50 - Arabidopsis >gi|3080435|emb|CAA18752.1| putative protein [Arabidopsis >gi|7270950|emb|CAB80629.1| putative protein [Arabidopsis
  misc_feature (1)..(174): Homolog of NCBI NO: 7434175 NR Description: hypothetical protein T19P19.50 - Arabidopsis >gi|3080435|emb|CAA18752.1| putative protein [Arabidopsis >gi|7270950|emb|CAB80629.1| putative protein [Arabidopsis
  misc_feature (192)..(435): Homolog of NCBI NO: 16198011 NR Description: LD24726p [Drosophila melanogaster]
  misc_feature (192)..(435): Homolog of NCBI NO: 28574759 NR Description: CG11241-PA [Drosophila melanogaster]
  misc_feature (1)..(189): Homolog of NCBI NO: 16198011 NR Description: LD24726p [Drosophila melanogaster]
MPAFDYTPPPYDGPRAEEIFRKRAQFLSPSLFHFYDRPLNIVEGKMQYLFDEDGRRYLDAFGGIATVCCGHCHPDVVEAIVNQAKRIQHSTVLYLNHAIADFAEALASKMPGDLKVVFFTNSGTEANELALMIARLYTGCNDIISLRNGYHGNAAGTMGATAQSNWKFNVVQTGVHHALNPDPFRGAFGSDGEKYARDVQEMVEFGTTGRVGGFISEAIQGVGGIVELAPGYLPVAYSMVRKAGGLCIADEVQAGVARTGSHFWGFEGHGVIPDIVTMAKGIGNGIPIGAVVTTPEIAQVLTRRSYFNTFGGNPVSTAGGHAVLKVLEKEKLQENAFVVGSYLKEQLNNLKDKHEIIGDVRGKGFLLGVELVTDHEKKTPAKAEISRVMNHMKDMGVLVGKGGFYGNVFRITPPLCFTKEDSDFFIEVMDIALSKL

SEQ ID NO: 10035 - DNA, 1276 bp, Zea mays subsp. mays
  misc_feature (1)..(1276): Ceres Seq. ID no. 12365996
  misc_feature: MA Experiment ID: 108529 Result: Up-regulated in Transcription
  misc_feature: MA Experiment 108529 PARAMETER Experiment Name: Zm_Imbibed_Seeds_P Parameter: Age (day) Value: 5 vs. 2
  misc_feature: MA Experiment 108529 PARAMETER Experiment Name: Zm_Imbibed_Seeds_P Parameter: Organism Value: Zea mays
  misc_feature: MA Experiment 108529 PARAMETER Experiment Name: Zm_Imbibed_Seeds_P Parameter: Plant Line Value: 35A19
  misc_feature: MA Experiment 108529 PARAMETER Experiment Name: Zm_Imbibed_Seeds_P Parameter: Tissue Value: Roots vs. Embryo
  misc_feature: MA Experiment ID: 108544 Result: Up-regulated in Transcription
gtaggattgtgggactcccagctggtggagtggagcttccgagtgtccactccaattctccaacgccagggtgttgcagacttgcaggcagtggaacatggacaaggaaggcgacggccaccaccaccacgccatccgagtcccatccccagataacatagcaatggtggaggagacatcgcagccaaatggcgcaccgtcgctgagacggaaagcaggcgagatgatcgccacctccctggagacgtaccggagcaagcccttctccttctggctactcctgttcctgagcagcggcgccatgctcaccgcgttcccggcgtcgagcctcctgtcgcggctctactacaacgagggcgggcagagcaagtggatcctgtcgtgggcggccgtcgccggctggcccctgcccgcgctgctcctgctgccgctgtatctcctcggcagggcgtcgccgacgccgctgtcgctgtcgctgtgctcctggtacgtgctccttgggctcctcagcgccgccgacaacctcatgtacgcgtgggcctacgcgtacctcccggcgtccacggcctcgctcgtcgccgcgtcgtcgctcgccttctccgcgctcttcggccgcgccatcgccaagaaccggctcaacatgtcctcgctcaacgccgtcgtcgtgatcacggcgggcgtggtgatcgtcgcgctggactccgggtcggacaggccccccggcgtcacgccccgccagtacgcgctcggcttcgtcctggacgtgctcgggtcggcgctccacggcctcatcttcgcgctctccgagctcgtcttcgccagggccctcggtaggcgctcgttccacgtggtgctggagcagcaggcggcggtgtcgctctgcgccttcgccttcacctccgcgggcctcgccgtcgcggagggcttcccggccatgcggcgcgagtcggcacggtttgcgcacggtggccagccggcgtacgcgaacttgatggtgtggacggcactcacgttccagctgggcgtcctcggaggcaccggcgtgctgttcctggcgtccactgtcctcgccggcgtgctgaacgctgtcagggtgcccctgacgagcatcgccgcggtgatctggttccatgaccccatgagtggcttcaagatcttggctctggtcatcacggtgtgggggttcgcgtcctatattcttggacactcctcttttagaaaaacgtaacaaattagatatcatctcattgcaaaaaatgatgaaagattttaattc

SEQ ID NO: 10036 - protein, 376 aa, Zea mays subsp. mays
  peptide (1)..(376): Ceres Seq. ID no. 12365997
  misc_feature (201)..(372): Pfam Name: Domain of unknown function, DUF250 Pfam Description: Domain of unknown function, DUF250
  misc_feature (69)..(372): Homolog of NCBI NO: 15224103 NR Description: hypothetical protein; protein id: At2g24220.1
  misc_feature (54)..(376): Homolog of NCBI NO: 15219436 NR Description: hypothetical protein; protein id: At1g44750.1, by cDNA: gi_17065411 [Arabidopsis thaliana]
  misc_feature (26)..(370): Homolog of NCBI NO: 38344290 NR Description: OSJNBa0013K16.22 [Oryza sativa (japonica
  misc_feature (26)..(370): Homolog of NCBI NO: 38605752 NR Description: OSJNBb0016D16.5 [Oryza sativa (japonica
  misc_feature (23)..(367): Homolog of NCBI NO: 30684325 NR Description: purine permease family [Arabidopsis thaliana]
  misc_feature (40)..(370): Homolog of NCBI NO: 38344291 NR Description: OSJNBa0013K16.23 [Oryza sativa (japonica
  misc_feature (40)..(370): Homolog of NCBI NO: 38605752 NR Description: OSJNBb0016D16.5 [Oryza sativa (japonica
  misc_feature (78)..(369): Homolog of NCBI NO: 7620007 NR Description: purine permease [Arabidopsis thaliana]
  misc_feature (78)..(369): Homolog of NCBI NO: 15217873 NR Description: purine permease; protein id: At1g28230.1, by cDNA: gi_7620006 [Arabidopsis thaliana]
  misc_feature (78)..(369): Homolog of NCBI NO: 15217872 NR Description: purine permease, putative; protein id: At1g28220.1
MDKEGDGHHHHAIRVPSPDNIAMVEETSQPNGAPSLRRKAGEMIATSLETYRSKPFSFWLLLFLSSGAMLTAFPASSLLSRLYYNEGGQSKWILSWAAVAGWPLPALLLLPLYLLGRASPTPLSLSLCSWYVLLGLLSAADNLMYAWAYAYLPASTASLVAASSLAFSALFGRAIAKNRLNMSSLNAVVVITAGVVIVALDSGSDRPPGVTPRQYALGFVLDVLGSALHGLIFALSELVFARALGRRSFHVVLEQQAAVSLCAFAFTSAGLAVAEGFPAMRRESARFAHGGQPAYANLMVWTALTFQLGVLGGTGVLFLASTVLAGVLNAVRVPLTSIAAVIWFHDPMSGFKILALVITVWGFASYILGHSSFRKT

SEQ ID NO: 10037 - protein, 354 aa, Zea mays subsp. mays
  peptide (1)..(354): Ceres Seq. ID no. 12365998
  misc_feature (179)..(350): Pfam Name: Domain of unknown function, DUF250 Pfam Description: Domain of unknown function, DUF250
  misc_feature (47)..(350): Homolog of NCBI NO: 15224103 NR Description: hypothetical protein; protein id: At2g24220.1
  misc_feature (32)..(354): Homolog of NCBI NO: 15219436 NR Description: hypothetical protein; protein id: At1g44750.1, by cDNA: gi_17065411 [Arabidopsis thaliana]
  misc_feature (4)..(348): Homolog of NCBI NO: 38344290 NR Description: OSJNBa0013K16.22 [Oryza sativa (japonica
  misc_feature (4)..(348): Homolog of NCBI NO: 38605752 NR Description: OSJNBb0016D16.5 [Oryza sativa (japonica
  misc_feature (1)..(345): Homolog of NCBI NO: 30684325 NR Description: purine permease family [Arabidopsis thaliana]
  misc_feature (18)..(348): Homolog of NCBI NO: 38344291 NR Description: OSJNBa0013K16.23 [Oryza sativa (japonica
  misc_feature (18)..(348): Homolog of NCBI NO: 38605752 NR Description: OSJNBb0016D16.5 [Oryza sativa (japonica
  misc_feature (56)..(347): Homolog of NCBI NO: 7620007 NR Description: purine permease [Arabidopsis thaliana]
  misc_feature (56)..(347): Homolog of NCBI NO: 15217873 NR Description: purine permease; protein id: At1g28230.1, by cDNA: gi_7620006 [Arabidopsis thaliana]
  misc_feature (56)..(347): Homolog of NCBI NO: 15217872 NR Description: purine permease, putative; protein id: At1g28220.1
MVEETSQPNGAPSLRRKAGEMIATSLETYRSKPFSFWLLLFLSSGAMLTAFPASSLLSRLYYNEGGQSKWILSWAAVAGWPLPALLLLPLYLLGRASPTPLSLSLCSWYVLLGLLSAADNLMYAWAYAYLPASTASLVAASSLAFSALFGRAIAKNRLNMSSLNAVVVITAGVVIVALDSGSDRPPGVTPRQYALGFVLDVLGSALHGLIFALSELVFARALGRRSFHVVLEQQAAVSLCAFAFTSAGLAVAEGFPAMRRESARFAHGGQPAYANLMVWTALTFQLGVLGGTGVLFLASTVLAGVLNAVRVPLTSIAAVIWFHDPMSGFKILALVITVWGFASYILGHSSFRKT

SEQ ID NO: 10038 - protein, 334 aa, Zea mays subsp. mays
  peptide (1)..(334): Ceres Seq. ID no. 12365999
  misc_feature (159)..(330): Pfam Name: Domain of unknown function, DUF250 Pfam Description: Domain of unknown function, DUF250
  misc_feature (27)..(330): Homolog of NCBI NO: 15224103 NR Description: hypothetical protein; protein id: At2g24220.1
  misc_feature (12)..(334): Homolog of NCBI NO: 15219436 NR Description: hypothetical protein; protein id: At1g44750.1, by cDNA: gi_17065411 [Arabidopsis thaliana]
  misc_feature (1)..(328): Homolog of NCBI NO: 38344290 NR Description: OSJNBa0013K16.22 [Oryza sativa (japonica
  misc_feature (1)..(328): Homolog of NCBI NO: 38605752 NR Description: OSJNBb0016D16.5 [Oryza sativa (japonica
  misc_feature (1)..(325): Homolog of NCBI NO: 30684325 NR Description: purine permease family [Arabidopsis thaliana]
  misc_feature (1)..(328): Homolog of NCBI NO: 38344291 NR Description: OSJNBa0013K16.23 [Oryza sativa (japonica
  misc_feature (1)..(328): Homolog of NCBI NO: 38605752 NR Description: OSJNBb0016D16.5 [Oryza sativa (japonica
  misc_feature (36)..(327): Homolog of NCBI NO: 7620007 NR Description: purine permease [Arabidopsis thaliana]
  misc_feature (36)..(327): Homolog of NCBI NO: 15217873 NR Description: purine permease; protein id: At1g28230.1, by cDNA: gi_7620006 [Arabidopsis thaliana]
  misc_feature (36)..(327): Homolog of NCBI NO: 15217872 NR Description: purine permease, putative; protein id: At1g28220.1
MIATSLETYRSKPFSFWLLLFLSSGAMLTAFPASSLLSRLYYNEGGQSKWILSWAAVAGWPLPALLLLPLYLLGRASPTPLSLSLCSWYVLLGLLSAADNLMYAWAYAYLPASTASLVAASSLAFSALFGRAIAKNRLNMSSLNAVVVITAGVVIVALDSGSDRPPGVTPRQYALGFVLDVLGSALHGLIFALSELVFARALGRRSFHVVLEQQAAVSLCAFAFTSAGLAVAEGFPAMRRESARFAHGGQPAYANLMVWTALTFQLGVLGGTGVLFLASTVLAGVLNAVRVPLTSIAAVIWFHDPMSGFKILALVITVWGFASYILGHSSFRKT

SEQ ID NO: 10039 - DNA, 1674 bp, Zea mays subsp. mays
  misc_feature (1)..(1674): Ceres Seq. ID no. 12405979
  misc_feature: MA Experiment ID: 108503 Result: Up-regulated in Transcription
  misc_feature: MA Experiment 108503 PARAMETER Experiment Name: Zm_Drought_P Parameter: Age (day) Value: 8
  misc_feature: MA Experiment 108503 PARAMETER Experiment Name: Zm_Drought_P Parameter: Organism Value: Zea mays
  misc_feature: MA Experiment 108503 PARAMETER Experiment Name: Zm_Drought_P Parameter: Plant Line Value: 35A19
  misc_feature: MA Experiment 108503 PARAMETER Experiment Name: Zm_Drought_P Parameter: Timepoint (hr) Value: 6
  misc_feature: MA Experiment 108503 PARAMETER Experiment Name: Zm_Drought_P Parameter: Tissue Value: Aerial
  misc_feature: MA Experiment 108503 PARAMETER Experiment Name: Zm_Drought_P Parameter: Treatment Value: Drought vs. No Drought
  misc_feature: MA Experiment ID: 108504 Result: Up-regulated in Transcription
  misc_feature: MA Experiment 108504 PARAMETER Experiment Name: Zm_Drought_P Parameter: Age (day) Value: 8
  misc_feature: MA Experiment 108504 PARAMETER Experiment Name: Zm_Drought_P Parameter: Organism Value: Zea mays
  misc_feature: MA Experiment 108504 PARAMETER Experiment Name: Zm_Drought_P Parameter: Plant Line Value: 35A19
  misc_feature: MA Experiment 108504 PARAMETER Experiment Name: Zm_Drought_P Parameter: Timepoint (hr) Value: 12
  misc_feature: MA Experiment 108504 PARAMETER Experiment Name: Zm_Drought_P Parameter: Tissue Value: Aerial
  misc_feature: MA Experiment 108504 PARAMETER Experiment Name: Zm_Drought_P Parameter: Treatment Value: Drought vs. No Drought
  misc_feature: MA Experiment ID: 108513 Result: Up-regulated in Transcription
  misc_feature: MA Experiment 108513 PARAMETER Experiment Name: Zm_100uM_ABA_P Parameter: Age (day) Value: 8
  misc_feature: MA Experiment 108513 PARAMETER Experiment Name: Zm_100uM_ABA_P Parameter: Organism Value: Zea mays
  misc_feature: MA Experiment 108513 PARAMETER Experiment Name: Zm_100uM_ABA_P Parameter: Plant Line Value: 35A19
  misc_feature: MA Experiment 108513 PARAMETER Experiment Name: Zm_100uM_ABA_P Parameter: Timepoint (hr) Value: 6
  misc_feature: MA Experiment 108513 PARAMETER Experiment Name: Zm_100uM_ABA_P Parameter: Tissue Value: Aerial
  misc_feature: MA Experiment 108513 PARAMETER Experiment Name: Zm_100uM_ABA_P Parameter: Treatment Value: 100uM ABA vs. No Treatment
  misc_feature: MA Experiment ID: 108540 Result: Up-regulated in Transcription
  misc_feature: MA Experiment 108540 PARAMETER Experiment Name: Zm_20percent_PEG_P Parameter: Age (day) Value: 8
  misc_feature: MA Experiment 108540 PARAMETER Experiment Name: Zm_20percent_PEG_P Parameter: Organism Value: Zea mays
  misc_feature: MA Experiment 108540 PARAMETER Experiment Name: Zm_20percent_PEG_P Parameter: Plant Line Value: 35A19
  misc_feature: MA Experiment 108540 PARAMETER Experiment Name: Zm_20percent_PEG_P Parameter: Timepoint (hr) Value: 6
  misc_feature: MA Experiment 108540 PARAMETER Experiment Name: Zm_20percent_PEG_P Parameter: Tissue Value: Aerial
  misc_feature: MA Experiment 108540 PARAMETER Experiment Name: Zm_20percent_PEG_P Parameter: Treatment Value: 20percent PEG vs. No Treatment
  misc_feature: MA Experiment ID: 108556 Result: Up-regulated in Transcription
  misc_feature: MA Experiment 108556 PARAMETER Experiment Name: Zm_Drought_P Parameter: Age (day) Value: 9
  misc_feature: MA Experiment 108556 PARAMETER Experiment Name: Zm_Drought_P Parameter: Organism Value: Zea mays
  misc_feature: MA Experiment 108556 PARAMETER Experiment Name: Zm_Drought_P Parameter: Plant Line Value: 35A19
  misc_feature: MA Experiment 108556 PARAMETER Experiment Name: Zm_Drought_P Parameter: Timepoint (hr) Value: 24
  misc_feature: MA Experiment 108556 PARAMETER Experiment Name: Zm_Drought_P Parameter: Tissue Value: Aerial
  misc_feature: MA Experiment 108556 PARAMETER Experiment Name: Zm_Drought_P Parameter: Treatment Value: Drought vs. No Drought
  misc_feature: MA Experiment ID: 108597 Result: Up-regulated in Transcription
  misc_feature: MA Experiment 108597 PARAMETER Experiment Name: Zm_100uM_ABA_P Parameter: Age (day) Value: 9
  misc_feature: MA Experiment 108597 PARAMETER Experiment Name: Zm_100uM_ABA_P Parameter: Organism Value: Zea mays
  misc_feature: MA Experiment 108597 PARAMETER Experiment Name: Zm_100uM_ABA_P Parameter: Plant Line Value: 35A19
  misc_feature: MA Experiment 108597 PARAMETER Experiment Name: Zm_100uM_ABA_P Parameter: Timepoint (hr) Value: 24
  misc_feature: MA Experiment 108597 PARAMETER Experiment Name: Zm_100uM_ABA_P Parameter: Tissue Value: Aerial
  misc_feature: MA Experiment 108597 PARAMETER Experiment Name: Zm_100uM_ABA_P Parameter: Treatment Value: 100uM ABA vs. No Treatment
  misc_feature: MA Experiment ID: 108689 Result: Up-regulated in Transcription
  misc_feature: MA Experiment 108689 PARAMETER Experiment Name: Zm_Drought_Roots_P Parameter: Age (day) Value: 9
  misc_feature: MA Experiment 108689 PARAMETER Experiment Name: Zm_Drought_Roots_P Parameter: Organism Value: Zea mays
  misc_feature: MA Experiment 108689 PARAMETER Experiment Name: Zm_Drought_Roots_P Parameter: Plant Line Value: 35A19
  misc_feature: MA Experiment 108689 PARAMETER Experiment Name: Zm_Drought_Roots_P Parameter: Timepoint (hr) Value: 24
  misc_feature: MA Experiment 108689 PARAMETER Experiment Name: Zm_Drought_Roots_P Parameter: Tissue Value: Roots
  misc_feature: MA Experiment 108689 PARAMETER Experiment Name: Zm_Drought_Roots_P Parameter: Treatment Value: Drought vs. No Drought
  misc_feature: MA Experiment ID: 20000479 Result: Up-regulated in Transcription
  misc_feature: MA Experiment 20000479 PARAMETER Experiment Name: Zm_Drought_P Parameter: Age (day) Value: 10
  misc_feature: MA Experiment 20000479 PARAMETER Experiment Name: Zm_Drought_P Parameter: Organism Value: Zea mays
  misc_feature: MA Experiment 20000479 PARAMETER Experiment Name: Zm_Drought_P Parameter: Plant Line Value: 35A19
  misc_feature: MA Experiment 20000479 PARAMETER Experiment Name: Zm_Drought_P Parameter: Timepoint (hr) Value: 48
  misc_feature: MA Experiment 20000479 PARAMETER Experiment Name: Zm_Drought_P Parameter: Tissue Value: Aerial
  misc_feature: MA Experiment 20000479 PARAMETER Experiment Name: Zm_Drought_P Parameter: Treatment Value: Drought vs. No Drought
  misc_feature: MA Experiment ID: 20000480 Result: Up-regulated in Transcription
  misc_feature: MA Experiment 20000480 PARAMETER Experiment Name: Zm_Drought_P Parameter: Age (day) Value: 11
  misc_feature: MA Experiment 20000480 PARAMETER Experiment Name: Zm_Drought_P Parameter: Organism Value: Zea mays
  misc_feature: MA Experiment 20000480 PARAMETER Experiment Name: Zm_Drought_P Parameter: Plant Line Value: 35A19
  misc_feature: MA Experiment 20000480 PARAMETER Experiment Name: Zm_Drought_P Parameter: Timepoint (hr) Value: 72
  misc_feature: MA Experiment 20000480 PARAMETER Experiment Name: Zm_Drought_P Parameter: Tissue Value: Aerial
  misc_feature: MA Experiment 20000480 PARAMETER Experiment Name: Zm_Drought_P Parameter: Treatment Value: Drought vs. No Drought
  misc_feature: MA Experiment ID: 20000492 Result: Down-regulated in Transcription
  misc_feature: MA Experiment 20000492 PARAMETER Experiment Name: Zm_Hybrid_Seed_Dev_P Parameter: DAP Value: 12
  misc_feature: MA Experiment 20000492 PARAMETER Experiment Name: Zm_Hybrid_Seed_Dev_P Parameter: Organism Value: Zea mays
  misc_feature: MA Experiment 20000492 PARAMETER Experiment Name: Zm_Hybrid_Seed_Dev_P Parameter: Plant Line Value: 35A19
  misc_feature: MA Experiment 20000492 PARAMETER Experiment Name: Zm_Hybrid_Seed_Dev_P Parameter: Tissue Value: Fert Kernel vs. Unfert Floret
  misc_feature: MA Experiment ID: 20001608 Result: Down-regulated in Transcription
  misc_feature: MA Experiment 20001608 PARAMETER Experiment Name: Zm_50ppm_KNO3_L-to-H_P Parameter: Age (day) Value: 21
  misc_feature: MA Experiment 20001608 PARAMETER Experiment Name: Zm_50ppm_KNO3_L-to-H_P Parameter: Organism Value: Zea mays
  misc_feature: MA Experiment 20001608 PARAMETER Experiment Name: Zm_50ppm_KNO3_L-to-H_P Parameter: Plant Line Value: 35A19
  misc_feature: MA Experiment 20001608 PARAMETER Experiment Name: Zm_50ppm_KNO3_L-to-H_P Parameter: Timepoint (hr) Value: 48
  misc_feature: MA Experiment 20001608 PARAMETER Experiment Name: Zm_50ppm_KNO3_L-to-H_P Parameter: Tissue Value: Shoots
  misc_feature: MA Experiment 20001608 PARAMETER Experiment Name: Zm_50ppm_KNO3_L-to-H_P Parameter: Treatment Value: 50ppm KNO3 vs. 50ppm KCl
gcacgagaccattacctagaacatcctaatcgaaaagtttcgcctcgcgcctgccctgctgtcctgctgctgctattttgccattgcatccatttccgggggacggagtggaggagggcgtcgcctgcgctgcgttgcttcgcgtgggaagcgtagcgtgcttcgtttaggcctctcgccaatatccgagtgctaatctagagaggcctttggctttgccagacgcgcctgtacgcgccctttctgggaggcagccgcttgctctcgcctccaatggccgagatctgctgcgaagaagccaagtccacgccggcgaccgccgtggctgcggcttcagtctccgccacggccgctgcggccgccgccgtggcagtggcctcgtcggcgttagagaggaggcgacgcaggttggagatgaggaggttccgcgtcgcgggcgatcccgaggcgccggtcgcggaggacgtccgcgccgccaagcggcagaggctggcgcgcacgctgtccagcacctgccccgacgcgggctcaggctcgggctccggactcggactccgacaggcctgccctaccggagcggttgcccaggtacggggtcacctccgtctgcggccgacgccgcgagatggaggacacggtctccgttaggccggacttcgtgcccggcaccagcaaacaacacttcttcggcgtcttccgacggccacggctgctcccacgtagcaacgatgtgccagaacatgatgcacgaggtggtcgcggacgagcacaggaaggcagattgttctggcgaagagacggcgtggaaggccgtgatggagaggagcttcgcgcgactggacgagcaggccgccagctgggcgaccagccgcagccgcgacgagccctcctgcaggtgcgagcagcagaagcccttgcgttgcgatcacgtggggtccaccgccgtggtcgccgtcgtcagccccacccacgttgtcgtcgccaacgccggcgactcccgcgccgtcctatcccgcgccggcgtccccgttccgctgtccgtcgaccacaagcctgaccggcctgacgagctggcgcgcatcgaggcggcgggcggccgcgtcatttactgggacggtgctcgtgttctcggcgtcctcgccatgtctcgagccataggcgacggatacctgaanccgttcgtgtcgtcggagccggaggtaacggtgacggagcgcaccgacgacgacgagtgcctggtcctggccagcgacggcctgtgggacgtcgtgaccaacgagatggcgtgcgaggtcgtccgcgcgtgcttccacagcaacggtccgccggcgccggccgctcgggcgaacggcgcggccctcccggcagccgagaacggatccgcggtcgccgagggcgtgagcgtggaggattccgacaaggcgtgctccgacgcggccatgctgctggcgaagctggcgttggcccggcggagcgccgataatgttagcgtggtcgtcgtggatctccgccgggggatatgatttgccttcttttttagccctcttggaatccaagctaatttctcccccgttttcttccatacttttagttctgttttgatttagtattaatagtagttaccaatcagacgcttttcttctctcaaacgaggaattaaaagccantnggacc

SEQ ID NO: 10040 - protein, 264 aa, Zea mays subsp. mays
  peptide (1)..(264): Ceres Seq. ID no. 12405980
  misc_feature (1)..(253): Pfam Name: Protein phosphatase 2C Pfam Description: Protein phosphatase 2C
  misc_feature (1)..(264): Homolog of NCBI NO: 34908256 NR Description: putative protein phosphatase 2C [Oryza sativa
  misc_feature (1)..(262): Homolog of NCBI NO: 7768151 NR Description: protein phpsphatase 2C (PP2C) [Fagus sylvatica]
  misc_feature (1)..(264): Homolog of NCBI NO: 10432446 NR Description: protein phosphatase 2C [Nicotiana tabacum]
  misc_feature (1)..(198): Homolog of NCBI NO: 15227078 NR Description: protein phosphatase 2C (PP2C), putative; protein At2g29380.1 [Arabidopsis thaliana] >gi|25352214|pir||F84695
  misc_feature (229)..(262): Homolog of NCBI NO: 15227078 NR Description: protein phosphatase 2C (PP2C), putative; protein At2g29380.1 [Arabidopsis thaliana] >gi|25352214|pir||F84695
  misc_feature (1)..(262): Homolog of NCBI NO: 15237839 NR Description: protein phosphatase 2C (PP2C); protein id: supported by cDNA: gi_15809791, supported by cDNA: gi_16226418, by cDNA: gi_18377816 [Arabidopsis thaliana]
  misc_feature (1)..(262): Homolog of NCBI NO: 16226419 NR Description: AT5g59220/mnc17_110 [Arabidopsis thaliana]
  misc_feature (1)..(262): Homolog of NCBI NO: 33309516 NR Description: protein phosphatase 2C [Prunus avium]
  misc_feature (1)..(214): Homolog of NCBI NO: 15229745 NR Description: protein phosphatase 2C (PP2C); protein id: supported by cDNA: gi_18389241 [Arabidopsis thaliana] Protein phosphatase 2C (PP2C) >gi|1076391|pir||S55457
  misc_feature (227)..(262): Homolog of NCBI NO: 15229745 NR Description: protein phosphatase 2C (PP2C); protein id: supported by cDNA: gi_18389241 [Arabidopsis thaliana] Protein phosphatase 2C (PP2C) >gi|1076391|pir||S55457
  misc_feature (149)..(149): Xaa is any aa, unknown or other
MCQNMMHEVVADEHRKADCSGEETAWKAVMERSFARLDEQAASWATSRSRDEPSCRCEQQKPLRCDHVGSTAVVAVVSPTHVVVANAGDSRAVLSRAGVPVPLSVDHKPDRPDELARIEAAGGRVIYWDGARVLGVLAMSRAIGDGYLXPFVSSEPEVTVTERTDDDECLVLASDGLWDVVTNEMACEVVRACFHSNGPPAPAARANGAALPAAENGSAVAEGVSVEDSDKACSDAAMLLAKLALARRSADNVSVVVVDLRRGI

SEQ ID NO: 10041 - protein, 260 aa, Zea mays subsp. mays
  peptide (1)..(260): Ceres Seq. ID no. 12405981
  misc_feature (1)..(249): Pfam Name: Protein phosphatase 2C Pfam Description: Protein phosphatase 2C
  misc_feature (1)..(260): Homolog of NCBI NO: 34908256 NR Description: putative protein phosphatase 2C [Oryza sativa
  misc_feature (1)..(258): Homolog of NCBI NO: 7768151 NR Description: protein phpsphatase 2C (PP2C) [Fagus sylvatica]
  misc_feature (1)..(260): Homolog of NCBI NO: 10432446 NR Description: protein phosphatase 2C [Nicotiana tabacum]
  misc_feature (1)..(194): Homolog of NCBI NO: 15227078 NR Description: protein phosphatase 2C (PP2C), putative; protein At2g29380.1 [Arabidopsis thaliana] >gi|25352214|pir||F84695
  misc_feature (225)..(258): Homolog of NCBI NO: 15227078 NR Description: protein phosphatase 2C (PP2C), putative; protein At2g29380.1 [Arabidopsis thaliana] >gi|25352214|pir||F84695
  misc_feature (1)..(258): Homolog of NCBI NO: 15237839 NR Description: protein phosphatase 2C (PP2C); protein id: supported by cDNA: gi_15809791, supported by cDNA: gi_16226418, by cDNA: gi_18377816 [Arabidopsis thaliana]
  misc_feature (1)..(258): Homolog of NCBI NO: 16226419 NR Description: AT5g59220/mnc17_110 [Arabidopsis thaliana]
  misc_feature (1)..(258): Homolog of NCBI NO: 33309516 NR Description: protein phosphatase 2C [Prunus avium]
  misc_feature (1)..(210): Homolog of NCBI NO: 15229745 NR Description: protein phosphatase 2C (PP2C); protein id: supported by cDNA: gi_18389241 [Arabidopsis thaliana] Protein phosphatase 2C (PP2C) >gi|1076391|pir||S55457
  misc_feature (223)..(258): Homolog of NCBI NO: 15229745 NR Description: protein phosphatase 2C (PP2C); protein id: supported by cDNA: gi_18389241 [Arabidopsis thaliana] Protein phosphatase 2C (PP2C) >gi|1076391|pir||S55457
  misc_feature (145)..(145): Xaa is any aa, unknown or other
MMHEVVADEHRKADCSGEETAWKAVMERSFARLDEQAASWATSRSRDEPSCRCEQQKPLRCDHVGSTAVVAVVSPTHVVVANAGDSRAVLSRAGVPVPLSVDHKPDRPDELARIEAAGGRVIYWDGARVLGVLAMSRAIGDGYLXPFVSSEPEVTVTERTDDDECLVLASDGLWDVVTNEMACEVVRACFHSNGPPAPAARANGAALPAAENGSAVAEGVSVEDSDKACSDAAMLLAKLALARRSADNVSVVVVDLRRGI

SEQ ID NO: 10042 - protein, 259 aa, Zea mays subsp. mays
  peptide (1)..(259): Ceres Seq. ID no. 12405982
  misc_feature (1)..(248): Pfam Name: Protein phosphatase 2C Pfam Description: Protein phosphatase 2C
  misc_feature (1)..(259): Homolog of NCBI NO: 34908256 NR Description: putative protein phosphatase 2C [Oryza sativa
  misc_feature (1)..(257): Homolog of NCBI NO: 7768151 NR Description: protein phpsphatase 2C (PP2C) [Fagus sylvatica]
  misc_feature (1)..(259): Homolog of NCBI NO: 10432446 NR Description: protein phosphatase 2C [Nicotiana tabacum]
  misc_feature (1)..(193): Homolog of NCBI NO: 15227078 NR Description: protein phosphatase 2C (PP2C), putative; protein At2g29380.1 [Arabidopsis thaliana] >gi|25352214|pir||F84695
  misc_feature (224)..(257): Homolog of NCBI NO: 15227078 NR Description: protein phosphatase 2C (PP2C), putative; protein At2g29380.1 [Arabidopsis thaliana] >gi|25352214|pir||F84695
  misc_feature (1)..(257): Homolog of NCBI NO: 15237839 NR Description: protein phosphatase 2C (PP2C); protein id: supported by cDNA: gi_15809791, supported by cDNA: gi_16226418, by cDNA: gi_18377816 [Arabidopsis thaliana]
  misc_feature (1)..(257): Homolog of NCBI NO: 16226419 NR Description: AT5g59220/mnc17_110 [Arabidopsis thaliana]
  misc_feature (1)..(257): Homolog of NCBI NO: 33309516 NR Description: protein phosphatase 2C [Prunus avium]
  misc_feature (1)..(209): Homolog of NCBI NO: 15229745 NR Description: protein phosphatase 2C (PP2C); protein id: supported by cDNA: gi_18389241 [Arabidopsis thaliana] Protein phosphatase 2C (PP2C) >gi|1076391|pir||S55457
  misc_feature (222)..(257): Homolog of NCBI NO: 15229745 NR Description: protein phosphatase 2C (PP2C); protein id: supported by cDNA: gi_18389241 [Arabidopsis thaliana] Protein phosphatase 2C (PP2C) >gi|1076391|pir||S55457
  misc_feature (144)..(144): Xaa is any aa, unknown or other
MHEVVADEHRKADCSGEETAWKAVMERSFARLDEQAASWATSRSRDEPSCRCEQQKPLRCDHVGSTAVVAVVSPTHVVVANAGDSRAVLSRAGVPVPLSVDHKPDRPDELARIEAAGGRVIYWDGARVLGVLAMSRAIGDGYLXPFVSSEPEVTVTERTDDDECLVLASDGLWDVVTNEMACEVVRACFHSNGPPAPAARANGAALPAAENGSAVAEGVSVEDSDKACSDAAMLLAKLALARRSADNVSVVVVDLRRGI

SEQ ID NO: 10043 - DNA, 1446 bp, Zea mays subsp. mays
  misc_feature (1)..(1446): Ceres Seq. ID no. 12354451
  misc_feature: MA Experiment ID: 108527 Result: Down-regulated in Transcription
  misc_feature: MA Experiment 108527 PARAMETER Experiment Name: Zm_5mM_NO_P Parameter: Age (day) Value: 8
  misc_feature: MA Experiment 108527 PARAMETER Experiment Name: Zm_5mM_NO_P Parameter: Organism Value: Zea mays
  misc_feature: MA Experiment 108527 PARAMETER Experiment Name: Zm_5mM_NO_P Parameter: Plant Line Value: 35A19
  misc_feature: MA Experiment 108527 PARAMETER Experiment Name: Zm_5mM_NO_P Parameter: Timepoint (hr) Value: 6
  misc_feature: MA Experiment 108527 PARAMETER Experiment Name: Zm_5mM_NO_P Parameter: Tissue Value: Aerial
  misc_feature: MA Experiment 108527 PARAMETER Experiment Name: Zm_5mM_NO_P Parameter: Treatment Value: 5mM NO vs. No Treatment
  misc_feature: MA Experiment ID: 108528 Result: Up-regulated in Transcription
  misc_feature: MA Experiment 108528 PARAMETER Experiment Name: Zm_Imbibed_Seeds_P Parameter: Age (day) Value: 5 vs. 2
  misc_feature: MA Experiment 108528 PARAMETER Experiment Name: Zm_Imbibed_Seeds_P Parameter: Organism Value: Zea mays
  misc_feature: MA Experiment 108528 PARAMETER Experiment Name: Zm_Imbibed_Seeds_P Parameter: Plant Line Value: 35A19
  misc_feature: MA Experiment 108528 PARAMETER Experiment Name: Zm_Imbibed_Seeds_P Parameter: Tissue Value: Aerial vs. Embryo
  misc_feature: MA Experiment ID: 108529 Result: Up-regulated in Transcription
  misc_feature: MA Experiment 108529 PARAMETER Experiment Name: Zm_Imbibed_Seeds_P Parameter: Age (day) Value: 5 vs. 2
  misc_feature: MA Experiment 108529 PARAMETER Experiment Name: Zm_Imbibed_Seeds_P Parameter: Organism Value: Zea mays
  misc_feature: MA Experiment 108529 PARAMETER Experiment Name: Zm_Imbibed_Seeds_P Parameter: Plant Line Value: 35A19
  misc_feature: MA Experiment 108529 PARAMETER Experiment Name: Zm_Imbibed_Seeds_P Parameter: Tissue Value: Roots vs. Embryo
  misc_feature: MA Experiment ID: 108530 Result: Up-regulated in Transcription
  misc_feature: MA Experiment 108530 PARAMETER Experiment Name: Zm_Imbibed_Seeds_P Parameter: Age (day) Value: 6 vs. 2
  misc_feature: MA Experiment 108530 PARAMETER Experiment Name: Zm_Imbibed_Seeds_P Parameter: Organism Value: Zea mays
  misc_feature: MA Experiment 108530 PARAMETER Experiment Name: Zm_Imbibed_Seeds_P Parameter: Plant Line Value: 35A19
  misc_feature: MA Experiment 108530 PARAMETER Experiment Name: Zm_Imbibed_Seeds_P Parameter: Tissue Value: Aerial vs. Embryo
  misc_feature: MA Experiment ID: 108535 Result: Down-regulated in Transcription
  misc_feature: MA Experiment 108535 PARAMETER Experiment Name: Zm_Meristem_P Parameter: Age (day) Value: 8
  misc_feature: MA Experiment 108535 PARAMETER Experiment Name: Zm_Meristem_P Parameter: Organism Value: Zea mays
  misc_feature: MA Experiment 108535 PARAMETER Experiment Name: Zm_Meristem_P Parameter: Plant Line Value: 35A19
  misc_feature: MA Experiment 108535 PARAMETER Experiment Name: Zm_Meristem_P Parameter: Tissue Value: Root Meristem vs. Above Root Meristem
  misc_feature: MA Experiment ID: 108543 Result: Up-regulated in Transcription
  misc_feature: MA Experiment ID: 108546 Result: Up-regulated in Transcription
  misc_feature: MA Experiment 108546 PARAMETER Experiment Name: Zm_Imbibed_Seeds_P Parameter: Age (day) Value: 3 vs. 2
  misc_feature: MA Experiment 108546 PARAMETER Experiment Name: Zm_Imbibed_Seeds_P Parameter: Organism Value: Zea mays
  misc_feature: MA Experiment 108546 PARAMETER Experiment Name: Zm_Imbibed_Seeds_P Parameter: Plant Line Value: 35A19
  misc_feature: MA Experiment 108546 PARAMETER Experiment Name: Zm_Imbibed_Seeds_P Parameter: Tissue Value: Roots vs. Embryo
  misc_feature: MA Experiment ID: 108547 Result: Up-regulated in Transcription
  misc_feature: MA Experiment 108547 PARAMETER Experiment Name: Zm_Imbibed_Seeds_P Parameter: Age (day) Value: 4 vs. 2
  misc_feature: MA Experiment 108547 PARAMETER Experiment Name: Zm_Imbibed_Seeds_P Parameter: Organism Value: Zea mays
  misc_feature: MA Experiment 108547 PARAMETER Experiment Name: Zm_Imbibed_Seeds_P Parameter: Plant Line Value: 35A19
  misc_feature: MA Experiment 108547 PARAMETER Experiment Name: Zm_Imbibed_Seeds_P Parameter: Tissue Value: Aerial vs. Embryo
  misc_feature: MA Experiment ID: 108556 Result: Down-regulated in Transcription
  misc_feature: MA Experiment 108556 PARAMETER Experiment Name: Zm_Drought_P Parameter: Age (day) Value: 9
  misc_feature: MA Experiment 108556 PARAMETER Experiment Name: Zm_Drought_P Parameter: Organism Value: Zea mays
  misc_feature: MA Experiment 108556 PARAMETER Experiment Name: Zm_Drought_P Parameter: Plant Line Value: 35A19
  misc_feature: MA Experiment 108556 PARAMETER Experiment Name: Zm_Drought_P Parameter: Timepoint (hr) Value: 24
  misc_feature: MA Experiment 108556 PARAMETER Experiment Name: Zm_Drought_P Parameter: Tissue Value: Aerial
  misc_feature: MA Experiment 108556 PARAMETER Experiment Name: Zm_Drought_P Parameter: Treatment Value: Drought vs. No Drought
  misc_feature: MA Experiment ID: 108597 Result: Down-regulated in Transcription
  misc_feature: MA Experiment 108597 PARAMETER Experiment Name: Zm_100uM_ABA_P Parameter: Age (day) Value: 9
  misc_feature: MA Experiment 108597 PARAMETER Experiment Name: Zm_100uM_ABA_P Parameter: Organism Value: Zea mays
  misc_feature: MA Experiment 108597 PARAMETER Experiment Name: Zm_100uM_ABA_P Parameter: Plant Line Value: 35A19
  misc_feature: MA Experiment 108597 PARAMETER Experiment Name: Zm_100uM_ABA_P Parameter: Timepoint (hr) Value: 24
  misc_feature: MA Experiment 108597 PARAMETER Experiment Name: Zm_100uM_ABA_P Parameter: Tissue Value: Aerial
  misc_feature: MA Experiment 108597 PARAMETER Experiment Name: Zm_100uM_ABA_P Parameter: Treatment Value: 100uM ABA vs. No Treatment
  misc_feature: MA Experiment ID: 20000108 Result: Down-regulated in Transcription
  misc_feature: MA Experiment 20000108 PARAMETER Experiment Name: Zm_Root-Tips_P Parameter: Age (day) Value: 12
  misc_feature: MA Experiment 20000108 PARAMETER Experiment Name: Zm_Root-Tips_P Parameter: Organism Value: Zea mays
  misc_feature: MA Experiment 20000108 PARAMETER Experiment Name: Zm_Root-Tips_P Parameter: Tissue Value: Root tips vs. Root mid region    35
  misc_feature: MA Experiment 20000108 PARAMETER Experiment Name: Zm_Root-Tips_P Parameter: Tissue Value: Root tips vs. Root mid region   Sequence Listing-Misc Features (4)
  misc_feature: MA Experiment ID: 20000477 Result: Down-regulated in Transcription
  misc_feature: MA Experiment 20000477 PARAMETER Experiment Name: Zm_5mM_SA_P Parameter: Age (day) Value: 10
  misc_feature: MA Experiment 20000477 PARAMETER Experiment Name: Zm_5mM_SA_P Parameter: Organism Value: Zea mays
  misc_feature: MA Experiment 20000477 PARAMETER Experiment Name: Zm_5mM_SA_P Parameter: Plant Line Value: 35A19
  misc_feature: MA Experiment 20000477 PARAMETER Experiment Name: Zm_5mM_SA_P Parameter: Timepoint (hr) Value: 48
  misc_feature: MA Experiment 20000477 PARAMETER Experiment Name: Zm_5mM_SA_P Parameter: Tissue Value: Aerial
  misc_feature: MA Experiment 20000477 PARAMETER Experiment Name: Zm_5mM_SA_P Parameter: Treatment Value: 5mM SA vs. No Treatment
  misc_feature: MA Experiment ID: 20000478 Result: Down-regulated in Transcription
  misc_feature: MA Experiment 20000478 PARAMETER Experiment Name: Zm_5mM_SA_P Parameter: Age (day) Value: 11
  misc_feature: MA Experiment 20000478 PARAMETER Experiment Name: Zm_5mM_SA_P Parameter: Organism Value: Zea mays
  misc_feature: MA Experiment 20000478 PARAMETER Experiment Name: Zm_5mM_SA_P Parameter: Plant Line Value: 35A19
  misc_feature: MA Experiment 20000478 PARAMETER Experiment Name: Zm_5mM_SA_P Parameter: Timepoint (hr) Value: 72
  misc_feature: MA Experiment 20000478 PARAMETER Experiment Name: Zm_5mM_SA_P Parameter: Tissue Value: Aerial
  misc_feature: MA Experiment 20000478 PARAMETER Experiment Name: Zm_5mM_SA_P Parameter: Treatment Value: 5mM SA vs. No Treatment
  misc_feature: MA Experiment ID: 20000479 Result: Down-regulated in Transcription
  misc_feature: MA Experiment 20000479 PARAMETER Experiment Name: Zm_Drought_P Parameter: Age (day) Value: 10
  misc_feature: MA Experiment 20000479 PARAMETER Experiment Name: Zm_Drought_P Parameter: Organism Value: Zea mays
  misc_feature: MA Experiment 20000479 PARAMETER Experiment Name: Zm_Drought_P Parameter: Plant Line Value: 35A19
  misc_feature: MA Experiment 20000479 PARAMETER Experiment Name: Zm_Drought_P Parameter: Timepoint (hr) Value: 48
  misc_feature: MA Experiment 20000479 PARAMETER Experiment Name: Zm_Drought_P Parameter: Tissue Value: Aerial
  misc_feature: MA Experiment 20000479 PARAMETER Experiment Name: Zm_Drought_P Parameter: Treatment Value: Drought vs. No Drought
  misc_feature: MA Experiment ID: 20000480 Result: Down-regulated in Transcription
  misc_feature: MA Experiment 20000480 PARAMETER Experiment Name: Zm_Drought_P Parameter: Age (day) Value: 11
  misc_feature: MA Experiment 20000480 PARAMETER Experiment Name: Zm_Drought_P Parameter: Organism Value: Zea mays
  misc_feature: MA Experiment 20000480 PARAMETER Experiment Name: Zm_Drought_P Parameter: Plant Line Value: 35A19
  misc_feature: MA Experiment 20000480 PARAMETER Experiment Name: Zm_Drought_P Parameter: Timepoint (hr) Value: 72
  misc_feature: MA Experiment 20000480 PARAMETER Experiment Name: Zm_Drought_P Parameter: Tissue Value: Aerial
  misc_feature: MA Experiment 20000480 PARAMETER Experiment Name: Zm_Drought_P Parameter: Treatment Value: Drought vs. No Drought
  misc_feature: MA Experiment ID: 20000534 Result: Down-regulated in Transcription
  misc_feature: MA Experiment 20000534 PARAMETER Experiment Name: Zm_Hybrid_Pollen_P Parameter: Age (day) Value: 8
  misc_feature: MA Experiment 20000534 PARAMETER Experiment Name: Zm_Hybrid_Pollen_P Parameter: Organism Value: Zea mays
  misc_feature: MA Experiment 20000534 PARAMETER Experiment Name: Zm_Hybrid_Pollen_P Parameter: Plant Line Value: 35A19
  misc_feature: MA Experiment 20000534 PARAMETER Experiment Name: Zm_Hybrid_Pollen_P Parameter: Tissue Value: Pollen vs. Aerial
  misc_feature: MA Experiment ID: 20000535 Result: Down-regulated in Transcription
  misc_feature: MA Experiment 20000535 PARAMETER Experiment Name: Zm_Hybrid_Seed_Dev_P Parameter: DAP Value: 30 vs. 12
  misc_feature: MA Experiment 20000535 PARAMETER Experiment Name: Zm_Hybrid_Seed_Dev_P Parameter: Organism Value: Zea mays
  misc_feature: MA Experiment 20000535 PARAMETER Experiment Name: Zm_Hybrid_Seed_Dev_P Parameter: Plant Line Value: 35A19
  misc_feature: MA Experiment 20000535 PARAMETER Experiment Name: Zm_Hybrid_Seed_Dev_P Parameter: Tissue Value: Embryo vs. Unfert Floret
  misc_feature: MA Experiment ID: 20000630 Result: Down-regulated in Transcription
  misc_feature: MA Experiment 20000630 PARAMETER Experiment Name: Zm_Herbicide-Treatments_P Parameter: Timepoint (hr) Value: 4
  misc_feature: MA Experiment 20000630 PARAMETER Experiment Name: Zm_Herbicide-Treatments_P Parameter: Tissue Value: Aerial
  misc_feature: MA Experiment 20000630 PARAMETER Experiment Name: Zm_Herbicide-Treatments_P Parameter: Treatment Value: Roundup vs. No Treatment
  misc_feature: MA Experiment ID: 20001608 Result: Up-regulated in Transcription
  misc_feature: MA Experiment 20001608 PARAMETER Experiment Name: Zm_50ppm_KNO3_L-to-H_P Parameter: Age (day) Value: 21
  misc_feature: MA Experiment 20001608 PARAMETER Experiment Name: Zm_50ppm_KNO3_L-to-H_P Parameter: Organism Value: Zea mays
  misc_feature: MA Experiment 20001608 PARAMETER Experiment Name: Zm_50ppm_KNO3_L-to-H_P Parameter: Plant Line Value: 35A19
  misc_feature: MA Experiment 20001608 PARAMETER Experiment Name: Zm_50ppm_KNO3_L-to-H_P Parameter: Timepoint (hr) Value: 48
  misc_feature: MA Experiment 20001608 PARAMETER Experiment Name: Zm_50ppm_KNO3_L-to-H_P Parameter: Tissue Value: Shoots
  misc_feature: MA Experiment 20001608 PARAMETER Experiment Name: Zm_50ppm_KNO3_L-to-H_P Parameter: Treatment Value: 50ppm KNO3 vs. 50ppm KCl
acagctcgcgcgcgcaccagacagacgccttctccctctcccgcagtacagggtacagctcgcgctcacacaagacaccatctccctgcctgcgatccgatgcgtccaacgttttcagccggggtacggtcctaccaccgctgtgcctaataattggcggctagctagctagctagctgcagctgctgcgatcctggatcggcacagccggttcttgatgtggagggagcggcggcgggcgctgctcctgctggtggccggcgcggcgctgggactgatcggtgccgcgctcgcgagcgcgccgccggaggccgcgctgaaggtcgggttctaccatgcgacgtgccccatcgcggaggacgtggtcctcgccgagatgaggctcatcctcatggaggacgccacggtcgcgccgtccctgctccggatgcactaccacgactgcttcgtgcagggctgcgacgggtcgatcatgctccagtcgaggaagaaggggaaggcggagcgggacgcgctgcccaaccgtagcatgcgagggttcgacgccatcgagcggatcaaggcccggctcgagaccgtctgcccgctcaccgtctcctgcgccgacatcatcgccatggcggcgagggacgccgtctacctgagccacgggccgtggtacgacgtggagaccgggcggcgcgacggcaacgtcaccgtggccgagtacgtcgacaacgacctgccgccgccggactccaacattgtcgacgtgaagaccttcttcagcgtcaagtcgcttaactcgaaggacatcgccgtcctcttcgggtgccacagcatcgggacctcccactgcggcccgatccagaagcggctctacaacttcaccggcaacatggacggccaggacccgtcgctggacccggcctacgccgccgagctcaggaagctctgcccgcctcccagacccggcgacgatgctaggaaggtcaaggtgcctttggaccccggcagcaactacaccttcgacctgagctactaccgccacgtgctcgccacgggcgggctgttccagtccgacggcagcctcctgcacgaccccgtcaccagaggctacgtcgagaaggtggccaaggcgtcgtcgcccgacgagtactacgcggacttcgccgcggcgatggtcaagatgggccgcaccgacgtgcttgtcggcgatcatggggagatcaggccaacgtgtggcatttttgttgactaggttcaggattgggttgaagatgcgaagataatctgtacgggtttctgtcaacgtgtactgtgcgtgctgttagatcagaaagagcacggtcgctgttaactgtgtatccgggaatgctgttctgttcacacacggtcgtcactgatctactgaattgtcagccatgatgtaattatttatctacgtattagttgtatattcttctc

SEQ ID NO: 10044 - protein, 340 aa, Zea mays subsp. mays
  peptide (1)..(340): Ceres Seq. ID no. 12354452
  misc_feature (50)..(301): Pfam Name: Peroxidase Pfam Description: Peroxidase
  misc_feature (8)..(340): Homolog of NCBI NO: 34908760 NR Description: Peroxidase-like protein [Oryza sativa (japonica
  misc_feature (16)..(340): Homolog of NCBI NO: 34915488 NR Description: peroxidase-like protein [Oryza sativa (japonica group)] >gi|22324453|dbj|BAC10368.1| putative peroxidase 1
  misc_feature (12)..(340): Homolog of NCBI NO: 39546236 NR Description: OSJNBa0089N06.6 [Oryza sativa (japonica
  misc_feature (1)..(335): Homolog of NCBI NO: 34915480 NR Description: putative peroxidase [Oryza sativa (japonica
  misc_feature (18)..(337): Homolog of NCBI NO: 585661 NR Description: Peroxidase 1 precursor >gi|7433074|pir||T03928
  misc_feature (8)..(337): Homolog of NCBI NO: 15220463 NR Description: peroxidase, putative; protein id: At1g05260.1, by cDNA: 114862., supported by cDNA: gi_2738253 [Arabidopsis >gi|25453190|sp|O23044|PER3_ARATH Peroxidase 3 precursor (Atperox
  misc_feature (8)..(337): Homolog of NCBI NO: 21536908 NR Description: putative peroxidase [Arabidopsis thaliana]
  misc_feature (1)..(337): Homolog of NCBI NO: 34915484 NR Description: putative peroxidase [Oryza sativa (japonica >gi|22324451|dbj|BAC10366.1| putative peroxidase 1 precursor
  misc_feature (10)..(337): Homolog of NCBI NO: 27261038 NR Description: putative peroxidase [Oryza sativa (japonica
MWRERRRALLLLVAGAALGLIGAALASAPPEAALKVGFYHATCPIAEDVVLAEMRLILMEDATVAPSLLRMHYHDCFVQGCDGSIMLQSRKKGKAERDALPNRSMRGFDAIERIKARLETVCPLTVSCADIIAMAARDAVYLSHGPWYDVETGRRDGNVTVAEYVDNDLPPPDSNIVDVKTFFSVKSLNSKDIAVLFGCHSIGTSHCGPIQKRLYNFTGNMDGQDPSLDPAYAAELRKLCPPPRPGDDARKVKVPLDPGSNYTFDLSYYRHVLATGGLFQSDGSLLHDPVTRGYVEKVAKASSPDEYYADFAAAMVKMGRTDVLVGDHGEIRPTCGIFVD

SEQ ID NO: 10045 - protein, 287 aa, Zea mays subsp. mays
  peptide (1)..(287): Ceres Seq. ID no. 12354453
  misc_feature (1)..(248): Pfam Name: Peroxidase Pfam Description: Peroxidase
  misc_feature (1)..(284): Homolog of NCBI NO: 34915484 NR Description: putative peroxidase [Oryza sativa (japonica >gi|22324451|dbj|BAC10366.1| putative peroxidase 1 precursor
  misc_feature (1)..(287): Homolog of NCBI NO: 34908760 NR Description: Peroxidase-like protein [Oryza sativa (japonica
  misc_feature (1)..(287): Homolog of NCBI NO: 39546236 NR Description: OSJNBa0089N06.6 [Oryza sativa (japonica
  misc_feature (1)..(284): Homolog of NCBI NO: 585661 NR Description: Peroxidase 1 precursor >gi|7433074|pir||T03928
  misc_feature (1)..(284): Homolog of NCBI NO: 21536908 NR Description: putative peroxidase [Arabidopsis thaliana]
  misc_feature (1)..(284): Homolog of NCBI NO: 15220463 NR Description: peroxidase, putative; protein id: At1g05260.1, by cDNA: 114862., supported by cDNA: gi_2738253 [Arabidopsis >gi|25453190|sp|O23044|PER3_ARATH Peroxidase 3 precursor (Atperox
  misc_feature (1)..(282): Homolog of NCBI NO: 34915480 NR Description: putative peroxidase [Oryza sativa (japonica
  misc_feature (1)..(287): Homolog of NCBI NO: 34915488 NR Description: peroxidase-like protein [Oryza sativa (japonica group)] >gi|22324453|dbj|BAC10368.1| putative peroxidase 1
  misc_feature (1)..(284): Homolog of NCBI NO: 27261038 NR Description: putative peroxidase [Oryza sativa (japonica
MRLILMEDATVAPSLLRMHYHDCFVQGCDGSIMLQSRKKGKAERDALPNRSMRGFDAIERIKARLETVCPLTVSCADIIAMAARDAVYLSHGPWYDVETGRRDGNVTVAEYVDNDLPPPDSNIVDVKTFFSVKSLNSKDIAVLFGCHSIGTSHCGPIQKRLYNFTGNMDGQDPSLDPAYAAELRKLCPPPRPGDDARKVKVPLDPGSNYTFDLSYYRHVLATGGLFQSDGSLLHDPVTRGYVEKVAKASSPDEYYADFAAAMVKMGRTDVLVGDHGEIRPTCGIFVD

SEQ ID NO: 10046 - protein, 282 aa, Zea mays subsp. mays
  peptide (1)..(282): Ceres Seq. ID no. 12354454
  misc_feature (1)..(243): Pfam Name: Peroxidase Pfam Description: Peroxidase
  misc_feature (1)..(282): Homolog of NCBI NO: 34908760 NR Description: Peroxidase-like protein [Oryza sativa (japonica
  misc_feature (1)..(282): Homolog of NCBI NO: 34915488 NR Description: peroxidase-like protein [Oryza sativa (japonica group)] >gi|22324453|dbj|BAC10368.1| putative peroxidase 1
  misc_feature (1)..(282): Homolog of NCBI NO: 39546236 NR Description: OSJNBa0089N06.6 [Oryza sativa (japonica
  misc_feature (1)..(277): Homolog of NCBI NO: 34915480 NR Description: putative peroxidase [Oryza sativa (japonica
  misc_feature (1)..(279): Homolog of NCBI NO: 585661 NR Description: Peroxidase 1 precursor >gi|7433074|pir||T03928
  misc_feature (1)..(279): Homolog of NCBI NO: 15220463 NR Description: peroxidase, putative; protein id: At1g05260.1, by cDNA: 114862., supported by cDNA: gi_2738253 [Arabidopsis >gi|25453190|sp|O23044|PER3_ARATH Peroxidase 3 precursor (Atperox
  misc_feature (1)..(279): Homolog of NCBI NO: 21536908 NR Description: putative peroxidase [Arabidopsis thaliana]
  misc_feature (1)..(279): Homolog of NCBI NO: 34915484 NR Description: putative peroxidase [Oryza sativa (japonica >gi|22324451|dbj|BAC10366.1| putative peroxidase 1 precursor
  misc_feature (1)..(279): Homolog of NCBI NO: 27261038 NR Description: putative peroxidase [Oryza sativa (japonica
MEDATVAPSLLRMHYHDCFVQGCDGSIMLQSRKKGKAERDALPNRSMRGFDAIERIKARLETVCPLTVSCADIIAMAARDAVYLSHGPWYDVETGRRDGNVTVAEYVDNDLPPPDSNIVDVKTFFSVKSLNSKDIAVLFGCHSIGTSHCGPIQKRLYNFTGNMDGQDPSLDPAYAAELRKLCPPPRPGDDARKVKVPLDPGSNYTFDLSYYRHVLATGGLFQSDGSLLHDPVTRGYVEKVAKASSPDEYYADFAAAMVKMGRTDVLVGDHGEIRPTCGIFVD

SEQ ID NO: 10047 - DNA, 1390 bp, Zea mays subsp. mays
  misc_feature (1)..(1390): Ceres Seq. ID no. 12358650
  misc_feature: MA Experiment ID: 108504 Result: Down-regulated in Transcription
  misc_feature: MA Experiment 108504 PARAMETER Experiment Name: Zm_Drought_P Parameter: Age (day) Value: 8
  misc_feature: MA Experiment 108504 PARAMETER Experiment Name: Zm_Drought_P Parameter: Organism Value: Zea mays
  misc_feature: MA Experiment 108504 PARAMETER Experiment Name: Zm_Drought_P Parameter: Plant Line Value: 35A19
  misc_feature: MA Experiment 108504 PARAMETER Experiment Name: Zm_Drought_P Parameter: Timepoint (hr) Value: 12
  misc_feature: MA Experiment 108504 PARAMETER Experiment Name: Zm_Drought_P Parameter: Tissue Value: Aerial
  misc_feature: MA Experiment 108504 PARAMETER Experiment Name: Zm_Drought_P Parameter: Treatment Value: Drought vs. No Drought
  misc_feature: MA Experiment ID: 108523 Result: Down-regulated in Transcription
  misc_feature: MA Experiment 108523 PARAMETER Experiment Name: Zm_42deg_Heat_P Parameter: Age (day) Value: 8
  misc_feature: MA Experiment 108523 PARAMETER Experiment Name: Zm_42deg_Heat_P Parameter: Organism Value: Zea mays
  misc_feature: MA Experiment 108523 PARAMETER Experiment Name: Zm_42deg_Heat_P Parameter: Plant Line Value: 35A19
  misc_feature: MA Experiment 108523 PARAMETER Experiment Name: Zm_42deg_Heat_P Parameter: Temperature (deg C) Value: 42 vs. 22
  misc_feature: MA Experiment 108523 PARAMETER Experiment Name: Zm_42deg_Heat_P Parameter: Timepoint (hr) Value: 6
  misc_feature: MA Experiment 108523 PARAMETER Experiment Name: Zm_42deg_Heat_P Parameter: Tissue Value: Aerial
  misc_feature: MA Experiment ID: 108535 Result: Up-regulated in Transcription
  misc_feature: MA Experiment 108535 PARAMETER Experiment Name: Zm_Meristem_P Parameter: Age (day) Value: 8
  misc_feature: MA Experiment 108535 PARAMETER Experiment Name: Zm_Meristem_P Parameter: Organism Value: Zea mays
  misc_feature: MA Experiment 108535 PARAMETER Experiment Name: Zm_Meristem_P Parameter: Plant Line Value: 35A19
  misc_feature: MA Experiment 108535 PARAMETER Experiment Name: Zm_Meristem_P Parameter: Tissue Value: Root Meristem vs. Above Root Meristem
  misc_feature: MA Experiment ID: 108544 Result: Down-regulated in Transcription
  misc_feature: MA Experiment ID: 108556 Result: Down-regulated in Transcription
  misc_feature: MA Experiment 108556 PARAMETER Experiment Name: Zm_Drought_P Parameter: Age (day) Value: 9
  misc_feature: MA Experiment 108556 PARAMETER Experiment Name: Zm_Drought_P Parameter: Organism Value: Zea mays
  misc_feature: MA Experiment 108556 PARAMETER Experiment Name: Zm_Drought_P Parameter: Plant Line Value: 35A19
  misc_feature: MA Experiment 108556 PARAMETER Experiment Name: Zm_Drought_P Parameter: Timepoint (hr) Value: 24
  misc_feature: MA Experiment 108556 PARAMETER Experiment Name: Zm_Drought_P Parameter: Tissue Value: Aerial
  misc_feature: MA Experiment 108556 PARAMETER Experiment Name: Zm_Drought_P Parameter: Treatment Value: Drought vs. No Drought
  misc_feature: MA Experiment ID: 20000478 Result: Down-regulated in Transcription
  misc_feature: MA Experiment 20000478 PARAMETER Experiment Name: Zm_5mM_SA_P Parameter: Age (day) Value: 11
  misc_feature: MA Experiment 20000478 PARAMETER Experiment Name: Zm_5mM_SA_P Parameter: Organism Value: Zea mays
  misc_feature: MA Experiment 20000478 PARAMETER Experiment Name: Zm_5mM_SA_P Parameter: Plant Line Value: 35A19
  misc_feature: MA Experiment 20000478 PARAMETER Experiment Name: Zm_5mM_SA_P Parameter: Timepoint (hr) Value: 72
  misc_feature: MA Experiment 20000478 PARAMETER Experiment Name: Zm_5mM_SA_P Parameter: Tissue Value: Aerial
  misc_feature: MA Experiment 20000478 PARAMETER Experiment Name: Zm_5mM_SA_P Parameter: Treatment Value: 5mM SA vs. No Treatment
  misc_feature: MA Experiment ID: 20000626 Result: Down-regulated in Transcription
  misc_feature: MA Experiment 20000626 PARAMETER Experiment Name: Zm_Herbicide-Treatments_P Parameter: Timepoint (hr) Value: 12
  misc_feature: MA Experiment 20000626 PARAMETER Experiment Name: Zm_Herbicide-Treatments_P Parameter: Tissue Value: Aerial
  misc_feature: MA Experiment 20000626 PARAMETER Experiment Name: Zm_Herbicide-Treatments_P Parameter: Treatment Value: Roundup vs. No Treatment
attcggcctatcacaaccacttactctcgtgcgctctccgtgggagcgaggactcgcggccggcgcagcggcaggttctcctagatctccggtaacaaatggctgacggtgaggacattcagccccttgtttgtgacaatggaactggcatggtcaaggctggttttgctggtgacgatgcgccaagggctgttttcccaagcattgtcggacgcccccgtcacactggtgtgatggttggcatggggcagaaggatgcgtatgttggtgacgaggcccagtccaagaggggtatcctgactttgaagtaccccatcgaacatggtattgttagcaattgggatgacatggagaagatctggcaccacaccttctataatgaactccgtgtggcgcctgaagagcaccctgtgctgctgacggaagccccactcaaaccccaaagctaacagggagaagatgacccaaatcatgtttgagaccttcaatgttcctgccatgtatgtcgccatccaggctgtgctttccctgtacgccagtgggcgtacaactggtattgtgttggactctggtgatggtgtcagccacaccgtgccaatctacgaaggttatgcccttcctcatgccatcctgcgtcttgaccttgctgggcgtgacctgactgacagcctgatgaagatcctcaccgagagaggttactccttcaccaccacggccgaacgggaaatcgtacgggacatcaaggaaaagcttgcatacgtggctcttgactatgatcaggagctggagaacgccaagagcagctcatctgtggagaagagctacgagctgcctgatggccaggtgatcaccattggggcggagaggttccgatgccccgaggtcctcttccagccttccttcattggtatggaagctcctggcatccatgagaccacctacaactccatcatgaaatgcgacgtggatatcaggaaggacttgtatggtaacattgttctcagtggtggcacaaccatgttccctggcatcgctgaccgtatgagcaaggagatcaccgcccttgccccgagcagcatgaaaatcaaggtggtggctccacccgagaggaaatacagtgtctggataggagggtccatccttgcctccctgagcaccttccaacagatgtggatctcaaaggctgagtacgatgagtcaggaccagcgattgttcaccggaagtgcttctaagctcaagggcccccttcgtccccattctatgtattcctttccttgagtgcttttcttataagctactatgtttgagattgccggcctttgagcaggcaatgttgttggatctgtatcttgtggatcactacaatgcatgcgttgctccatcttcttt

SEQ ID NO: 10048 - protein, 257 aa, Zea mays subsp. mays
  peptide (1)..(257): Ceres Seq. ID no. 12358651
  misc_feature (1)..(257): Pfam Name: Actin Pfam Description: Actin
  misc_feature (1)..(257): Homolog of NCBI NO: 9965319 NR Description: actin [Setaria italica]
  misc_feature (1)..(257): Homolog of NCBI NO: 15076949 NR Description: actin [Musa x paradisiaca]
  misc_feature (1)..(257): Homolog of NCBI NO: 15242516 NR Description: ACTIN 2/7 (sp|P53492); protein id: At5g09810.1, by cDNA: gi_1049306, supported by cDNA: gi_17065251, supported by gi_17381047, supported by cDNA: gi_20465864 [Arabidopsis
  misc_feature (1)..(257): Homolog of NCBI NO: 24496452 NR Description: actin [Hordeum vulgare]
  misc_feature (1)..(257): Homolog of NCBI NO: 37535954 NR Description: actin [Oryza sativa (japonica cultivar-group)]
  misc_feature (1)..(257): Homolog of NCBI NO: 11276972 NR Description: actin [imported] - rape
  misc_feature (1)..(257): Homolog of NCBI NO: 7960247 NR Description: actin-like protein [Phalaenopsis sp. 'True Lady']
  misc_feature (1)..(257): Homolog of NCBI NO: 28301928 NR Description: actin [Oryza sativa (japonica cultivar-group)]
  misc_feature (1)..(257): Homolog of NCBI NO: 11276968 NR Description: actin [imported] - Picea rubens
  misc_feature (1)..(242): Homolog of NCBI NO: 11276980 NR Description: actin (ACT3) - Arabidopsis thaliana
MTQIMFETFNVPAMYVAIQAVLSLYASGRTTGIVLDSGDGVSHTVPIYEGYALPHAILRLDLAGRDLTDSLMKILTERGYSFTTTAEREIVRDIKEKLAYVALDYDQELENAKSSSSVEKSYELPDGQVITIGAERFRCPEVLFQPSFIGMEAPGIHETTYNSIMKCDVDIRKDLYGNIVLSGGTTMFPGIADRMSKEITALAPSSMKIKVVAPPERKYSVWIGGSILASLSTFQQMWISKAEYDESGPAIVHRKCF

SEQ ID NO: 10049 - protein, 253 aa, Zea mays subsp. mays
  peptide (1)..(253): Ceres Seq. ID no. 12358652
  misc_feature (1)..(253): Pfam Name: Actin Pfam Description: Actin
  misc_feature (1)..(253): Homolog of NCBI NO: 9965319 NR Description: actin [Setaria italica]
  misc_feature (1)..(253): Homolog of NCBI NO: 15076949 NR Description: actin [Musa x paradisiaca]
  misc_feature (1)..(253): Homolog of NCBI NO: 15242516 NR Description: ACTIN 2/7 (sp|P53492); protein id: At5g09810.1, by cDNA: gi_1049306, supported by cDNA: gi_17065251, supported by gi_17381047, supported by cDNA: gi_20465864 [Arabidopsis
  misc_feature (1)..(253): Homolog of NCBI NO: 24496452 NR Description: actin [Hordeum vulgare]
  misc_feature (1)..(253): Homolog of NCBI NO: 37535954 NR Description: actin [Oryza sativa (japonica cultivar-group)]
  misc_feature (1)..(253): Homolog of NCBI NO: 11276972 NR Description: actin [imported] - rape
  misc_feature (1)..(253): Homolog of NCBI NO: 7960247 NR Description: actin-like protein [Phalaenopsis sp. 'True Lady']
  misc_feature (1)..(253): Homolog of NCBI NO: 11276968 NR Description: actin [imported] - Picea rubens
  misc_feature (1)..(253): Homolog of NCBI NO: 28301928 NR Description: actin [Oryza sativa (japonica cultivar-group)]
  misc_feature (1)..(238): Homolog of NCBI NO: 11276980 NR Description: actin (ACT3) - Arabidopsis thaliana
MFETFNVPAMYVAIQAVLSLYASGRTTGIVLDSGDGVSHTVPIYEGYALPHAILRLDLAGRDLTDSLMKILTERGYSFTTTAEREIVRDIKEKLAYVALDYDQELENAKSSSSVEKSYELPDGQVITIGAERFRCPEVLFQPSFIGMEAPGIHETTYNSIMKCDVDIRKDLYGNIVLSGGTTMFPGIADRMSKEITALAPSSMKIKVVAPPERKYSVWIGGSILASLSTFQQMWISKAEYDESGPAIVHRKCF

SEQ ID NO: 10050 - protein, 244 aa, Zea mays subsp. mays
  peptide (1)..(244): Ceres Seq. ID no. 12358653
  misc_feature (1)..(244): Pfam Name: Actin Pfam Description: Actin
  misc_feature (1)..(244): Homolog of NCBI NO: 9965319 NR Description: actin [Setaria italica]
  misc_feature (1)..(244): Homolog of NCBI NO: 15076949 NR Description: actin [Musa x paradisiaca]
  misc_feature (1)..(244): Homolog of NCBI NO: 15242516 NR Description: ACTIN 2/7 (sp|P53492); protein id: At5g09810.1, by cDNA: gi_1049306, supported by cDNA: gi_17065251, supported by gi_17381047, supported by cDNA: gi_20465864 [Arabidopsis
  misc_feature (1)..(244): Homolog of NCBI NO: 24496452 NR Description: actin [Hordeum vulgare]
  misc_feature (1)..(244): Homolog of NCBI NO: 37535954 NR Description: actin [Oryza sativa (japonica cultivar-group)]
  misc_feature (1)..(244): Homolog of NCBI NO: 11276972 NR Description: actin [imported] - rape
  misc_feature (1)..(244): Homolog of NCBI NO: 7960247 NR Description: actin-like protein [Phalaenopsis sp. 'True Lady']
  misc_feature (1)..(244): Homolog of NCBI NO: 11276968 NR Description: actin [imported] - Picea rubens
  misc_feature (1)..(244): Homolog of NCBI NO: 28301928 NR Description: actin [Oryza sativa (japonica cultivar-group)]
  misc_feature (1)..(229): Homolog of NCBI NO: 11276980 NR Description: actin (ACT3) - Arabidopsis thaliana
MYVAIQAVLSLYASGRTTGIVLDSGDGVSHTVPIYEGYALPHAILRLDLAGRDLTDSLMKILTERGYSFTTTAEREIVRDIKEKLAYVALDYDQELENAKSSSSVEKSYELPDGQVITIGAERFRCPEVLFQPSFIGMEAPGIHETTYNSIMKCDVDIRKDLYGNIVLSGGTTMFPGIADRMSKEITALAPSSMKIKVVAPPERKYSVWIGGSILASLSTFQQMWISKAEYDESGPAIVHRKCF

SEQ ID NO: 10051 - DNA, 1140 bp, Zea mays subsp. mays
  misc_feature (1)..(1140): Ceres Seq. ID no. 12381143
  misc_feature: MA Experiment ID: 20000534 Result: Down-regulated in Transcription
  misc_feature: MA Experiment 20000534 PARAMETER Experiment Name: Zm_Hybrid_Pollen_P Parameter: Age (day) Value: 8
  misc_feature: MA Experiment 20000534 PARAMETER Experiment Name: Zm_Hybrid_Pollen_P Parameter: Organism Value: Zea mays
  misc_feature: MA Experiment 20000534 PARAMETER Experiment Name: Zm_Hybrid_Pollen_P Parameter: Plant Line Value: 35A19
  misc_feature: MA Experiment 20000534 PARAMETER Experiment Name: Zm_Hybrid_Pollen_P Parameter: Tissue Value: Pollen vs. Aerial
accatcggaaaggccacagctagggttcgatacttcgatccccactccatctccaccgaagaccgtcgcgtcgctccgccaccgaagcagctcaaggactggctcgggtggggctgcgactgtcgcgcggttggatccggaggctatggagcagtgagctccgtagttgacggccacctcaatctccttggtgaatctgtatagatttctctataagatgagctggagatttcctctcttcggctctcagcagcagcaagcagatccaagtttccaggacatccctacgcagtcttggtaccctccctcggtggtaggttcctcttcacgtccatccacccctacctcttctagtgctagtctacaccaaagagcttcagatagtccgcagtcttcatcccgtgggcaaccatctcctgctgaggctgcagggataattgcccgtttgaaggataagagtattgaggagttacaaaggctattgaaagacagagaggcatataatgcattctttaactcacttgatcaagtgaaaacccagaacaatgtgcgtgatgagcttaaaaaagagacattgcaacttgcaagggaaaatttagaaaaggagcagcggattttggaacttaggaatcagtgcacaataattagaaccacggaactggctgctgctcaagaccgcctaactgatttggagaggcaaaaggatgatattatgaggtcctattcccctgccgcactgctcaacaagctccaaacatcaatggcaaagttggatgaggagtccgaggagctgcaccagaagttcctggagaaggacatcgaccttccaacctttgtgcagaagtacaagaagctccgcacggcttaccacaagcaggcgttgctccatctcgccggccagacatcactccgctgacatccggccaggcgtcatggcaactttgttgtatttctgctcgcctgttcttgttctacactatgcttggccctgttttacgagtgcagcctcttgtagggatttgccgaacatcagcggatattgcatgtatagttttatgtcttgcaaaaacgtcttatgtactctgtcctggtgtagtggtgtttacgtatctagtgtccaagttgggattcatttgtggt

SEQ ID NO: 10052 - protein, 232 aa, Zea mays subsp. mays
  peptide (1)..(232): Ceres Seq. ID no. 12381144
  misc_feature (5)..(230): Homolog of NCBI NO: 15231750 NR Description: putative protein; protein id: At3g53120.1
  misc_feature (5)..(148): Homolog of NCBI NO: 30686871 NR Description: expressed protein [Arabidopsis thaliana]
  misc_feature (5)..(139): Homolog of NCBI NO: 30686868 NR Description: expressed protein [Arabidopsis thaliana] At2g36680/F13K3.8 [Arabidopsis thaliana]
  misc_feature (5)..(148): Homolog of NCBI NO: 25408498 NR Description: hypothetical protein At2g36680 [imported] - thaliana >gi|4415913|gb|AAD20144.1| unknown protein [Arabidopsis
  misc_feature (72)..(218): Homolog of NCBI NO: 21739818 NR Description: hypothetical protein [Homo sapiens]
  misc_feature (77)..(218): Homolog of NCBI NO: 31088908 NR Description: RIKEN cDNA 5730409F24 [Mus musculus]
  misc_feature (77)..(218): Homolog of NCBI NO: 18490855 NR Description: Similar to RIKEN cDNA 4930592A21 gene [Homo
  misc_feature (77)..(218): Homolog of NCBI NO: 34861617 NR Description: similar to RIKEN cDNA 5730409F24 [Rattus
  misc_feature (2)..(220): Homolog of NCBI NO: 39645505 NR Description: Unknown (protein for MGC:77637) [Danio rerio]
  misc_feature (2)..(220): Homolog of NCBI NO: 37590372 NR Description: Unknown (protein for MGC:73244) [Danio rerio]
MSWRFPLFGSQQQQADPSFQDIPTQSWYPPSVVGSSSRPSTPTSSSASLHQRASDSPQSSSRGQPSPAEAAGIIARLKDKSIEELQRLLKDREAYNAFFNSLDQVKTQNNVRDELKKETLQLARENLEKEQRILELRNQCTIIRTTELAAAQDRLTDLERQKDDIMRSYSPAALLNKLQTSMAKLDEESEELHQKFLEKDIDLPTFVQKYKKLRTAYHKQALLHLAGQTSLR

SEQ ID NO: 10053 - protein, 122 aa, Zea mays subsp. mays
  peptide (1)..(122): Ceres Seq. ID no. 12381145
MRSPRSCTRSSWRRTSTFQPLCRSTRSSARLTTSRRCSISPARHHSADIRPGVMATLLYFCSPVLVLHYAWPCFTSAASCRDLPNISGYCMYSFMSCKNVLCTLSWCSGVYVSSVQVGIHLW

SEQ ID NO: 10054 - DNA, 1400 bp, Zea mays subsp. mays
  misc_feature (1)..(1400): Ceres Seq. ID no. 12356826
  misc_feature: MA Experiment ID: 108535 Result: Up-regulated in Transcription
  misc_feature: MA Experiment 108535 PARAMETER Experiment Name: Zm_Meristem_P Parameter: Age (day) Value: 8
  misc_feature: MA Experiment 108535 PARAMETER Experiment Name: Zm_Meristem_P Parameter: Organism Value: Zea mays
  misc_feature: MA Experiment 108535 PARAMETER Experiment Name: Zm_Meristem_P Parameter: Plant Line Value: 35A19
  misc_feature: MA Experiment 108535 PARAMETER Experiment Name: Zm_Meristem_P Parameter: Tissue Value: Root Meristem vs. Above Root Meristem
  misc_feature: MA Experiment ID: 108543 Result: Up-regulated in Transcription
  misc_feature: MA Experiment ID: 108544 Result: Down-regulated in Transcription
  misc_feature: MA Experiment ID: 108556 Result: Down-regulated in Transcription
  misc_feature: MA Experiment 108556 PARAMETER Experiment Name: Zm_Drought_P Parameter: Age (day) Value: 9
  misc_feature: MA Experiment 108556 PARAMETER Experiment Name: Zm_Drought_P Parameter: Organism Value: Zea mays
  misc_feature: MA Experiment 108556 PARAMETER Experiment Name: Zm_Drought_P Parameter: Plant Line Value: 35A19
  misc_feature: MA Experiment 108556 PARAMETER Experiment Name: Zm_Drought_P Parameter: Timepoint (hr) Value: 24
  misc_feature: MA Experiment 108556 PARAMETER Experiment Name: Zm_Drought_P Parameter: Tissue Value: Aerial
  misc_feature: MA Experiment 108556 PARAMETER Experiment Name: Zm_Drought_P Parameter: Treatment Value: Drought vs. No Drought
  misc_feature: MA Experiment ID: 20000108 Result: Up-regulated in Transcription
  misc_feature: MA Experiment 20000108 PARAMETER Experiment Name: Zm_Root-Tips_P Parameter: Age (day) Value: 12
  misc_feature: MA Experiment 20000108 PARAMETER Experiment Name: Zm_Root-Tips_P Parameter: Organism Value: Zea mays
  misc_feature: MA Experiment 20000108 PARAMETER Experiment Name: Zm_Root-Tips_P Parameter: Tissue Value: Root tips vs. Root mid region    35
  misc_feature: MA Experiment 20000108 PARAMETER Experiment Name: Zm_Root-Tips_P Parameter: Tissue Value: Root tips vs. Root mid region   Sequence Listing-Misc Features (4)
  misc_feature: MA Experiment ID: 20000477 Result: Down-regulated in Transcription
  misc_feature: MA Experiment 20000477 PARAMETER Experiment Name: Zm_5mM_SA_P Parameter: Age (day) Value: 10
  misc_feature: MA Experiment 20000477 PARAMETER Experiment Name: Zm_5mM_SA_P Parameter: Organism Value: Zea mays
  misc_feature: MA Experiment 20000477 PARAMETER Experiment Name: Zm_5mM_SA_P Parameter: Plant Line Value: 35A19
  misc_feature: MA Experiment 20000477 PARAMETER Experiment Name: Zm_5mM_SA_P Parameter: Timepoint (hr) Value: 48
  misc_feature: MA Experiment 20000477 PARAMETER Experiment Name: Zm_5mM_SA_P Parameter: Tissue Value: Aerial
  misc_feature: MA Experiment 20000477 PARAMETER Experiment Name: Zm_5mM_SA_P Parameter: Treatment Value: 5mM SA vs. No Treatment
  misc_feature: MA Experiment ID: 20000478 Result: Down-regulated in Transcription
  misc_feature: MA Experiment 20000478 PARAMETER Experiment Name: Zm_5mM_SA_P Parameter: Age (day) Value: 11
  misc_feature: MA Experiment 20000478 PARAMETER Experiment Name: Zm_5mM_SA_P Parameter: Organism Value: Zea mays
  misc_feature: MA Experiment 20000478 PARAMETER Experiment Name: Zm_5mM_SA_P Parameter: Plant Line Value: 35A19
  misc_feature: MA Experiment 20000478 PARAMETER Experiment Name: Zm_5mM_SA_P Parameter: Timepoint (hr) Value: 72
  misc_feature: MA Experiment 20000478 PARAMETER Experiment Name: Zm_5mM_SA_P Parameter: Tissue Value: Aerial
  misc_feature: MA Experiment 20000478 PARAMETER Experiment Name: Zm_5mM_SA_P Parameter: Treatment Value: 5mM SA vs. No Treatment
  misc_feature: MA Experiment ID: 20000479 Result: Down-regulated in Transcription
  misc_feature: MA Experiment 20000479 PARAMETER Experiment Name: Zm_Drought_P Parameter: Age (day) Value: 10
  misc_feature: MA Experiment 20000479 PARAMETER Experiment Name: Zm_Drought_P Parameter: Organism Value: Zea mays
  misc_feature: MA Experiment 20000479 PARAMETER Experiment Name: Zm_Drought_P Parameter: Plant Line Value: 35A19
  misc_feature: MA Experiment 20000479 PARAMETER Experiment Name: Zm_Drought_P Parameter: Timepoint (hr) Value: 48
  misc_feature: MA Experiment 20000479 PARAMETER Experiment Name: Zm_Drought_P Parameter: Tissue Value: Aerial
  misc_feature: MA Experiment 20000479 PARAMETER Experiment Name: Zm_Drought_P Parameter: Treatment Value: Drought vs. No Drought
  misc_feature: MA Experiment ID: 20000480 Result: Down-regulated in Transcription
  misc_feature: MA Experiment 20000480 PARAMETER Experiment Name: Zm_Drought_P Parameter: Age (day) Value: 11
  misc_feature: MA Experiment 20000480 PARAMETER Experiment Name: Zm_Drought_P Parameter: Organism Value: Zea mays
  misc_feature: MA Experiment 20000480 PARAMETER Experiment Name: Zm_Drought_P Parameter: Plant Line Value: 35A19
  misc_feature: MA Experiment 20000480 PARAMETER Experiment Name: Zm_Drought_P Parameter: Timepoint (hr) Value: 72
  misc_feature: MA Experiment 20000480 PARAMETER Experiment Name: Zm_Drought_P Parameter: Tissue Value: Aerial
  misc_feature: MA Experiment 20000480 PARAMETER Experiment Name: Zm_Drought_P Parameter: Treatment Value: Drought vs. No Drought
  misc_feature: MA Experiment ID: 20000626 Result: Down-regulated in Transcription
  misc_feature: MA Experiment 20000626 PARAMETER Experiment Name: Zm_Herbicide-Treatments_P Parameter: Timepoint (hr) Value: 12
  misc_feature: MA Experiment 20000626 PARAMETER Experiment Name: Zm_Herbicide-Treatments_P Parameter: Tissue Value: Aerial
  misc_feature: MA Experiment 20000626 PARAMETER Experiment Name: Zm_Herbicide-Treatments_P Parameter: Treatment Value: Roundup vs. No Treatment
atcctgaacccgaaagctgaactaccacacacaacaaataactgacgcaggcgatccatcactccacagtgtccacacaccggtcggaaccgaggccaaccgccgccgccgccgccaatgtcgtcccctgcagcgccggtgcagccgccggcgccgcgcgcggtgcgcttcggcgtcctgggatgcgctgacatcgcgcgtaagatctcgcgcgcaatgctgatgctccctccgggcgccgccaccatcgccgccgtaggcagtcgctccgatgacaaggcccgccgcttcatctccgaaatcggcttccccgcggcgcgcgtccacgggtcctacgagtctctcctagaggacccggacgtggaggccgtgtacctcccgctccccactagtctccacgtgccctgggccacagccgtcgctgcgcgtggcaagcacctgctcctcgagaagcccaccgcgctctgcactgccgaactcgacgccatcctcagcgcctgcgacgcctccggggtccagttcatggacaccaccatgtggatccacaacccgcgcactgccaagatgcgggagatcgtcagcgacaaggacgcctttggcgacgtcagagtgataaacagtatgtgcagctttcgggcatccgaggaattcctcaagaatgacatcagggtaaagccagaccttgacgccttgggtgtcctcggtgatgttggatggtactgcatcctctcaatcctgtgggctgttgactatgagctgcctgagaccgtgatcgctcaccgccatcctgtcaagaaccaggctggcgtgctccttgcttgcggtgcgaccttgtactgggcagatggcaagactgcaaacttcaactgctcgtttcttgctaacctcgcctttgacgtgaccgtctatggcacaaacggcactctccatgtcactgacctggtcattccgtacgaagagagctctgcggagttcagtgtggcctcgaagtcaagcttcgtcaaacccaccatcggatgggatccattgccagagaagcatgttgttactactgatctgccacaggaggcactcatgatccaggaattcacaaggcttgtgcagaacgtccgcgccggtggcaggcctgagggtaagtggccggctatcacccggaagacgcaggtggtactggatgccgtgaaagcttctattgacaagggatctgaaccacttgaggttgccagctaaatacaacaaatgccagctccttgtgctaggtttgtacttaatggcttctactcgtatttgctgtcgcgcaaatgaaggtagtaattgtaatactgtcacgtaaattgaaactggtaattgtaataatcttaaggaatctggtcaaattgaggagaacatttttacagttc

SEQ ID NO: 10055 - protein, 370 aa, Zea mays subsp. mays
  peptide (1)..(370): Ceres Seq. ID no. 12356827
  misc_feature (151)..(263): Pfam Name: Oxidoreductase family, C-terminal alpha/beta domain Pfam Description: Oxidoreductase family, C-terminal alpha/beta
  misc_feature (1)..(325): Homolog of NCBI NO: 37534168 NR Description: putative oxidoreductase [Oryza sativa (japonica group)] >gi|21671919|gb|AAM74281.1| Putative oxidoreductase
  misc_feature (16)..(369): Homolog of NCBI NO: 15233990 NR Description: AX110P -like protein; protein id: At4g09670.1, by cDNA: 19582. [Arabidopsis thaliana] >gi|7485600|pir||T04014
  misc_feature (16)..(359): Homolog of NCBI NO: 7488933 NR Description: protein AX110P - carrot
  misc_feature (37)..(369): Homolog of NCBI NO: 21954073 NR Description: putative AX110P protein [Arabidopsis thaliana]
  misc_feature (16)..(366): Homolog of NCBI NO: 18399170 NR Description: expressed protein; protein id: At1g34200.1, by cDNA: gi_13605868 [Arabidopsis thaliana] F23M19.12/F23M19.12 [Arabidopsis thaliana]
  misc_feature (16)..(366): Homolog of NCBI NO: 25518452 NR Description: hypothetical protein F23M19.12 [imported] - thaliana >gi|5091625|gb|AAD39613.1|AC007454_12 Similar to
  misc_feature (14)..(364): Homolog of NCBI NO: 15218937 NR Description: oxidoreductase, putative; protein id: At1g66130.1 thaliana] >gi|25404587|pir||A96686 probable oxidoreductase
  misc_feature (1)..(366): Homolog of NCBI NO: 17549134 NR Description: CONSERVED HYPOTHETICAL PROTEIN [Ralstonia >gi|17431385|emb|CAD18064.1| CONSERVED HYPOTHETICAL PROTEIN
  misc_feature (17)..(358): Homolog of NCBI NO: 32474689 NR Description: putative oxidoreductase [Pirellula sp.]
  misc_feature (16)..(279): Homolog of NCBI NO: 15616405 NR Description: oxidoreductase [Bacillus halodurans]
MSSPAAPVQPPAPRAVRFGVLGCADIARKISRAMLMLPPGAATIAAVGSRSDDKARRFISEIGFPAARVHGSYESLLEDPDVEAVYLPLPTSLHVPWATAVAARGKHLLLEKPTALCTAELDAILSACDASGVQFMDTTMWIHNPRTAKMREIVSDKDAFGDVRVINSMCSFRASEEFLKNDIRVKPDLDALGVLGDVGWYCILSILWAVDYELPETVIAHRHPVKNQAGVLLACGATLYWADGKTANFNCSFLANLAFDVTVYGTNGTLHVTDLVIPYEESSAEFSVASKSSFVKPTIGWDPLPEKHVVTTDLPQEALMIQEFTRLVQNVRAGGRPEGKWPAITRKTQVVLDAVKASIDKGSEPLEVAS

SEQ ID NO: 10056 - protein, 337 aa, Zea mays subsp. mays
  peptide (1)..(337): Ceres Seq. ID no. 12356828
  misc_feature (118)..(230): Pfam Name: Oxidoreductase family, C-terminal alpha/beta domain Pfam Description: Oxidoreductase family, C-terminal alpha/beta
  misc_feature (1)..(292): Homolog of NCBI NO: 37534168 NR Description: putative oxidoreductase [Oryza sativa (japonica group)] >gi|21671919|gb|AAM74281.1| Putative oxidoreductase
  misc_feature (1)..(336): Homolog of NCBI NO: 15233990 NR Description: AX110P -like protein; protein id: At4g09670.1, by cDNA: 19582. [Arabidopsis thaliana] >gi|7485600|pir||T04014
  misc_feature (1)..(326): Homolog of NCBI NO: 7488933 NR Description: protein AX110P - carrot
  misc_feature (4)..(336): Homolog of NCBI NO: 21954073 NR Description: putative AX110P protein [Arabidopsis thaliana]
  misc_feature (1)..(333): Homolog of NCBI NO: 18399170 NR Description: expressed protein; protein id: At1g34200.1, by cDNA: gi_13605868 [Arabidopsis thaliana] F23M19.12/F23M19.12 [Arabidopsis thaliana]
  misc_feature (1)..(333): Homolog of NCBI NO: 25518452 NR Description: hypothetical protein F23M19.12 [imported] - thaliana >gi|5091625|gb|AAD39613.1|AC007454_12 Similar to
  misc_feature (1)..(331): Homolog of NCBI NO: 15218937 NR Description: oxidoreductase, putative; protein id: At1g66130.1 thaliana] >gi|25404587|pir||A96686 probable oxidoreductase
  misc_feature (1)..(333): Homolog of NCBI NO: 17549134 NR Description: CONSERVED HYPOTHETICAL PROTEIN [Ralstonia >gi|17431385|emb|CAD18064.1| CONSERVED HYPOTHETICAL PROTEIN
  misc_feature (1)..(325): Homolog of NCBI NO: 32474689 NR Description: putative oxidoreductase [Pirellula sp.]
  misc_feature (1)..(246): Homolog of NCBI NO: 15616405 NR Description: oxidoreductase [Bacillus halodurans]
MLMLPPGAATIAAVGSRSDDKARRFISEIGFPAARVHGSYESLLEDPDVEAVYLPLPTSLHVPWATAVAARGKHLLLEKPTALCTAELDAILSACDASGVQFMDTTMWIHNPRTAKMREIVSDKDAFGDVRVINSMCSFRASEEFLKNDIRVKPDLDALGVLGDVGWYCILSILWAVDYELPETVIAHRHPVKNQAGVLLACGATLYWADGKTANFNCSFLANLAFDVTVYGTNGTLHVTDLVIPYEESSAEFSVASKSSFVKPTIGWDPLPEKHVVTTDLPQEALMIQEFTRLVQNVRAGGRPEGKWPAITRKTQVVLDAVKASIDKGSEPLEVAS

SEQ ID NO: 10057 - protein, 335 aa, Zea mays subsp. mays
  peptide (1)..(335): Ceres Seq. ID no. 12356829
  misc_feature (116)..(228): Pfam Name: Oxidoreductase family, C-terminal alpha/beta domain Pfam Description: Oxidoreductase family, C-terminal alpha/beta
  misc_feature (1)..(290): Homolog of NCBI NO: 37534168 NR Description: putative oxidoreductase [Oryza sativa (japonica group)] >gi|21671919|gb|AAM74281.1| Putative oxidoreductase
  misc_feature (1)..(334): Homolog of NCBI NO: 15233990 NR Description: AX110P -like protein; protein id: At4g09670.1, by cDNA: 19582. [Arabidopsis thaliana] >gi|7485600|pir||T04014
  misc_feature (1)..(324): Homolog of NCBI NO: 7488933 NR Description: protein AX110P - carrot
  misc_feature (2)..(334): Homolog of NCBI NO: 21954073 NR Description: putative AX110P protein [Arabidopsis thaliana]
  misc_feature (1)..(331): Homolog of NCBI NO: 18399170 NR Description: expressed protein; protein id: At1g34200.1, by cDNA: gi_13605868 [Arabidopsis thaliana] F23M19.12/F23M19.12 [Arabidopsis thaliana]
  misc_feature (1)..(331): Homolog of NCBI NO: 25518452 NR Description: hypothetical protein F23M19.12 [imported] - thaliana >gi|5091625|gb|AAD39613.1|AC007454_12 Similar to
  misc_feature (1)..(329): Homolog of NCBI NO: 15218937 NR Description: oxidoreductase, putative; protein id: At1g66130.1 thaliana] >gi|25404587|pir||A96686 probable oxidoreductase
  misc_feature (1)..(331): Homolog of NCBI NO: 17549134 NR Description: CONSERVED HYPOTHETICAL PROTEIN [Ralstonia >gi|17431385|emb|CAD18064.1| CONSERVED HYPOTHETICAL PROTEIN
  misc_feature (1)..(323): Homolog of NCBI NO: 32474689 NR Description: putative oxidoreductase [Pirellula sp.]
  misc_feature (1)..(244): Homolog of NCBI NO: 15616405 NR Description: oxidoreductase [Bacillus halodurans]
MLPPGAATIAAVGSRSDDKARRFISEIGFPAARVHGSYESLLEDPDVEAVYLPLPTSLHVPWATAVAARGKHLLLEKPTALCTAELDAILSACDASGVQFMDTTMWIHNPRTAKMREIVSDKDAFGDVRVINSMCSFRASEEFLKNDIRVKPDLDALGVLGDVGWYCILSILWAVDYELPETVIAHRHPVKNQAGVLLACGATLYWADGKTANFNCSFLANLAFDVTVYGTNGTLHVTDLVIPYEESSAEFSVASKSSFVKPTIGWDPLPEKHVVTTDLPQEALMIQEFTRLVQNVRAGGRPEGKWPAITRKTQVVLDAVKASIDKGSEPLEVAS

SEQ ID NO: 10058 - DNA, 1015 bp, Zea mays subsp. mays
  misc_feature (1)..(1015): Ceres Seq. ID no. 12354274
  misc_feature: MA Experiment ID: 108535 Result: Down-regulated in Transcription
  misc_feature: MA Experiment 108535 PARAMETER Experiment Name: Zm_Meristem_P Parameter: Age (day) Value: 8
  misc_feature: MA Experiment 108535 PARAMETER Experiment Name: Zm_Meristem_P Parameter: Organism Value: Zea mays
  misc_feature: MA Experiment 108535 PARAMETER Experiment Name: Zm_Meristem_P Parameter: Plant Line Value: 35A19
  misc_feature: MA Experiment 108535 PARAMETER Experiment Name: Zm_Meristem_P Parameter: Tissue Value: Root Meristem vs. Above Root Meristem
  misc_feature: MA Experiment ID: 108536 Result: Down-regulated in Transcription
  misc_feature: MA Experiment 108536 PARAMETER Experiment Name: Zm_Meristem_P Parameter: Age (day) Value: 8
  misc_feature: MA Experiment 108536 PARAMETER Experiment Name: Zm_Meristem_P Parameter: Organism Value: Zea mays
  misc_feature: MA Experiment 108536 PARAMETER Experiment Name: Zm_Meristem_P Parameter: Plant Line Value: 35A19
  misc_feature: MA Experiment 108536 PARAMETER Experiment Name: Zm_Meristem_P Parameter: Tissue Value: Shoot Meristem vs. Above Shoot Meristem
  misc_feature: MA Experiment ID: 108543 Result: Up-regulated in Transcription
  misc_feature: MA Experiment ID: 108556 Result: Down-regulated in Transcription
  misc_feature: MA Experiment 108556 PARAMETER Experiment Name: Zm_Drought_P Parameter: Age (day) Value: 9
  misc_feature: MA Experiment 108556 PARAMETER Experiment Name: Zm_Drought_P Parameter: Organism Value: Zea mays
  misc_feature: MA Experiment 108556 PARAMETER Experiment Name: Zm_Drought_P Parameter: Plant Line Value: 35A19
  misc_feature: MA Experiment 108556 PARAMETER Experiment Name: Zm_Drought_P Parameter: Timepoint (hr) Value: 24
  misc_feature: MA Experiment 108556 PARAMETER Experiment Name: Zm_Drought_P Parameter: Tissue Value: Aerial
  misc_feature: MA Experiment 108556 PARAMETER Experiment Name: Zm_Drought_P Parameter: Treatment Value: Drought vs. No Drought
  misc_feature: MA Experiment ID: 20000108 Result: Down-regulated in Transcription
  misc_feature: MA Experiment 20000108 PARAMETER Experiment Name: Zm_Root-Tips_P Parameter: Age (day) Value: 12
  misc_feature: MA Experiment 20000108 PARAMETER Experiment Name: Zm_Root-Tips_P Parameter: Organism Value: Zea mays
  misc_feature: MA Experiment 20000108 PARAMETER Experiment Name: Zm_Root-Tips_P Parameter: Tissue Value: Root tips vs. Root mid region    35
  misc_feature: MA Experiment 20000108 PARAMETER Experiment Name: Zm_Root-Tips_P Parameter: Tissue Value: Root tips vs. Root mid region   Sequence Listing-Misc Features (4)
  misc_feature: MA Experiment ID: 20000478 Result: Down-regulated in Transcription
  misc_feature: MA Experiment 20000478 PARAMETER Experiment Name: Zm_5mM_SA_P Parameter: Age (day) Value: 11
  misc_feature: MA Experiment 20000478 PARAMETER Experiment Name: Zm_5mM_SA_P Parameter: Organism Value: Zea mays
  misc_feature: MA Experiment 20000478 PARAMETER Experiment Name: Zm_5mM_SA_P Parameter: Plant Line Value: 35A19
  misc_feature: MA Experiment 20000478 PARAMETER Experiment Name: Zm_5mM_SA_P Parameter: Timepoint (hr) Value: 72
  misc_feature: MA Experiment 20000478 PARAMETER Experiment Name: Zm_5mM_SA_P Parameter: Tissue Value: Aerial
  misc_feature: MA Experiment 20000478 PARAMETER Experiment Name: Zm_5mM_SA_P Parameter: Treatment Value: 5mM SA vs. No Treatment
  misc_feature: MA Experiment ID: 20000479 Result: Down-regulated in Transcription
  misc_feature: MA Experiment 20000479 PARAMETER Experiment Name: Zm_Drought_P Parameter: Age (day) Value: 10
  misc_feature: MA Experiment 20000479 PARAMETER Experiment Name: Zm_Drought_P Parameter: Organism Value: Zea mays
  misc_feature: MA Experiment 20000479 PARAMETER Experiment Name: Zm_Drought_P Parameter: Plant Line Value: 35A19
  misc_feature: MA Experiment 20000479 PARAMETER Experiment Name: Zm_Drought_P Parameter: Timepoint (hr) Value: 48
  misc_feature: MA Experiment 20000479 PARAMETER Experiment Name: Zm_Drought_P Parameter: Tissue Value: Aerial
  misc_feature: MA Experiment 20000479 PARAMETER Experiment Name: Zm_Drought_P Parameter: Treatment Value: Drought vs. No Drought
  misc_feature: MA Experiment ID: 20000480 Result: Down-regulated in Transcription
  misc_feature: MA Experiment 20000480 PARAMETER Experiment Name: Zm_Drought_P Parameter: Age (day) Value: 11
  misc_feature: MA Experiment 20000480 PARAMETER Experiment Name: Zm_Drought_P Parameter: Organism Value: Zea mays
  misc_feature: MA Experiment 20000480 PARAMETER Experiment Name: Zm_Drought_P Parameter: Plant Line Value: 35A19
  misc_feature: MA Experiment 20000480 PARAMETER Experiment Name: Zm_Drought_P Parameter: Timepoint (hr) Value: 72
  misc_feature: MA Experiment 20000480 PARAMETER Experiment Name: Zm_Drought_P Parameter: Tissue Value: Aerial
  misc_feature: MA Experiment 20000480 PARAMETER Experiment Name: Zm_Drought_P Parameter: Treatment Value: Drought vs. No Drought
  misc_feature: MA Experiment ID: 20000492 Result: Up-regulated in Transcription
  misc_feature: MA Experiment 20000492 PARAMETER Experiment Name: Zm_Hybrid_Seed_Dev_P Parameter: DAP Value: 12
  misc_feature: MA Experiment 20000492 PARAMETER Experiment Name: Zm_Hybrid_Seed_Dev_P Parameter: Organism Value: Zea mays
  misc_feature: MA Experiment 20000492 PARAMETER Experiment Name: Zm_Hybrid_Seed_Dev_P Parameter: Plant Line Value: 35A19
  misc_feature: MA Experiment 20000492 PARAMETER Experiment Name: Zm_Hybrid_Seed_Dev_P Parameter: Tissue Value: Fert Kernel vs. Unfert Floret
  misc_feature: MA Experiment ID: 20000534 Result: Down-regulated in Transcription
  misc_feature: MA Experiment 20000534 PARAMETER Experiment Name: Zm_Hybrid_Pollen_P Parameter: Age (day) Value: 8
  misc_feature: MA Experiment 20000534 PARAMETER Experiment Name: Zm_Hybrid_Pollen_P Parameter: Organism Value: Zea mays
  misc_feature: MA Experiment 20000534 PARAMETER Experiment Name: Zm_Hybrid_Pollen_P Parameter: Plant Line Value: 35A19
  misc_feature: MA Experiment 20000534 PARAMETER Experiment Name: Zm_Hybrid_Pollen_P Parameter: Tissue Value: Pollen vs. Aerial
attggaagccaccagcaagagaccaacagcaagggtgcgaagaaagggtggccccctagctagcctagctagagagagagagagtcatcataatactcagagagaagcacgagcacagctgcactagctagctactgcaaagaagcaagctctcgatcacaatggccgccattccttctctgctgcgtcgtcgactcgccattgtcatcgccaccaccgccatgctcgtcctgcttccctccccgtccgtcgccggcgaccccgacctgctccaggacatctgcgtcgcggacctcacgtccaccgtgaaggtgaacgggtacgcctgcaaggcggcggcggcggtgacggcggacgacttctacttcagcggcctaggcggcgcgggcaacacgagcgccagcgcctacggctccgcggtgacgggcgcgaacgtggagaaggtgccggggctgaacacgctgggcgtgtccatgtcgcgcatcgactacgcgccgggcgggggcctgaacccgccgcacacgcacccgcgcgccaccgagatggtgttcgtgctgcagggcaccctggacgtgggcttcgtcaccgccgccaacaaccgcctggtggcccgcaccctggcgcccggcgacgtgttcgtcttcccgcgcggcctcgtccacttccagcgcaacgccggcgacggccccgccgccgtcttgtccgcgttcaacagccagcttcccggcacgcagtccctcgccgccgcgctgttcgcggcgtcgcccgagctgcccgacgccgtgctcgccaaggcgttccaggtcggcaccaaggaggtggacaagatcaaggctaggctcgcgcccaaaaaggcctgaaggtcgtactgtttacgcggtcatccttgaatattttttttcccagattatgatttatgacttggttgctaccctgctgtacctccactaataagcaactgtctctgctagtctgctgcatgccttttatctgttatgtatgattcttcagctcc

SEQ ID NO: 10059 - protein, 232 aa, Zea mays subsp. mays
  peptide (1)..(232): Ceres Seq. ID no. 12354275
  misc_feature (73)..(221): Pfam Name: Cupin Pfam Description: Cupin
  misc_feature (13)..(231): Homolog of NCBI NO: 34904670 NR Description: putative germin protein [Oryza sativa (japonica group)] >gi|5042461|gb|AAD38298.1| putative oxalate oxidase
  misc_feature (15)..(226): Homolog of NCBI NO: 34902528 NR Description: probable germin protein 4 [Oryza sativa (japonica
  misc_feature (30)..(231): Homolog of NCBI NO: 1934730 NR Description: germin-like protein [Arabidopsis thaliana]
  misc_feature (30)..(231): Homolog of NCBI NO: 15228673 NR Description: germin-like protein (GLP10); protein id:
  misc_feature (7)..(231): Homolog of NCBI NO: 18202917 NR Description: Germin-like protein subfamily 2 member 2 precursor
  misc_feature (15)..(231): Homolog of NCBI NO: 18203442 NR Description: Rhicadhesin receptor precursor (Germin-like
  misc_feature (18)..(231): Homolog of NCBI NO: 15217561 NR Description: germin-like protein; protein id: At1g09560.1, by cDNA: gi_11908055, supported by cDNA: gi_12642871, supported cDNA: gi_13265455, supported by cDNA: gi_1755159, supported by
  misc_feature (14)..(231): Homolog of NCBI NO: 7447341 NR Description: germin homolog - potato
  misc_feature (7)..(231): Homolog of NCBI NO: 26449711 NR Description: putative germin [Arabidopsis thaliana]
  misc_feature (14)..(231): Homolog of NCBI NO: 34906612 NR Description: germin(oxalate oxidase)-like protein [Oryza
MAAIPSLLRRRLAIVIATTAMLVLLPSPSVAGDPDLLQDICVADLTSTVKVNGYACKAAAAVTADDFYFSGLGGAGNTSASAYGSAVTGANVEKVPGLNTLGVSMSRIDYAPGGGLNPPHTHPRATEMVFVLQGTLDVGFVTAANNRLVARTLAPGDVFVFPRGLVHFQRNAGDGPAAVLSAFNSQLPGTQSLAAALFAASPELPDAVLAKAFQVGTKEVDKIKARLAPKKA

SEQ ID NO: 10060 - protein, 212 aa, Zea mays subsp. mays
  peptide (1)..(212): Ceres Seq. ID no. 12354276
  misc_feature (53)..(201): Pfam Name: Cupin Pfam Description: Cupin
  misc_feature (1)..(211): Homolog of NCBI NO: 34904670 NR Description: putative germin protein [Oryza sativa (japonica group)] >gi|5042461|gb|AAD38298.1| putative oxalate oxidase
  misc_feature (1)..(206): Homolog of NCBI NO: 34902528 NR Description: probable germin protein 4 [Oryza sativa (japonica
  misc_feature (10)..(211): Homolog of NCBI NO: 1934730 NR Description: germin-like protein [Arabidopsis thaliana]
  misc_feature (10)..(211): Homolog of NCBI NO: 15228673 NR Description: germin-like protein (GLP10); protein id:
  misc_feature (1)..(211): Homolog of NCBI NO: 18202917 NR Description: Germin-like protein subfamily 2 member 2 precursor
  misc_feature (1)..(211): Homolog of NCBI NO: 18203442 NR Description: Rhicadhesin receptor precursor (Germin-like
  misc_feature (1)..(211): Homolog of NCBI NO: 15217561 NR Description: germin-like protein; protein id: At1g09560.1, by cDNA: gi_11908055, supported by cDNA: gi_12642871, supported cDNA: gi_13265455, supported by cDNA: gi_1755159, supported by
  misc_feature (1)..(211): Homolog of NCBI NO: 7447341 NR Description: germin homolog - potato
  misc_feature (1)..(211): Homolog of NCBI NO: 26449711 NR Description: putative germin [Arabidopsis thaliana]
  misc_feature (1)..(211): Homolog of NCBI NO: 34906612 NR Description: germin(oxalate oxidase)-like protein [Oryza
MLVLLPSPSVAGDPDLLQDICVADLTSTVKVNGYACKAAAAVTADDFYFSGLGGAGNTSASAYGSAVTGANVEKVPGLNTLGVSMSRIDYAPGGGLNPPHTHPRATEMVFVLQGTLDVGFVTAANNRLVARTLAPGDVFVFPRGLVHFQRNAGDGPAAVLSAFNSQLPGTQSLAAALFAASPELPDAVLAKAFQVGTKEVDKIKARLAPKKA

SEQ ID NO: 10061 - protein, 128 aa, Zea mays subsp. mays
  peptide (1)..(128): Ceres Seq. ID no. 12354277
  misc_feature (1)..(117): Pfam Name: Cupin Pfam Description: Cupin
  misc_feature (1)..(127): Homolog of NCBI NO: 34904670 NR Description: putative germin protein [Oryza sativa (japonica group)] >gi|5042461|gb|AAD38298.1| putative oxalate oxidase
  misc_feature (1)..(122): Homolog of NCBI NO: 34902528 NR Description: probable germin protein 4 [Oryza sativa (japonica
  misc_feature (1)..(127): Homolog of NCBI NO: 1934730 NR Description: germin-like protein [Arabidopsis thaliana]
  misc_feature (1)..(127): Homolog of NCBI NO: 15228673 NR Description: germin-like protein (GLP10); protein id:
  misc_feature (1)..(127): Homolog of NCBI NO: 18202917 NR Description: Germin-like protein subfamily 2 member 2 precursor
  misc_feature (1)..(127): Homolog of NCBI NO: 18203442 NR Description: Rhicadhesin receptor precursor (Germin-like
  misc_feature (1)..(127): Homolog of NCBI NO: 15217561 NR Description: germin-like protein; protein id: At1g09560.1, by cDNA: gi_11908055, supported by cDNA: gi_12642871, supported cDNA: gi_13265455, supported by cDNA: gi_1755159, supported by
  misc_feature (1)..(127): Homolog of NCBI NO: 7447341 NR Description: germin homolog - potato
  misc_feature (1)..(127): Homolog of NCBI NO: 26449711 NR Description: putative germin [Arabidopsis thaliana]
  misc_feature (1)..(127): Homolog of NCBI NO: 34906612 NR Description: germin(oxalate oxidase)-like protein [Oryza
MSRIDYAPGGGLNPPHTHPRATEMVFVLQGTLDVGFVTAANNRLVARTLAPGDVFVFPRGLVHFQRNAGDGPAAVLSAFNSQLPGTQSLAAALFAASPELPDAVLAKAFQVGTKEVDKIKARLAPKKA

SEQ ID NO: 10062 - DNA, 1689 bp, Zea mays subsp. mays
  misc_feature (1)..(1689): Ceres Seq. ID no. 12413652
  misc_feature: MA Experiment ID: 108522 Result: Down-regulated in Transcription
  misc_feature: MA Experiment 108522 PARAMETER Experiment Name: Zm_42deg_Heat_P Parameter: Age (day) Value: 8
  misc_feature: MA Experiment 108522 PARAMETER Experiment Name: Zm_42deg_Heat_P Parameter: Organism Value: Zea mays
  misc_feature: MA Experiment 108522 PARAMETER Experiment Name: Zm_42deg_Heat_P Parameter: Plant Line Value: 35A19
  misc_feature: MA Experiment 108522 PARAMETER Experiment Name: Zm_42deg_Heat_P Parameter: Temperature (deg C) Value: 42 vs. 22
  misc_feature: MA Experiment 108522 PARAMETER Experiment Name: Zm_42deg_Heat_P Parameter: Timepoint (hr) Value: 1
  misc_feature: MA Experiment 108522 PARAMETER Experiment Name: Zm_42deg_Heat_P Parameter: Tissue Value: Aerial
  misc_feature: MA Experiment ID: 108523 Result: Down-regulated in Transcription
  misc_feature: MA Experiment 108523 PARAMETER Experiment Name: Zm_42deg_Heat_P Parameter: Age (day) Value: 8
  misc_feature: MA Experiment 108523 PARAMETER Experiment Name: Zm_42deg_Heat_P Parameter: Organism Value: Zea mays
  misc_feature: MA Experiment 108523 PARAMETER Experiment Name: Zm_42deg_Heat_P Parameter: Plant Line Value: 35A19
  misc_feature: MA Experiment 108523 PARAMETER Experiment Name: Zm_42deg_Heat_P Parameter: Temperature (deg C) Value: 42 vs. 22
  misc_feature: MA Experiment 108523 PARAMETER Experiment Name: Zm_42deg_Heat_P Parameter: Timepoint (hr) Value: 6
  misc_feature: MA Experiment 108523 PARAMETER Experiment Name: Zm_42deg_Heat_P Parameter: Tissue Value: Aerial
  misc_feature: MA Experiment ID: 108527 Result: Down-regulated in Transcription
  misc_feature: MA Experiment 108527 PARAMETER Experiment Name: Zm_5mM_NO_P Parameter: Age (day) Value: 8
  misc_feature: MA Experiment 108527 PARAMETER Experiment Name: Zm_5mM_NO_P Parameter: Organism Value: Zea mays
  misc_feature: MA Experiment 108527 PARAMETER Experiment Name: Zm_5mM_NO_P Parameter: Plant Line Value: 35A19
  misc_feature: MA Experiment 108527 PARAMETER Experiment Name: Zm_5mM_NO_P Parameter: Timepoint (hr) Value: 6
  misc_feature: MA Experiment 108527 PARAMETER Experiment Name: Zm_5mM_NO_P Parameter: Tissue Value: Aerial
  misc_feature: MA Experiment 108527 PARAMETER Experiment Name: Zm_5mM_NO_P Parameter: Treatment Value: 5mM NO vs. No Treatment
  misc_feature: MA Experiment ID: 108529 Result: Up-regulated in Transcription
  misc_feature: MA Experiment 108529 PARAMETER Experiment Name: Zm_Imbibed_Seeds_P Parameter: Age (day) Value: 5 vs. 2
  misc_feature: MA Experiment 108529 PARAMETER Experiment Name: Zm_Imbibed_Seeds_P Parameter: Organism Value: Zea mays
  misc_feature: MA Experiment 108529 PARAMETER Experiment Name: Zm_Imbibed_Seeds_P Parameter: Plant Line Value: 35A19
  misc_feature: MA Experiment 108529 PARAMETER Experiment Name: Zm_Imbibed_Seeds_P Parameter: Tissue Value: Roots vs. Embryo
  misc_feature: MA Experiment ID: 108530 Result: Up-regulated in Transcription
  misc_feature: MA Experiment 108530 PARAMETER Experiment Name: Zm_Imbibed_Seeds_P Parameter: Age (day) Value: 6 vs. 2
  misc_feature: MA Experiment 108530 PARAMETER Experiment Name: Zm_Imbibed_Seeds_P Parameter: Organism Value: Zea mays
  misc_feature: MA Experiment 108530 PARAMETER Experiment Name: Zm_Imbibed_Seeds_P Parameter: Plant Line Value: 35A19
  misc_feature: MA Experiment 108530 PARAMETER Experiment Name: Zm_Imbibed_Seeds_P Parameter: Tissue Value: Aerial vs. Embryo
  misc_feature: MA Experiment ID: 108543 Result: Down-regulated in Transcription
  misc_feature: MA Experiment ID: 20000488 Result: Down-regulated in Transcription
  misc_feature: MA Experiment 20000488 PARAMETER Experiment Name: Zm_50mM_NH4NO3_L_to_H_P Parameter: Organism Value: Zea mays
  misc_feature: MA Experiment 20000488 PARAMETER Experiment Name: Zm_50mM_NH4NO3_L_to_H_P Parameter: Timepoint (hr) Value: 8
  misc_feature: MA Experiment 20000488 PARAMETER Experiment Name: Zm_50mM_NH4NO3_L_to_H_P Parameter: Tissue Value: Leaves
  misc_feature: MA Experiment 20000488 PARAMETER Experiment Name: Zm_50mM_NH4NO3_L_to_H_P Parameter: Treatment Value: 50mM NH4NO3 vs. 100mM Mannitol
  misc_feature: MA Experiment ID: 20000492 Result: Down-regulated in Transcription
  misc_feature: MA Experiment 20000492 PARAMETER Experiment Name: Zm_Hybrid_Seed_Dev_P Parameter: DAP Value: 12
  misc_feature: MA Experiment 20000492 PARAMETER Experiment Name: Zm_Hybrid_Seed_Dev_P Parameter: Organism Value: Zea mays
  misc_feature: MA Experiment 20000492 PARAMETER Experiment Name: Zm_Hybrid_Seed_Dev_P Parameter: Plant Line Value: 35A19
  misc_feature: MA Experiment 20000492 PARAMETER Experiment Name: Zm_Hybrid_Seed_Dev_P Parameter: Tissue Value: Fert Kernel vs. Unfert Floret
  misc_feature: MA Experiment ID: 20000535 Result: Down-regulated in Transcription
  misc_feature: MA Experiment 20000535 PARAMETER Experiment Name: Zm_Hybrid_Seed_Dev_P Parameter: DAP Value: 30 vs. 12
  misc_feature: MA Experiment 20000535 PARAMETER Experiment Name: Zm_Hybrid_Seed_Dev_P Parameter: Organism Value: Zea mays
  misc_feature: MA Experiment 20000535 PARAMETER Experiment Name: Zm_Hybrid_Seed_Dev_P Parameter: Plant Line Value: 35A19
  misc_feature: MA Experiment 20000535 PARAMETER Experiment Name: Zm_Hybrid_Seed_Dev_P Parameter: Tissue Value: Embryo vs. Unfert Floret
  misc_feature: MA Experiment ID: 20001614 Result: Down-regulated in Transcription
  misc_feature: MA Experiment 20001614 PARAMETER Experiment Name: Zm_50ppm_KNO3_L-to-H_P Parameter: Age (day) Value: 21
  misc_feature: MA Experiment 20001614 PARAMETER Experiment Name: Zm_50ppm_KNO3_L-to-H_P Parameter: Organism Value: Zea mays
  misc_feature: MA Experiment 20001614 PARAMETER Experiment Name: Zm_50ppm_KNO3_L-to-H_P Parameter: Plant Line Value: 35A19
  misc_feature: MA Experiment 20001614 PARAMETER Experiment Name: Zm_50ppm_KNO3_L-to-H_P Parameter: Timepoint (hr) Value: 48
  misc_feature: MA Experiment 20001614 PARAMETER Experiment Name: Zm_50ppm_KNO3_L-to-H_P Parameter: Tissue Value: Roots
  misc_feature: MA Experiment 20001614 PARAMETER Experiment Name: Zm_50ppm_KNO3_L-to-H_P Parameter: Treatment Value: 50ppm KNO3 vs. 50ppm KCl
atcactgattctgattctgattccagccaccctgaccggcgaagcgcggctgacatttcccccccaccataccgccaccacctgagaagagatcgatccaatcagattaaccaattagcagggagggaggagaggggcaaaggcaatggccgggacggaggtggaggacccgccggcggcggcgttggaggtgcccgcgaaacgcggccttctgcggtacaactcgccgctggcgcaggtgtccctgctgggcctcatctgcttctgctgccccggcatgttcaacgcgctgtcgggcctcggcggcggaggccaggtcgaccccaccatcgccgacaacgccaacaccgcgctctacgcctgcttcgcggtgttcggcgtgctgggcggcgccgcgcacaacctgctgggcccgcgcgcgacgctgctggccggcgcgctcacgtacccgctctacgccggctccttcctctactacaaccaccgcccgggctcgcaggtgttccccgtcacggcgggcgccctgctcggcgccggcgcgggcttcctctgggcggcgcagggcgccgtcatgacgtcgtacccgccgcccaaccgccggggcacctacatctccctcttctggtgcctcttcaacctgggcggcgtcctcggcggcctcctccctttcgccctcaactacaaccgcggggacaagaaagggagcgtcagcgacggcacgtacatcgccttcatggcattcatgctcgtcggcgccgcgctcaccgtgctcgtgctgccgcccgccaggatcgtccgcgacgacggcaccagggccaccagggtcaccttctcctccccggccaccgagggcgccgagatcctcaagctcttcgccaactggaagatgctgctcgcgctgccggccgcctgggccagcaacttcttctacacctaccagttcaacaacgtcaacagcggcctcttcacgctccgcaccaggggcctcaacaacgtcttctactggggcgcgcagatgatcggctccgccggcatcggctacttcctcgacttcggcttcgccagccgccgaaagagggggctgttcggggtcgccgccgtcgccgccgtcggaacggccatctggggaggcggtctggccaaccagctcagctacaaagccgtgccggtggccgaccccatcgatttcaaggacggccaccgctacgccgggcccttcctgctctacttcagctacggactgctggatgccatgttccagagccttatctactggatcatcggcgcactcgccaacgactcccaaatcctcagcaggtacgtcgggttctacaagggagtgcagagtgcaggagcggcggtggcatggcaggtggacaggcgccacacgcccctcatgtcccagctgatcgtcaactgggggctcatgaccatcagctaccccttgcttgcgctgctggtgttcctggccgtgaaggacgagagctactcggtttcgtcggtggaggacggccgggagaaggacagcaagctgtccgcgccgaccagcttccactgatgaagaagaagaaggaggaaggatagaccaagatgcatgtcattgtaacacggtgtttccatccaagtaagttttagtagtagaaatcaagaaacaactggagtacctatacgaagaatatatatataccc

SEQ ID NO: 10063 - protein, 527 aa, Zea mays subsp. mays
  peptide (1)..(527): Ceres Seq. ID no. 12413653
  misc_feature (316)..(375): Homolog of NCBI NO: 38346872 NR Description: OSJNBb0004G23.4 [Oryza sativa (japonica
ITDSDSDSSHPDRRSAADISPPPYRHHLRRDRSNQINQLAGREERGKGNGRDGGGGPAGGGVGGARETRPSAVQLAAGAGVPAGPHLLLLPRHVQRAVGPRRRRPGRPHHRRQRQHRALRLLRGVRRAGRRRAQPAGPARDAAGRRAHVPALRRLLPLLQPPPGLAGVPRHGGRPARRRRGLPLGGAGRRHDVVPAAQPPGHLHLPLLVPLQPGRRPRRPPPFRPQLQPRGQERERQRRHVHRLHGIHARRRRAHRARAAARQDRPRRRHQGHQGHLLLPGHRGRRDPQALRQLEDAARAAGRLGQQLLLHLPVQQRQQRPLHAPHQGPQQRLLLGRADDRLRRHRLLPRLRLRQPPKEGAVRGRRRRRRRNGHLGRRSGQPAQLQSRAGGRPHRFQGRPPLRRALPALLQLRTAGCHVPEPYLLDHRRTRQRLPNPQQVRRVLQGSAECRSGGGMAGGQAPHAPHVPADRQLGAHDHQLPLACAAGVPGREGRELLGFVGGGRPGEGQQAVRADQLPLMKKKKEEG

SEQ ID NO: 10064 - protein, 470 aa, Zea mays subsp. mays
  peptide (1)..(470): Ceres Seq. ID no. 12413654
  misc_feature (17)..(264): Homolog of NCBI NO: 38346872 NR Description: OSJNBb0004G23.4 [Oryza sativa (japonica
  misc_feature (329)..(470): Homolog of NCBI NO: 38346872 NR Description: OSJNBb0004G23.4 [Oryza sativa (japonica
  misc_feature (24)..(447): Homolog of NCBI NO: 18394560 NR Description: Expressed protein; protein id: At1g18000.1, by cDNA: 108615., supported by cDNA: gi_16323168 [Arabidopsis >gi|18394562|ref|NP_564044.1| expressed protein; protein id: come
  misc_feature (24)..(447): Homolog of NCBI NO: 21536696 NR Description: unknown [Arabidopsis thaliana]
  misc_feature (25)..(447): Homolog of NCBI NO: 40745401 NR Description: hypothetical protein AN1427.2 [Aspergillus
  misc_feature (25)..(445): Homolog of NCBI NO: 38110995 NR Description: hypothetical protein MG06605.4 [Magnaporthe
  misc_feature (2)..(464): Homolog of NCBI NO: 40740559 NR Description: hypothetical protein AN8127.2 [Aspergillus
  misc_feature (23)..(455): Homolog of NCBI NO: 19115917 NR Description: hypothetical protein [Schizosaccharomyces pombe]
  misc_feature (14)..(423): Homolog of NCBI NO: 19114809 NR Description: hypothetical protein [Schizosaccharomyces pombe]
  misc_feature (8)..(444): Homolog of NCBI NO: 40743917 NR Description: hypothetical protein AN2699.2 [Aspergillus
MAGTEVEDPPAAALEVPAKRGLLRYNSPLAQVSLLGLICFCCPGMFNALSGLGGGGQVDPTIADNANTALYACFAVFGVLGGAAHNLLGPRATLLAGALTYPLYAGSFLYYNHRPGSQVFPVTAGALLGAGAGFLWAAQGAVMTSYPPPNRRGTYISLFWCLFNLGGVLGGLLPFALNYNRGDKKGSVSDGTYIAFMAFMLVGAALTVLVLPPARIVRDDGTRATRVTFSSPATEGAEILKLFANWKMLLALPAAWASNFFYTYQFNNVNSGLFTLRTRGLNNVFYWGAQMIGSAGIGYFLDFGFASRRKRGLFGVAAVAAVGTAIWGGGLANQLSYKAVPVADPIDFKDGHRYAGPFLLYFSYGLLDAMFQSLIYWIIGALANDSQILSRYVGFYKGVQSAGAAVAWQVDRRHTPLMSQLIVNWGLMTISYPLLALLVFLAVKDESYSVSSVEDGREKDSKLSAPTSFH

SEQ ID NO: 10065 - protein, 426 aa, Zea mays subsp. mays
  peptide (1)..(426): Ceres Seq. ID no. 12413655
  misc_feature (1)..(220): Homolog of NCBI NO: 38346872 NR Description: OSJNBb0004G23.4 [Oryza sativa (japonica
  misc_feature (285)..(426): Homolog of NCBI NO: 38346872 NR Description: OSJNBb0004G23.4 [Oryza sativa (japonica
  misc_feature (1)..(403): Homolog of NCBI NO: 18394560 NR Description: Expressed protein; protein id: At1g18000.1, by cDNA: 108615., supported by cDNA: gi_16323168 [Arabidopsis >gi|18394562|ref|NP_564044.1| expressed protein; protein id: come
  misc_feature (1)..(403): Homolog of NCBI NO: 21536696 NR Description: unknown [Arabidopsis thaliana]
  misc_feature (1)..(403): Homolog of NCBI NO: 40745401 NR Description: hypothetical protein AN1427.2 [Aspergillus
  misc_feature (1)..(401): Homolog of NCBI NO: 38110995 NR Description: hypothetical protein MG06605.4 [Magnaporthe
  misc_feature (1)..(420): Homolog of NCBI NO: 40740559 NR Description: hypothetical protein AN8127.2 [Aspergillus
  misc_feature (1)..(411): Homolog of NCBI NO: 19115917 NR Description: hypothetical protein [Schizosaccharomyces pombe]
  misc_feature (1)..(379): Homolog of NCBI NO: 19114809 NR Description: hypothetical protein [Schizosaccharomyces pombe]
  misc_feature (1)..(400): Homolog of NCBI NO: 40743917 NR Description: hypothetical protein AN2699.2 [Aspergillus
MFNALSGLGGGGQVDPTIADNANTALYACFAVFGVLGGAAHNLLGPRATLLAGALTYPLYAGSFLYYNHRPGSQVFPVTAGALLGAGAGFLWAAQGAVMTSYPPPNRRGTYISLFWCLFNLGGVLGGLLPFALNYNRGDKKGSVSDGTYIAFMAFMLVGAALTVLVLPPARIVRDDGTRATRVTFSSPATEGAEILKLFANWKMLLALPAAWASNFFYTYQFNNVNSGLFTLRTRGLNNVFYWGAQMIGSAGIGYFLDFGFASRRKRGLFGVAAVAAVGTAIWGGGLANQLSYKAVPVADPIDFKDGHRYAGPFLLYFSYGLLDAMFQSLIYWIIGALANDSQILSRYVGFYKGVQSAGAAVAWQVDRRHTPLMSQLIVNWGLMTISYPLLALLVFLAVKDESYSVSSVEDGREKDSKLSAPTSFH

SEQ ID NO: 10066 - DNA, 1326 bp, Zea mays subsp. mays
  misc_feature (1)..(1326): Ceres Seq. ID no. 12566342
  misc_feature: MA Experiment ID: 20000534 Result: Down-regulated in Transcription
  misc_feature: MA Experiment 20000534 PARAMETER Experiment Name: Zm_Hybrid_Pollen_P Parameter: Age (day) Value: 8
  misc_feature: MA Experiment 20000534 PARAMETER Experiment Name: Zm_Hybrid_Pollen_P Parameter: Organism Value: Zea mays
  misc_feature: MA Experiment 20000534 PARAMETER Experiment Name: Zm_Hybrid_Pollen_P Parameter: Plant Line Value: 35A19
  misc_feature: MA Experiment 20000534 PARAMETER Experiment Name: Zm_Hybrid_Pollen_P Parameter: Tissue Value: Pollen vs. Aerial
gcacgagaccattacctagaacatcctaatcgaaaacttccgttacatcccaccatttgctgttcaccttccctcccgtttgcctcctctcgctgtctcgtagcttctttcctccggcgacggctgggcgagcggccgccagtcgggcccttcgtcggcgacgagcatccacctgcgcggcgccccatcttccgctccttcccttactcgcgctcggcacacaggcgacggcggcggcggcgctcaggatcgggctatcaccgacggggtccggcttctccgcccgcctctcgccactcgccactcgcctcgcgtcctcgcctccggtcctccgcacaccggccggtgatcctgcctctgtaggttttttgtgctatactttttagtggttctggccttcttgacacaatggtgaagctgacaatgatagctcgtgtcactgatggccttccactggcagaagggttggatgatgggcgagatctgaaggatgctgatttctataagcagcaagctaaacttattttcaagaacttgtcaaaagggcatcatgaagcttcacggatgtcaattgagacagggccctactatttccactacattattgagggcagagtatgttatctgactatgtgtgaccgctcttatccgaagaaacttgcattccagtacctagaagatctgaaaaatgaatttgagagggtcaatggcaaccaaattgaaactgctgcaaggccatatgcttttatcaagtttgatacattcatccagaagactaggaaactgtatttggatacaagaactcaaaggaacctcgcaaaactgaatgatgaactctatgaggtgcatcaaattatgactcgcaatgttcaagaggttcttggtgttggtgaaaagctagaccaggtcagtgaaatgtcaagcaggttgacttctgatacaagaatatacgcagataaggctaaggacctcaaccggcaggcgttgattcggaagtatgctcctgtcgccattgtcattggggtagtattgatgttgttttggctcaagaacaagatatggtgattgtacagtacgaaggatactgggccctgttacaacaccggagaagaacagatggagataaaaaccaggtctattctggaacaagatgctttggtgacttgtatcccgtatctgcccattcaagcgattacttaaactgcccttttgctcctccctataagctagtatcaaagtgaattcgttggagtgcagacctgataagagcatctccggaagtctttcaaaattcactctaaattgtcattttgagagtcatttgcc

SEQ ID NO: 10067 - protein, 218 aa, Zea mays subsp. mays
  peptide (1)..(218): Ceres Seq. ID no. 12566343
  misc_feature (1)..(218): Homolog of NCBI NO: 28269424 NR Description: putative vesicle trafficking protein [Oryza
  misc_feature (1)..(218): Homolog of NCBI NO: 15221123 NR Description: putative vesicle transport protein; protein id: supported by cDNA: 273., supported by cDNA: gi_15027876, by cDNA: gi_19310826 [Arabidopsis thaliana]
  misc_feature (1)..(218): Homolog of NCBI NO: 34904386 NR Description: unnamed protein product [Oryza sativa (japonica group)] >gi|8467999|dbj|BAA96600.1| unnamed protein product
  misc_feature (62)..(218): Homolog of NCBI NO: 25402691 NR Description: hypothetical protein [imported] - Arabidopsis >gi|3157951|gb|AAC17634.1| Contains similarity to vesicle protein gb|U91538 from Mus musculus. ESTs gb|F15494 and gb|F14097
  misc_feature (1)..(64): Homolog of NCBI NO: 25402691 NR Description: hypothetical protein [imported] - Arabidopsis >gi|3157951|gb|AAC17634.1| Contains similarity to vesicle protein gb|U91538 from Mus musculus. ESTs gb|F15494 and gb|F14097
  misc_feature (1)..(121): Homolog of NCBI NO: 34015230 NR Description: putative vesicle trafficking protein [Oryza
  misc_feature (1)..(121): Homolog of NCBI NO: 35215218 NR Description: putative vesicle trafficking protein [Oryza
  misc_feature (1)..(212): Homolog of NCBI NO: 4759086 NR Description: vesicle trafficking protein sec22b [Homo sapiens]
  misc_feature (1)..(212): Homolog of NCBI NO: 14290512 NR Description: SEC22 vesicle trafficking protein-like 1 (S.
  misc_feature (1)..(212): Homolog of NCBI NO: 1927215 NR Description: ERS-24 [Cricetulus griseus]
MVKLTMIARVTDGLPLAEGLDDGRDLKDADFYKQQAKLIFKNLSKGHHEASRMSIETGPYYFHYIIEGRVCYLTMCDRSYPKKLAFQYLEDLKNEFERVNGNQIETAARPYAFIKFDTFIQKTRKLYLDTRTQRNLAKLNDELYEVHQIMTRNVQEVLGVGEKLDQVSEMSSRLTSDTRIYADKAKDLNRQALIRKYAPVAIVIGVVLMLFWLKNKIW

SEQ ID NO: 10068 - protein, 213 aa, Zea mays subsp. mays
  peptide (1)..(213): Ceres Seq. ID no. 12566344
  misc_feature (1)..(213): Homolog of NCBI NO: 28269424 NR Description: putative vesicle trafficking protein [Oryza
  misc_feature (1)..(213): Homolog of NCBI NO: 15221123 NR Description: putative vesicle transport protein; protein id: supported by cDNA: 273., supported by cDNA: gi_15027876, by cDNA: gi_19310826 [Arabidopsis thaliana]
  misc_feature (1)..(213): Homolog of NCBI NO: 34904386 NR Description: unnamed protein product [Oryza sativa (japonica group)] >gi|8467999|dbj|BAA96600.1| unnamed protein product
  misc_feature (57)..(213): Homolog of NCBI NO: 25402691 NR Description: hypothetical protein [imported] - Arabidopsis >gi|3157951|gb|AAC17634.1| Contains similarity to vesicle protein gb|U91538 from Mus musculus. ESTs gb|F15494 and gb|F14097
  misc_feature (1)..(59): Homolog of NCBI NO: 25402691 NR Description: hypothetical protein [imported] - Arabidopsis >gi|3157951|gb|AAC17634.1| Contains similarity to vesicle protein gb|U91538 from Mus musculus. ESTs gb|F15494 and gb|F14097
  misc_feature (1)..(116): Homolog of NCBI NO: 34015230 NR Description: putative vesicle trafficking protein [Oryza
  misc_feature (1)..(116): Homolog of NCBI NO: 35215218 NR Description: putative vesicle trafficking protein [Oryza
  misc_feature (1)..(207): Homolog of NCBI NO: 4759086 NR Description: vesicle trafficking protein sec22b [Homo sapiens]
  misc_feature (1)..(207): Homolog of NCBI NO: 14290512 NR Description: SEC22 vesicle trafficking protein-like 1 (S.
  misc_feature (1)..(207): Homolog of NCBI NO: 1927215 NR Description: ERS-24 [Cricetulus griseus]
MIARVTDGLPLAEGLDDGRDLKDADFYKQQAKLIFKNLSKGHHEASRMSIETGPYYFHYIIEGRVCYLTMCDRSYPKKLAFQYLEDLKNEFERVNGNQIETAARPYAFIKFDTFIQKTRKLYLDTRTQRNLAKLNDELYEVHQIMTRNVQEVLGVGEKLDQVSEMSSRLTSDTRIYADKAKDLNRQALIRKYAPVAIVIGVVLMLFWLKNKIW

SEQ ID NO: 10069 - protein, 166 aa, Zea mays subsp. mays
  peptide (1)..(166): Ceres Seq. ID no. 12566345
  misc_feature (1)..(166): Homolog of NCBI NO: 28269424 NR Description: putative vesicle trafficking protein [Oryza
  misc_feature (1)..(166): Homolog of NCBI NO: 15221123 NR Description: putative vesicle transport protein; protein id: supported by cDNA: 273., supported by cDNA: gi_15027876, by cDNA: gi_19310826 [Arabidopsis thaliana]
  misc_feature (1)..(166): Homolog of NCBI NO: 34904386 NR Description: unnamed protein product [Oryza sativa (japonica group)] >gi|8467999|dbj|BAA96600.1| unnamed protein product
  misc_feature (10)..(166): Homolog of NCBI NO: 25402691 NR Description: hypothetical protein [imported] - Arabidopsis >gi|3157951|gb|AAC17634.1| Contains similarity to vesicle protein gb|U91538 from Mus musculus. ESTs gb|F15494 and gb|F14097
  misc_feature (1)..(12): Homolog of NCBI NO: 25402691 NR Description: hypothetical protein [imported] - Arabidopsis >gi|3157951|gb|AAC17634.1| Contains similarity to vesicle protein gb|U91538 from Mus musculus. ESTs gb|F15494 and gb|F14097
  misc_feature (1)..(69): Homolog of NCBI NO: 34015230 NR Description: putative vesicle trafficking protein [Oryza
  misc_feature (1)..(69): Homolog of NCBI NO: 35215218 NR Description: putative vesicle trafficking protein [Oryza
  misc_feature (1)..(160): Homolog of NCBI NO: 4759086 NR Description: vesicle trafficking protein sec22b [Homo sapiens]
  misc_feature (1)..(160): Homolog of NCBI NO: 14290512 NR Description: SEC22 vesicle trafficking protein-like 1 (S.
  misc_feature (1)..(160): Homolog of NCBI NO: 1927215 NR Description: ERS-24 [Cricetulus griseus]
MSIETGPYYFHYIIEGRVCYLTMCDRSYPKKLAFQYLEDLKNEFERVNGNQIETAARPYAFIKFDTFIQKTRKLYLDTRTQRNLAKLNDELYEVHQIMTRNVQEVLGVGEKLDQVSEMSSRLTSDTRIYADKAKDLNRQALIRKYAPVAIVIGVVLMLFWLKNKIW

SEQ ID NO: 10070 - DNA, 1887 bp, Zea mays subsp. mays
  misc_feature (1)..(1887): Ceres Seq. ID no. 12373110
  misc_feature: MA Experiment ID: 108527 Result: Up-regulated in Transcription
  misc_feature: MA Experiment 108527 PARAMETER Experiment Name: Zm_5mM_NO_P Parameter: Age (day) Value: 8
  misc_feature: MA Experiment 108527 PARAMETER Experiment Name: Zm_5mM_NO_P Parameter: Organism Value: Zea mays
  misc_feature: MA Experiment 108527 PARAMETER Experiment Name: Zm_5mM_NO_P Parameter: Plant Line Value: 35A19
  misc_feature: MA Experiment 108527 PARAMETER Experiment Name: Zm_5mM_NO_P Parameter: Timepoint (hr) Value: 6
  misc_feature: MA Experiment 108527 PARAMETER Experiment Name: Zm_5mM_NO_P Parameter: Tissue Value: Aerial
  misc_feature: MA Experiment 108527 PARAMETER Experiment Name: Zm_5mM_NO_P Parameter: Treatment Value: 5mM NO vs. No Treatment
  misc_feature: MA Experiment ID: 108543 Result: Up-regulated in Transcription
  misc_feature: MA Experiment ID: 108544 Result: Up-regulated in Transcription
  misc_feature: MA Experiment ID: 20000535 Result: Down-regulated in Transcription
  misc_feature: MA Experiment 20000535 PARAMETER Experiment Name: Zm_Hybrid_Seed_Dev_P Parameter: DAP Value: 30 vs. 12
  misc_feature: MA Experiment 20000535 PARAMETER Experiment Name: Zm_Hybrid_Seed_Dev_P Parameter: Organism Value: Zea mays
  misc_feature: MA Experiment 20000535 PARAMETER Experiment Name: Zm_Hybrid_Seed_Dev_P Parameter: Plant Line Value: 35A19
  misc_feature: MA Experiment 20000535 PARAMETER Experiment Name: Zm_Hybrid_Seed_Dev_P Parameter: Tissue Value: Embryo vs. Unfert Floret
  misc_feature: MA Experiment ID: 20000629 Result: Down-regulated in Transcription
  misc_feature: MA Experiment 20000629 PARAMETER Experiment Name: Zm_Herbicide-Treatments_P Parameter: Timepoint (hr) Value: 12
  misc_feature: MA Experiment 20000629 PARAMETER Experiment Name: Zm_Herbicide-Treatments_P Parameter: Tissue Value: Aerial
  misc_feature: MA Experiment 20000629 PARAMETER Experiment Name: Zm_Herbicide-Treatments_P Parameter: Treatment Value: Trimec vs. No Treatment
gggccaagtcgcagacgcggagccaccgccattttttttactcccgaaaccaggcaggagggaggaggcgacgacatcgccatcacaccagatcactgaagaagagagaggcgcgtcgagtctccccaaagaacgagctagtacaaagtctcctcttcctttgactccgaatcccctagaccattgatggttgcgggggcaccggaaggagccactgacgatgggcctctgctcctcctccaccgccgcccgggccgcctccgaccccggcgccgcagccgcgggtgatgccgccgcggcaaagaaggggcgcgggatcgtcgcgtgcgggaagcggaccgacttcggatacgacaaggatttcgaggtgcgctactcgcttgggaagcttttgggccacggccagttcggctacacctttgccgccgtcgatcgcgcctccaccgagcgcgtcgccgtcaagcgcatcgacaagaataagatggtccttcctgttgctgttgaagacgtaaagagagaagttaaaatcttaaaggcattacaagggcacgaaaatgttgtacacttttacaatgcattcgaagatgacaactatgtttatatagtcatggaattatgtgagggtggcgagctacttgatcggatattagccaagaaagatagtcgttacagcgagaaagatgctgcagtagttgtccgacagatgctcaaggttgcagctgagtgccacctgcatggtttggttcatcgggacatgaaacctgagaacttcctattcaaatcaaaaaaggaggactcgccccttaaggctacagattttggtctttcagacttcataaaaccagggaggcaattccgtgacattgttggaagtgcctactacgtagcaccagaagtactcaaacgcaggtcagggccagaatccgatgtttggagtataggtgttataacctatattttgctgtgtggaagacgaccattctgggacaaaacagaagatgggatatttaaagaggtcttaaaaaagaagccagatttccgccgcaagccttggtcaaacattacttcgagtgcaaaagattttgtacaaaaattactagttaaggatccccgtgcaagactaactgctgcacaggcattatcacatgattgggtgagagaaggaggaaaggcatctgaaatacccttggatatatcagtattacataatatgcgtcagtttgtgaaatacagtcgtttcaagcaatttgctttaagggcattagcatctacattaaactcagaagagatgtctgatcttcgtgatcaattcaatgccattgatgttgacaaaaatggaacgattagtcttgaggaactgaagcaggctcttgcaaaggatgttccatggagattaaagggtccacgtgttttagagatcattgaagcgattgacagtaatacagatgggctagttgattttgaggagtttgttgctgcaacactacacgtgcatcagctggtggaacatgatactgagaagtggaaatcattgtctcaagctgcatttgataaatttgatgttgacagagatggctacatcacacctgatgaacttagaatgcatacaggaatgaagggttctattgatcccctcctggaggaggctgacattgacaaagatggcaagataagcctagatgaatttcgccggctcttgaagactgcaagcatgagcgcacgcaatgtacaaactcctaggggtgttcgcaagtcatagttttctgttttttgtagttcacataactgaactagagagcagcagcacatgtgattggagaaaggcttttccatgtaaattagacaatcaataatacacatgaatggaggtaatccgtagttgttcct

SEQ ID NO: 10071 - protein, 512 aa, Zea mays subsp. mays
  peptide (1)..(512): Ceres Seq. ID no. 12373111
  misc_feature (52)..(312): Pfam Name: Protein kinase domain Pfam Description: Protein kinase domain
  misc_feature (1)..(512): Homolog of NCBI NO: 12592069 NR Description: calcium-dependent protein kinase [Oryza sativa]
  misc_feature (11)..(512): Homolog of NCBI NO: 34902680 NR Description: similar to calcium-dependent protein kinase
  misc_feature (32)..(512): Homolog of NCBI NO: 16904224 NR Description: calcium/calmodulin-dependent protein kinase CaMK2
  misc_feature (1)..(504): Homolog of NCBI NO: 6689920 NR Description: calcium-dependent protein kinase [Oryza sativa]
  misc_feature (5)..(510): Homolog of NCBI NO: 15239300 NR Description: calcium-dependent protein kinase; protein id: supported by cDNA: 18901. [Arabidopsis thaliana]
  misc_feature (5)..(510): Homolog of NCBI NO: 21553971 NR Description: calcium-dependent protein kinase [Arabidopsis
  misc_feature (1)..(508): Homolog of NCBI NO: 15227920 NR Description: putative Ca2+-dependent ser/thr protein kinase;
  misc_feature (26)..(509): Homolog of NCBI NO: 3779218 NR Description: protein kinase CPK1 [Solanum tuberosum]
  misc_feature (31)..(512): Homolog of NCBI NO: 15234291 NR Description: Calcium-dependent serine/threonine protein
  misc_feature (1)..(507): Homolog of NCBI NO: 33146627 NR Description: putative CDPK-related protein kinase [Oryza
MGLCSSSTAARAASDPGAAAAGDAAAAKKGRGIVACGKRTDFGYDKDFEVRYSLGKLLGHGQFGYTFAAVDRASTERVAVKRIDKNKMVLPVAVEDVKREVKILKALQGHENVVHFYNAFEDDNYVYIVMELCEGGELLDRILAKKDSRYSEKDAAVVVRQMLKVAAECHLHGLVHRDMKPENFLFKSKKEDSPLKATDFGLSDFIKPGRQFRDIVGSAYYVAPEVLKRRSGPESDVWSIGVITYILLCGRRPFWDKTEDGIFKEVLKKKPDFRRKPWSNITSSAKDFVQKLLVKDPRARLTAAQALSHDWVREGGKASEIPLDISVLHNMRQFVKYSRFKQFALRALASTLNSEEMSDLRDQFNAIDVDKNGTISLEELKQALAKDVPWRLKGPRVLEIIEAIDSNTDGLVDFEEFVAATLHVHQLVEHDTEKWKSLSQAAFDKFDVDRDGYITPDELRMHTGMKGSIDPLLEEADIDKDGKISLDEFRRLLKTASMSARNVQTPRGVRKS

SEQ ID NO: 10072 - protein, 425 aa, Zea mays subsp. mays
  peptide (1)..(425): Ceres Seq. ID no. 12373112
  misc_feature (1)..(225): Pfam Name: Protein kinase domain Pfam Description: Protein kinase domain
  misc_feature (1)..(425): Homolog of NCBI NO: 12592069 NR Description: calcium-dependent protein kinase [Oryza sativa]
  misc_feature (1)..(425): Homolog of NCBI NO: 34902680 NR Description: similar to calcium-dependent protein kinase
  misc_feature (1)..(425): Homolog of NCBI NO: 16904224 NR Description: calcium/calmodulin-dependent protein kinase CaMK2
  misc_feature (1)..(417): Homolog of NCBI NO: 6689920 NR Description: calcium-dependent protein kinase [Oryza sativa]
  misc_feature (1)..(423): Homolog of NCBI NO: 15239300 NR Description: calcium-dependent protein kinase; protein id: supported by cDNA: 18901. [Arabidopsis thaliana]
  misc_feature (1)..(423): Homolog of NCBI NO: 21553971 NR Description: calcium-dependent protein kinase [Arabidopsis
  misc_feature (1)..(421): Homolog of NCBI NO: 15227920 NR Description: putative Ca2+-dependent ser/thr protein kinase;
  misc_feature (1)..(422): Homolog of NCBI NO: 3779218 NR Description: protein kinase CPK1 [Solanum tuberosum]
  misc_feature (1)..(425): Homolog of NCBI NO: 15234291 NR Description: Calcium-dependent serine/threonine protein
  misc_feature (1)..(420): Homolog of NCBI NO: 33146627 NR Description: putative CDPK-related protein kinase [Oryza
MVLPVAVEDVKREVKILKALQGHENVVHFYNAFEDDNYVYIVMELCEGGELLDRILAKKDSRYSEKDAAVVVRQMLKVAAECHLHGLVHRDMKPENFLFKSKKEDSPLKATDFGLSDFIKPGRQFRDIVGSAYYVAPEVLKRRSGPESDVWSIGVITYILLCGRRPFWDKTEDGIFKEVLKKKPDFRRKPWSNITSSAKDFVQKLLVKDPRARLTAAQALSHDWVREGGKASEIPLDISVLHNMRQFVKYSRFKQFALRALASTLNSEEMSDLRDQFNAIDVDKNGTISLEELKQALAKDVPWRLKGPRVLEIIEAIDSNTDGLVDFEEFVAATLHVHQLVEHDTEKWKSLSQAAFDKFDVDRDGYITPDELRMHTGMKGSIDPLLEEADIDKDGKISLDEFRRLLKTASMSARNVQTPRGVRKS

SEQ ID NO: 10073 - protein, 383 aa, Zea mays subsp. mays
  peptide (1)..(383): Ceres Seq. ID no. 12373113
  misc_feature (1)..(183): Pfam Name: Protein kinase domain Pfam Description: Protein kinase domain
  misc_feature (1)..(383): Homolog of NCBI NO: 12592069 NR Description: calcium-dependent protein kinase [Oryza sativa]
  misc_feature (1)..(383): Homolog of NCBI NO: 34902680 NR Description: similar to calcium-dependent protein kinase
  misc_feature (1)..(383): Homolog of NCBI NO: 16904224 NR Description: calcium/calmodulin-dependent protein kinase CaMK2
  misc_feature (1)..(375): Homolog of NCBI NO: 6689920 NR Description: calcium-dependent protein kinase [Oryza sativa]
  misc_feature (1)..(381): Homolog of NCBI NO: 15239300 NR Description: calcium-dependent protein kinase; protein id: supported by cDNA: 18901. [Arabidopsis thaliana]
  misc_feature (1)..(381): Homolog of NCBI NO: 21553971 NR Description: calcium-dependent protein kinase [Arabidopsis
  misc_feature (1)..(379): Homolog of NCBI NO: 15227920 NR Description: putative Ca2+-dependent ser/thr protein kinase;
  misc_feature (1)..(380): Homolog of NCBI NO: 3779218 NR Description: protein kinase CPK1 [Solanum tuberosum]
  misc_feature (1)..(383): Homolog of NCBI NO: 15234291 NR Description: Calcium-dependent serine/threonine protein
  misc_feature (1)..(378): Homolog of NCBI NO: 33146627 NR Description: putative CDPK-related protein kinase [Oryza
MELCEGGELLDRILAKKDSRYSEKDAAVVVRQMLKVAAECHLHGLVHRDMKPENFLFKSKKEDSPLKATDFGLSDFIKPGRQFRDIVGSAYYVAPEVLKRRSGPESDVWSIGVITYILLCGRRPFWDKTEDGIFKEVLKKKPDFRRKPWSNITSSAKDFVQKLLVKDPRARLTAAQALSHDWVREGGKASEIPLDISVLHNMRQFVKYSRFKQFALRALASTLNSEEMSDLRDQFNAIDVDKNGTISLEELKQALAKDVPWRLKGPRVLEIIEAIDSNTDGLVDFEEFVAATLHVHQLVEHDTEKWKSLSQAAFDKFDVDRDGYITPDELRMHTGMKGSIDPLLEEADIDKDGKISLDEFRRLLKTASMSARNVQTPRGVRKS

SEQ ID NO: 10074 - DNA, 1458 bp, Zea mays subsp. mays
  misc_feature (1)..(1458): Ceres Seq. ID no. 12349515
  misc_feature: MA Experiment ID: 108535 Result: Up-regulated in Transcription
  misc_feature: MA Experiment 108535 PARAMETER Experiment Name: Zm_Meristem_P Parameter: Age (day) Value: 8
  misc_feature: MA Experiment 108535 PARAMETER Experiment Name: Zm_Meristem_P Parameter: Organism Value: Zea mays
  misc_feature: MA Experiment 108535 PARAMETER Experiment Name: Zm_Meristem_P Parameter: Plant Line Value: 35A19
  misc_feature: MA Experiment 108535 PARAMETER Experiment Name: Zm_Meristem_P Parameter: Tissue Value: Root Meristem vs. Above Root Meristem
  misc_feature: MA Experiment ID: 20000487 Result: Up-regulated in Transcription
  misc_feature: MA Experiment 20000487 PARAMETER Experiment Name: Zm_50mM_NH4NO3_L_to_H_P Parameter: Organism Value: Zea mays
  misc_feature: MA Experiment 20000487 PARAMETER Experiment Name: Zm_50mM_NH4NO3_L_to_H_P Parameter: Timepoint (hr) Value: 4
  misc_feature: MA Experiment 20000487 PARAMETER Experiment Name: Zm_50mM_NH4NO3_L_to_H_P Parameter: Tissue Value: Leaves
  misc_feature: MA Experiment 20000487 PARAMETER Experiment Name: Zm_50mM_NH4NO3_L_to_H_P Parameter: Treatment Value: 50mM NH4NO3 vs. 100mM Mannitol
  misc_feature: MA Experiment ID: 20000488 Result: Up-regulated in Transcription
  misc_feature: MA Experiment 20000488 PARAMETER Experiment Name: Zm_50mM_NH4NO3_L_to_H_P Parameter: Organism Value: Zea mays
  misc_feature: MA Experiment 20000488 PARAMETER Experiment Name: Zm_50mM_NH4NO3_L_to_H_P Parameter: Timepoint (hr) Value: 8
  misc_feature: MA Experiment 20000488 PARAMETER Experiment Name: Zm_50mM_NH4NO3_L_to_H_P Parameter: Tissue Value: Leaves
  misc_feature: MA Experiment 20000488 PARAMETER Experiment Name: Zm_50mM_NH4NO3_L_to_H_P Parameter: Treatment Value: 50mM NH4NO3 vs. 100mM Mannitol
agggcaaagaggcgcgtgagaggtcggagcctgcaccgccgccgccatgctccgcctccaaaaacacctctcccttcgcctgcaagaacatctccttcccctgcaccgctccgcctccctcatacagctctccctccagcgctctctcctctccaccggctccgccacatattcctctccgggtcacttcgccgccgatgactacctcgtctccacatgtggcctcacccgggagcaagccgcgaatgccgccaagtgcatctcccactggaagtcgtcctccaacgccgacgccgtgctgtccttcctaaccggcccggcgctcggcctctccaatgctgagatcgcgctgctcgtggccaaagacccgcgcgtcctcagctgcagcgtcgacaacaccctgcgggcccgcttggcccgcttccgcagtcatggcttctccgccgcgcagatcagcgaattcgtccgcgtggccccctgcttctttcgcaaattcaacatcgacgtcaagctcggcttctggatgcccttcctcggctcgcccgacaggttcctccgcctcgtcaagcgtaacttctacctcctcagctccgacctcgacaaggtggtgaagcccaacatccagctgctccaggagtgcggtctatctatccaggagattgggagcctgtgcgtggctaacccgaggctgctcaccagcaagccggacagaatcagggccgtcctcgtgcgtgccggtgagatgggcgtgccccgcaagacgcttttgttcaggcacgctgtgaccgcggtggcgggcctctgtccggagacctttgcatctaagctcaagatgatggccaatattctcgggtgctcagaggctgaggttgccagaatggtgcaaaagaacccgttggtgctgaggcgctccatggagacgattcagcgcgcctgtgagttcctgatcaatgtggtcggtgtcggtaccaacttcattctggacaagcccacaatcctgatgtacagtctggaacgccggctggtgccccggcattacgtgatgaaggtgctccaggacaaaggattgatgcgaaaagatcatagcttctacactttggccgctattagtgctagcgtgttctgctccaggtatgtacatcctcataagaatgttcttcctaatcttgccgctgcatacgcatctggttgcaatgggaaaatagccatctgaggcgcgcgattccagcaaactggctatatgggcagcagctgcagttgtatcttgcatgtcattcttaacacattcagataccctgatgtgtactctgcgaggctgcagctccgtacttggctcatagcttcagaattgcagaaattcagcataacaagtttaagaactcatgaatgaccaaagcacgatgttgtcaatttcatataccttgtttaggattctggcgatgaattttatcgtgtttc

SEQ ID NO: 10075 - protein, 388 aa, Zea mays subsp. mays
  peptide (1)..(388): Ceres Seq. ID no. 12349516
  misc_feature (96)..(345): Pfam Name: mTERF Pfam Description: mTERF
  misc_feature (14)..(364): Homolog of NCBI NO: 39545750 NR Description: OSJNBb0034I13.16 [Oryza sativa (japonica
  misc_feature (53)..(388): Homolog of NCBI NO: 34394750 NR Description: unknown protein [Oryza sativa (japonica
  misc_feature (53)..(380): Homolog of NCBI NO: 15218140 NR Description: hypothetical protein; protein id: At1g21150.1
  misc_feature (16)..(382): Homolog of NCBI NO: 18415647 NR Description: expressed protein; protein id: At5g07900.1, by cDNA: 22350., supported by cDNA: gi_13878064, supported by gi_17104654 [Arabidopsis thaliana] >gi|11281400|pir||T45615
  misc_feature (37)..(382): Homolog of NCBI NO: 21553423 NR Description: unknown [Arabidopsis thaliana]
  misc_feature (37)..(382): Homolog of NCBI NO: 15238313 NR Description: putative protein; protein id: At5g64950.1, by cDNA: 142672. [Arabidopsis thaliana] emb|CAB62602.1~gene_id:MXK3.18~similar to unknown protein
  misc_feature (53)..(380): Homolog of NCBI NO: 25511650 NR Description: T22I11.2 protein - Arabidopsis thaliana
  misc_feature (94)..(385): Homolog of NCBI NO: 18412304 NR Description: expressed protein; protein id: At1g79220.1, by cDNA: 6667. [Arabidopsis thaliana] >gi|7487897|pir||T01035
  misc_feature (145)..(385): Homolog of NCBI NO: 26450011 NR Description: unknown protein [Arabidopsis thaliana]
  misc_feature (145)..(385): Homolog of NCBI NO: 15220660 NR Description: hypothetical protein; protein id: At1g61960.1
MLRLQKHLSLRLQEHLLPLHRSASLIQLSLQRSLLSTGSATYSSPGHFAADDYLVSTCGLTREQAANAAKCISHWKSSSNADAVLSFLTGPALGLSNAEIALLVAKDPRVLSCSVDNTLRARLARFRSHGFSAAQISEFVRVAPCFFRKFNIDVKLGFWMPFLGSPDRFLRLVKRNFYLLSSDLDKVVKPNIQLLQECGLSIQEIGSLCVANPRLLTSKPDRIRAVLVRAGEMGVPRKTLLFRHAVTAVAGLCPETFASKLKMMANILGCSEAEVARMVQKNPLVLRRSMETIQRACEFLINVVGVGTNFILDKPTILMYSLERRLVPRHYVMKVLQDKGLMRKDHSFYTLAAISASVFCSRYVHPHKNVLPNLAAAYASGCNGKIAI

SEQ ID NO: 10076 - protein, 229 aa, Zea mays subsp. mays
  peptide (1)..(229): Ceres Seq. ID no. 12349517
  misc_feature (1)..(186): Pfam Name: mTERF Pfam Description: mTERF
  misc_feature (1)..(205): Homolog of NCBI NO: 39545750 NR Description: OSJNBb0034I13.16 [Oryza sativa (japonica
  misc_feature (1)..(229): Homolog of NCBI NO: 34394750 NR Description: unknown protein [Oryza sativa (japonica
  misc_feature (1)..(221): Homolog of NCBI NO: 15218140 NR Description: hypothetical protein; protein id: At1g21150.1
  misc_feature (1)..(223): Homolog of NCBI NO: 18415647 NR Description: expressed protein; protein id: At5g07900.1, by cDNA: 22350., supported by cDNA: gi_13878064, supported by gi_17104654 [Arabidopsis thaliana] >gi|11281400|pir||T45615
  misc_feature (1)..(223): Homolog of NCBI NO: 21553423 NR Description: unknown [Arabidopsis thaliana]
  misc_feature (1)..(223): Homolog of NCBI NO: 15238313 NR Description: putative protein; protein id: At5g64950.1, by cDNA: 142672. [Arabidopsis thaliana] emb|CAB62602.1~gene_id:MXK3.18~similar to unknown protein
  misc_feature (1)..(221): Homolog of NCBI NO: 25511650 NR Description: T22I11.2 protein - Arabidopsis thaliana
  misc_feature (1)..(226): Homolog of NCBI NO: 18412304 NR Description: expressed protein; protein id: At1g79220.1, by cDNA: 6667. [Arabidopsis thaliana] >gi|7487897|pir||T01035
  misc_feature (1)..(226): Homolog of NCBI NO: 26450011 NR Description: unknown protein [Arabidopsis thaliana]
  misc_feature (1)..(226): Homolog of NCBI NO: 15220660 NR Description: hypothetical protein; protein id: At1g61960.1
MPFLGSPDRFLRLVKRNFYLLSSDLDKVVKPNIQLLQECGLSIQEIGSLCVANPRLLTSKPDRIRAVLVRAGEMGVPRKTLLFRHAVTAVAGLCPETFASKLKMMANILGCSEAEVARMVQKNPLVLRRSMETIQRACEFLINVVGVGTNFILDKPTILMYSLERRLVPRHYVMKVLQDKGLMRKDHSFYTLAAISASVFCSRYVHPHKNVLPNLAAAYASGCNGKIAI

SEQ ID NO: 10077 - DNA, 1103 bp, Zea mays subsp. mays; identical to SEQ ID NO: 3216
  misc_feature (1)..(1103): Ceres Seq. ID no. 12349943
  misc_feature: MA Experiment ID: 108504 Result: Down-regulated in Transcription
  misc_feature: MA Experiment 108504 PARAMETER Experiment Name: Zm_Drought_P Parameter: Age (day) Value: 8
  misc_feature: MA Experiment 108504 PARAMETER Experiment Name: Zm_Drought_P Parameter: Organism Value: Zea mays
  misc_feature: MA Experiment 108504 PARAMETER Experiment Name: Zm_Drought_P Parameter: Plant Line Value: 35A19
  misc_feature: MA Experiment 108504 PARAMETER Experiment Name: Zm_Drought_P Parameter: Timepoint (hr) Value: 12
  misc_feature: MA Experiment 108504 PARAMETER Experiment Name: Zm_Drought_P Parameter: Tissue Value: Aerial
  misc_feature: MA Experiment 108504 PARAMETER Experiment Name: Zm_Drought_P Parameter: Treatment Value: Drought vs. No Drought
  misc_feature: MA Experiment ID: 108528 Result: Up-regulated in Transcription
  misc_feature: MA Experiment 108528 PARAMETER Experiment Name: Zm_Imbibed_Seeds_P Parameter: Age (day) Value: 5 vs. 2
  misc_feature: MA Experiment 108528 PARAMETER Experiment Name: Zm_Imbibed_Seeds_P Parameter: Organism Value: Zea mays
  misc_feature: MA Experiment 108528 PARAMETER Experiment Name: Zm_Imbibed_Seeds_P Parameter: Plant Line Value: 35A19
  misc_feature: MA Experiment 108528 PARAMETER Experiment Name: Zm_Imbibed_Seeds_P Parameter: Tissue Value: Aerial vs. Embryo
  misc_feature: MA Experiment ID: 108529 Result: Down-regulated in Transcription
  misc_feature: MA Experiment 108529 PARAMETER Experiment Name: Zm_Imbibed_Seeds_P Parameter: Age (day) Value: 5 vs. 2
  misc_feature: MA Experiment 108529 PARAMETER Experiment Name: Zm_Imbibed_Seeds_P Parameter: Organism Value: Zea mays
  misc_feature: MA Experiment 108529 PARAMETER Experiment Name: Zm_Imbibed_Seeds_P Parameter: Plant Line Value: 35A19
  misc_feature: MA Experiment 108529 PARAMETER Experiment Name: Zm_Imbibed_Seeds_P Parameter: Tissue Value: Roots vs. Embryo
  misc_feature: MA Experiment ID: 108530 Result: Up-regulated in Transcription
  misc_feature: MA Experiment 108530 PARAMETER Experiment Name: Zm_Imbibed_Seeds_P Parameter: Age (day) Value: 6 vs. 2
  misc_feature: MA Experiment 108530 PARAMETER Experiment Name: Zm_Imbibed_Seeds_P Parameter: Organism Value: Zea mays
  misc_feature: MA Experiment 108530 PARAMETER Experiment Name: Zm_Imbibed_Seeds_P Parameter: Plant Line Value: 35A19
  misc_feature: MA Experiment 108530 PARAMETER Experiment Name: Zm_Imbibed_Seeds_P Parameter: Tissue Value: Aerial vs. Embryo
  misc_feature: MA Experiment ID: 108536 Result: Down-regulated in Transcription
  misc_feature: MA Experiment 108536 PARAMETER Experiment Name: Zm_Meristem_P Parameter: Age (day) Value: 8
  misc_feature: MA Experiment 108536 PARAMETER Experiment Name: Zm_Meristem_P Parameter: Organism Value: Zea mays
  misc_feature: MA Experiment 108536 PARAMETER Experiment Name: Zm_Meristem_P Parameter: Plant Line Value: 35A19
  misc_feature: MA Experiment 108536 PARAMETER Experiment Name: Zm_Meristem_P Parameter: Tissue Value: Shoot Meristem vs. Above Shoot Meristem
  misc_feature: MA Experiment ID: 108543 Result: Up-regulated in Transcription
  misc_feature: MA Experiment ID: 108544 Result: Down-regulated in Transcription
  misc_feature: MA Experiment ID: 108545 Result: Up-regulated in Transcription
  misc_feature: MA Experiment 108545 PARAMETER Experiment Name: Zm_Imbibed_Seeds_P Parameter: Age (day) Value: 3 vs. 2
  misc_feature: MA Experiment 108545 PARAMETER Experiment Name: Zm_Imbibed_Seeds_P Parameter: Organism Value: Zea mays
  misc_feature: MA Experiment 108545 PARAMETER Experiment Name: Zm_Imbibed_Seeds_P Parameter: Plant Line Value: 35A19
  misc_feature: MA Experiment 108545 PARAMETER Experiment Name: Zm_Imbibed_Seeds_P Parameter: Tissue Value: Aerial vs. Embryo
  misc_feature: MA Experiment ID: 108546 Result: Down-regulated in Transcription
  misc_feature: MA Experiment 108546 PARAMETER Experiment Name: Zm_Imbibed_Seeds_P Parameter: Age (day) Value: 3 vs. 2
  misc_feature: MA Experiment 108546 PARAMETER Experiment Name: Zm_Imbibed_Seeds_P Parameter: Organism Value: Zea mays
  misc_feature: MA Experiment 108546 PARAMETER Experiment Name: Zm_Imbibed_Seeds_P Parameter: Plant Line Value: 35A19
  misc_feature: MA Experiment 108546 PARAMETER Experiment Name: Zm_Imbibed_Seeds_P Parameter: Tissue Value: Roots vs. Embryo
  misc_feature: MA Experiment ID: 108547 Result: Up-regulated in Transcription
  misc_feature: MA Experiment 108547 PARAMETER Experiment Name: Zm_Imbibed_Seeds_P Parameter: Age (day) Value: 4 vs. 2
  misc_feature: MA Experiment 108547 PARAMETER Experiment Name: Zm_Imbibed_Seeds_P Parameter: Organism Value: Zea mays
  misc_feature: MA Experiment 108547 PARAMETER Experiment Name: Zm_Imbibed_Seeds_P Parameter: Plant Line Value: 35A19
  misc_feature: MA Experiment 108547 PARAMETER Experiment Name: Zm_Imbibed_Seeds_P Parameter: Tissue Value: Aerial vs. Embryo
  misc_feature: MA Experiment ID: 108597 Result: Down-regulated in Transcription
  misc_feature: MA Experiment 108597 PARAMETER Experiment Name: Zm_100uM_ABA_P Parameter: Age (day) Value: 9
  misc_feature: MA Experiment 108597 PARAMETER Experiment Name: Zm_100uM_ABA_P Parameter: Organism Value: Zea mays
  misc_feature: MA Experiment 108597 PARAMETER Experiment Name: Zm_100uM_ABA_P Parameter: Plant Line Value: 35A19
  misc_feature: MA Experiment 108597 PARAMETER Experiment Name: Zm_100uM_ABA_P Parameter: Timepoint (hr) Value: 24
  misc_feature: MA Experiment 108597 PARAMETER Experiment Name: Zm_100uM_ABA_P Parameter: Tissue Value: Aerial
  misc_feature: MA Experiment 108597 PARAMETER Experiment Name: Zm_100uM_ABA_P Parameter: Treatment Value: 100uM ABA vs. No Treatment
  misc_feature: MA Experiment ID: 108689 Result: Down-regulated in Transcription
  misc_feature: MA Experiment 108689 PARAMETER Experiment Name: Zm_Drought_Roots_P Parameter: Age (day) Value: 9
  misc_feature: MA Experiment 108689 PARAMETER Experiment Name: Zm_Drought_Roots_P Parameter: Organism Value: Zea mays
  misc_feature: MA Experiment 108689 PARAMETER Experiment Name: Zm_Drought_Roots_P Parameter: Plant Line Value: 35A19
  misc_feature: MA Experiment 108689 PARAMETER Experiment Name: Zm_Drought_Roots_P Parameter: Timepoint (hr) Value: 24
  misc_feature: MA Experiment 108689 PARAMETER Experiment Name: Zm_Drought_Roots_P Parameter: Tissue Value: Roots
  misc_feature: MA Experiment 108689 PARAMETER Experiment Name: Zm_Drought_Roots_P Parameter: Treatment Value: Drought vs. No Drought
  misc_feature: MA Experiment ID: 20000479 Result: Down-regulated in Transcription
  misc_feature: MA Experiment 20000479 PARAMETER Experiment Name: Zm_Drought_P Parameter: Age (day) Value: 10
  misc_feature: MA Experiment 20000479 PARAMETER Experiment Name: Zm_Drought_P Parameter: Organism Value: Zea mays
  misc_feature: MA Experiment 20000479 PARAMETER Experiment Name: Zm_Drought_P Parameter: Plant Line Value: 35A19
  misc_feature: MA Experiment 20000479 PARAMETER Experiment Name: Zm_Drought_P Parameter: Timepoint (hr) Value: 48
  misc_feature: MA Experiment 20000479 PARAMETER Experiment Name: Zm_Drought_P Parameter: Tissue Value: Aerial
  misc_feature: MA Experiment 20000479 PARAMETER Experiment Name: Zm_Drought_P Parameter: Treatment Value: Drought vs. No Drought
  misc_feature: MA Experiment ID: 20000480 Result: Down-regulated in Transcription
  misc_feature: MA Experiment 20000480 PARAMETER Experiment Name: Zm_Drought_P Parameter: Age (day) Value: 11
  misc_feature: MA Experiment 20000480 PARAMETER Experiment Name: Zm_Drought_P Parameter: Organism Value: Zea mays
  misc_feature: MA Experiment 20000480 PARAMETER Experiment Name: Zm_Drought_P Parameter: Plant Line Value: 35A19
  misc_feature: MA Experiment 20000480 PARAMETER Experiment Name: Zm_Drought_P Parameter: Timepoint (hr) Value: 72
  misc_feature: MA Experiment 20000480 PARAMETER Experiment Name: Zm_Drought_P Parameter: Tissue Value: Aerial
  misc_feature: MA Experiment 20000480 PARAMETER Experiment Name: Zm_Drought_P Parameter: Treatment Value: Drought vs. No Drought
  misc_feature: MA Experiment ID: 20000535 Result: Down-regulated in Transcription
  misc_feature: MA Experiment 20000535 PARAMETER Experiment Name: Zm_Hybrid_Seed_Dev_P Parameter: DAP Value: 30 vs. 12
  misc_feature: MA Experiment 20000535 PARAMETER Experiment Name: Zm_Hybrid_Seed_Dev_P Parameter: Organism Value: Zea mays
  misc_feature: MA Experiment 20000535 PARAMETER Experiment Name: Zm_Hybrid_Seed_Dev_P Parameter: Plant Line Value: 35A19
  misc_feature: MA Experiment 20000535 PARAMETER Experiment Name: Zm_Hybrid_Seed_Dev_P Parameter: Tissue Value: Embryo vs. Unfert Floret

SEQ ID NO: 10078 - protein, 296 aa, Zea mays subsp. mays; identical to SEQ ID NO: 3217
  peptide (1)..(296): Ceres Seq. ID no. 12349944
  misc_feature (98)..(294): Pfam Name: Mitochondrial glycoprotein Pfam Description: Mitochondrial glycoprotein
  misc_feature (24)..(296): Homolog of NCBI NO: 34895742 NR Description: P0019D06.29 [Oryza sativa (japonica
  misc_feature (24)..(294): Homolog of NCBI NO: 34895730 NR Description: P0019D06.23 [Oryza sativa (japonica
  misc_feature (90)..(296): Homolog of NCBI NO: 11357566 NR Description: hypothetical protein F1I16.10 - Arabidopsis >gi|7263548|emb|CAB81585.1| putative protein [Arabidopsis
  misc_feature (90)..(296): Homolog of NCBI NO: 18410318 NR Description: Expressed protein; protein id: At3g55605.1, by cDNA: 250217. [Arabidopsis thaliana]
  misc_feature (85)..(294): Homolog of NCBI NO: 15239320 NR Description: putative protein; protein id: At5g05990.1, by cDNA: 18108., supported by cDNA: gi_14517390, supported by gi_15450540 [Arabidopsis thaliana] >gi|10177572|dbj|BAB10804.1|
  misc_feature (48)..(295): Homolog of NCBI NO: 34895740 NR Description: P0019D06.28 [Oryza sativa (japonica
  misc_feature (30)..(294): Homolog of NCBI NO: 15241669 NR Description: putative protein; protein id: At5g02050.1, by cDNA: 22324. [Arabidopsis thaliana] >gi|11358397|pir||T48226
  misc_feature (30)..(294): Homolog of NCBI NO: 21592321 NR Description: unknown [Arabidopsis thaliana]
  misc_feature (171)..(296): Homolog of NCBI NO: 7487698 NR Description: hypothetical protein At2g39790 [imported] -
  misc_feature (90)..(170): Homolog of NCBI NO: 7487698 NR Description: hypothetical protein At2g39790 [imported] -

SEQ ID NO: 10079 - protein, 272 aa, Zea mays subsp. mays; identical to SEQ ID NO: 3218
  peptide (1)..(272): Ceres Seq. ID no. 12349945
  misc_feature (74)..(270): Pfam Name: Mitochondrial glycoprotein Pfam Description: Mitochondrial glycoprotein
  misc_feature (1)..(270): Homolog of NCBI NO: 34895730 NR Description: P0019D06.23 [Oryza sativa (japonica
  misc_feature (66)..(272): Homolog of NCBI NO: 11357566 NR Description: hypothetical protein F1I16.10 - Arabidopsis >gi|7263548|emb|CAB81585.1| putative protein [Arabidopsis
  misc_feature (66)..(272): Homolog of NCBI NO: 18410318 NR Description: Expressed protein; protein id: At3g55605.1, by cDNA: 250217. [Arabidopsis thaliana]
  misc_feature (61)..(270): Homolog of NCBI NO: 15239320 NR Description: putative protein; protein id: At5g05990.1, by cDNA: 18108., supported by cDNA: gi_14517390, supported by gi_15450540 [Arabidopsis thaliana] >gi|10177572|dbj|BAB10804.1|
  misc_feature (24)..(271): Homolog of NCBI NO: 34895740 NR Description: P0019D06.28 [Oryza sativa (japonica
  misc_feature (1)..(272): Homolog of NCBI NO: 34895742 NR Description: P0019D06.29 [Oryza sativa (japonica
  misc_feature (6)..(270): Homolog of NCBI NO: 15241669 NR Description: putative protein; protein id: At5g02050.1, by cDNA: 22324. [Arabidopsis thaliana] >gi|11358397|pir||T48226
  misc_feature (6)..(270): Homolog of NCBI NO: 21592321 NR Description: unknown [Arabidopsis thaliana]
  misc_feature (147)..(272): Homolog of NCBI NO: 7487698 NR Description: hypothetical protein At2g39790 [imported] -
  misc_feature (66)..(146): Homolog of NCBI NO: 7487698 NR Description: hypothetical protein At2g39790 [imported] -

SEQ ID NO: 10080 - protein, 270 aa, Zea mays subsp. mays; identical to SEQ ID NO: 3219
  peptide (1)..(270): Ceres Seq. ID no. 12349946
  misc_feature (72)..(268): Pfam Name: Mitochondrial glycoprotein Pfam Description: Mitochondrial glycoprotein
  misc_feature (1)..(270): Homolog of NCBI NO: 34895742 NR Description: P0019D06.29 [Oryza sativa (japonica
  misc_feature (1)..(268): Homolog of NCBI NO: 34895730 NR Description: P0019D06.23 [Oryza sativa (japonica
  misc_feature (64)..(270): Homolog of NCBI NO: 11357566 NR Description: hypothetical protein F1I16.10 - Arabidopsis >gi|7263548|emb|CAB81585.1| putative protein [Arabidopsis
  misc_feature (64)..(270): Homolog of NCBI NO: 18410318 NR Description: Expressed protein; protein id: At3g55605.1, by cDNA: 250217. [Arabidopsis thaliana]
  misc_feature (59)..(268): Homolog of NCBI NO: 15239320 NR Description: putative protein; protein id: At5g05990.1, by cDNA: 18108., supported by cDNA: gi_14517390, supported by gi_15450540 [Arabidopsis thaliana] >gi|10177572|dbj|BAB10804.1|
  misc_feature (22)..(269): Homolog of NCBI NO: 34895740 NR Description: P0019D06.28 [Oryza sativa (japonica
  misc_feature (4)..(268): Homolog of NCBI NO: 15241669 NR Description: putative protein; protein id: At5g02050.1, by cDNA: 22324. [Arabidopsis thaliana] >gi|11358397|pir||T48226
  misc_feature (4)..(268): Homolog of NCBI NO: 21592321 NR Description: unknown [Arabidopsis thaliana]
  misc_feature (145)..(270): Homolog of NCBI NO: 7487698 NR Description: hypothetical protein At2g39790 [imported] -
  misc_feature (64)..(144): Homolog of NCBI NO: 7487698 NR Description: hypothetical protein At2g39790 [imported] -

SEQ ID NO: 10081 - DNA, 1099 bp, Zea mays subsp. mays; identical to SEQ ID NO: 3493
  misc_feature (1)..(1099): Ceres Seq. ID no. 13577617
  misc_feature: MA Experiment ID: 108527 Result: Down-regulated in Transcription
  misc_feature: MA Experiment 108527 PARAMETER Experiment Name: Zm_5mM_NO_P Parameter: Age (day) Value: 8
  misc_feature: MA Experiment 108527 PARAMETER Experiment Name: Zm_5mM_NO_P Parameter: Organism Value: Zea mays
  misc_feature: MA Experiment 108527 PARAMETER Experiment Name: Zm_5mM_NO_P Parameter: Plant Line Value: 35A19
  misc_feature: MA Experiment 108527 PARAMETER Experiment Name: Zm_5mM_NO_P Parameter: Timepoint (hr) Value: 6
  misc_feature: MA Experiment 108527 PARAMETER Experiment Name: Zm_5mM_NO_P Parameter: Tissue Value: Aerial
  misc_feature: MA Experiment 108527 PARAMETER Experiment Name: Zm_5mM_NO_P Parameter: Treatment Value: 5mM NO vs. No Treatment
  misc_feature: MA Experiment ID: 108528 Result: Down-regulated in Transcription
  misc_feature: MA Experiment 108528 PARAMETER Experiment Name: Zm_Imbibed_Seeds_P Parameter: Age (day) Value: 5 vs. 2
  misc_feature: MA Experiment 108528 PARAMETER Experiment Name: Zm_Imbibed_Seeds_P Parameter: Organism Value: Zea mays
  misc_feature: MA Experiment 108528 PARAMETER Experiment Name: Zm_Imbibed_Seeds_P Parameter: Plant Line Value: 35A19
  misc_feature: MA Experiment 108528 PARAMETER Experiment Name: Zm_Imbibed_Seeds_P Parameter: Tissue Value: Aerial vs. Embryo
  misc_feature: MA Experiment ID: 108529 Result: Down-regulated in Transcription
  misc_feature: MA Experiment 108529 PARAMETER Experiment Name: Zm_Imbibed_Seeds_P Parameter: Age (day) Value: 5 vs. 2
  misc_feature: MA Experiment 108529 PARAMETER Experiment Name: Zm_Imbibed_Seeds_P Parameter: Organism Value: Zea mays
  misc_feature: MA Experiment 108529 PARAMETER Experiment Name: Zm_Imbibed_Seeds_P Parameter: Plant Line Value: 35A19
  misc_feature: MA Experiment 108529 PARAMETER Experiment Name: Zm_Imbibed_Seeds_P Parameter: Tissue Value: Roots vs. Embryo
  misc_feature: MA Experiment ID: 108530 Result: Down-regulated in Transcription
  misc_feature: MA Experiment 108530 PARAMETER Experiment Name: Zm_Imbibed_Seeds_P Parameter: Age (day) Value: 6 vs. 2
  misc_feature: MA Experiment 108530 PARAMETER Experiment Name: Zm_Imbibed_Seeds_P Parameter: Organism Value: Zea mays
  misc_feature: MA Experiment 108530 PARAMETER Experiment Name: Zm_Imbibed_Seeds_P Parameter: Plant Line Value: 35A19
  misc_feature: MA Experiment 108530 PARAMETER Experiment Name: Zm_Imbibed_Seeds_P Parameter: Tissue Value: Aerial vs. Embryo
  misc_feature: MA Experiment ID: 108535 Result: Up-regulated in Transcription
  misc_feature: MA Experiment 108535 PARAMETER Experiment Name: Zm_Meristem_P Parameter: Age (day) Value: 8
  misc_feature: MA Experiment 108535 PARAMETER Experiment Name: Zm_Meristem_P Parameter: Organism Value: Zea mays
  misc_feature: MA Experiment 108535 PARAMETER Experiment Name: Zm_Meristem_P Parameter: Plant Line Value: 35A19
  misc_feature: MA Experiment 108535 PARAMETER Experiment Name: Zm_Meristem_P Parameter: Tissue Value: Root Meristem vs. Above Root Meristem
  misc_feature: MA Experiment ID: 108544 Result: Down-regulated in Transcription
  misc_feature: MA Experiment ID: 20000108 Result: Up-regulated in Transcription
  misc_feature: MA Experiment 20000108 PARAMETER Experiment Name: Zm_Root-Tips_P Parameter: Age (day) Value: 12
  misc_feature: MA Experiment 20000108 PARAMETER Experiment Name: Zm_Root-Tips_P Parameter: Organism Value: Zea mays
  misc_feature: MA Experiment 20000108 PARAMETER Experiment Name: Zm_Root-Tips_P Parameter: Tissue Value: Root tips vs. Root mid region    35
  misc_feature: MA Experiment 20000108 PARAMETER Experiment Name: Zm_Root-Tips_P Parameter: Tissue Value: Root tips vs. Root mid region   Sequence Listing-Misc Features (4)
  misc_feature: MA Experiment ID: 20000487 Result: Up-regulated in Transcription
  misc_feature: MA Experiment 20000487 PARAMETER Experiment Name: Zm_50mM_NH4NO3_L_to_H_P Parameter: Organism Value: Zea mays
  misc_feature: MA Experiment 20000487 PARAMETER Experiment Name: Zm_50mM_NH4NO3_L_to_H_P Parameter: Timepoint (hr) Value: 4
  misc_feature: MA Experiment 20000487 PARAMETER Experiment Name: Zm_50mM_NH4NO3_L_to_H_P Parameter: Tissue Value: Leaves
  misc_feature: MA Experiment 20000487 PARAMETER Experiment Name: Zm_50mM_NH4NO3_L_to_H_P Parameter: Treatment Value: 50mM NH4NO3 vs. 100mM Mannitol
  misc_feature: MA Experiment ID: 20000488 Result: Up-regulated in Transcription
  misc_feature: MA Experiment 20000488 PARAMETER Experiment Name: Zm_50mM_NH4NO3_L_to_H_P Parameter: Organism Value: Zea mays
  misc_feature: MA Experiment 20000488 PARAMETER Experiment Name: Zm_50mM_NH4NO3_L_to_H_P Parameter: Timepoint (hr) Value: 8
  misc_feature: MA Experiment 20000488 PARAMETER Experiment Name: Zm_50mM_NH4NO3_L_to_H_P Parameter: Tissue Value: Leaves
  misc_feature: MA Experiment 20000488 PARAMETER Experiment Name: Zm_50mM_NH4NO3_L_to_H_P Parameter: Treatment Value: 50mM NH4NO3 vs. 100mM Mannitol
  misc_feature: MA Experiment ID: 20000492 Result: Up-regulated in Transcription
  misc_feature: MA Experiment 20000492 PARAMETER Experiment Name: Zm_Hybrid_Seed_Dev_P Parameter: DAP Value: 12
  misc_feature: MA Experiment 20000492 PARAMETER Experiment Name: Zm_Hybrid_Seed_Dev_P Parameter: Organism Value: Zea mays
  misc_feature: MA Experiment 20000492 PARAMETER Experiment Name: Zm_Hybrid_Seed_Dev_P Parameter: Plant Line Value: 35A19
  misc_feature: MA Experiment 20000492 PARAMETER Experiment Name: Zm_Hybrid_Seed_Dev_P Parameter: Tissue Value: Fert Kernel vs. Unfert Floret
  misc_feature: MA Experiment ID: 20000535 Result: Up-regulated in Transcription
  misc_feature: MA Experiment 20000535 PARAMETER Experiment Name: Zm_Hybrid_Seed_Dev_P Parameter: DAP Value: 30 vs. 12
  misc_feature: MA Experiment 20000535 PARAMETER Experiment Name: Zm_Hybrid_Seed_Dev_P Parameter: Organism Value: Zea mays
  misc_feature: MA Experiment 20000535 PARAMETER Experiment Name: Zm_Hybrid_Seed_Dev_P Parameter: Plant Line Value: 35A19
  misc_feature: MA Experiment 20000535 PARAMETER Experiment Name: Zm_Hybrid_Seed_Dev_P Parameter: Tissue Value: Embryo vs. Unfert Floret
  misc_feature: MA Experiment ID: 20000632 Result: Down-regulated in Transcription
  misc_feature: MA Experiment 20000632 PARAMETER Experiment Name: Zm_Herbicide-Treatments_P Parameter: Timepoint (hr) Value: 4
  misc_feature: MA Experiment 20000632 PARAMETER Experiment Name: Zm_Herbicide-Treatments_P Parameter: Tissue Value: Aerial
  misc_feature: MA Experiment 20000632 PARAMETER Experiment Name: Zm_Herbicide-Treatments_P Parameter: Treatment Value: Glean vs. No Treatment
  misc_feature: MA Experiment ID: 20000633 Result: Down-regulated in Transcription
  misc_feature: MA Experiment 20000633 PARAMETER Experiment Name: Zm_Herbicide-Treatments_P Parameter: Timepoint (hr) Value: 4
  misc_feature: MA Experiment 20000633 PARAMETER Experiment Name: Zm_Herbicide-Treatments_P Parameter: Tissue Value: Aerial
  misc_feature: MA Experiment 20000633 PARAMETER Experiment Name: Zm_Herbicide-Treatments_P Parameter: Treatment Value: Trimec vs. No Treatment
  misc_feature: MA Experiment ID: 20001613 Result: Up-regulated in Transcription
  misc_feature: MA Experiment 20001613 PARAMETER Experiment Name: Zm_50ppm_KNO3_L-to-H_P Parameter: Age (day) Value: 20
  misc_feature: MA Experiment 20001613 PARAMETER Experiment Name: Zm_50ppm_KNO3_L-to-H_P Parameter: Organism Value: Zea mays
  misc_feature: MA Experiment 20001613 PARAMETER Experiment Name: Zm_50ppm_KNO3_L-to-H_P Parameter: Plant Line Value: 35A19
  misc_feature: MA Experiment 20001613 PARAMETER Experiment Name: Zm_50ppm_KNO3_L-to-H_P Parameter: Timepoint (hr) Value: 24
  misc_feature: MA Experiment 20001613 PARAMETER Experiment Name: Zm_50ppm_KNO3_L-to-H_P Parameter: Tissue Value: Roots
  misc_feature: MA Experiment 20001613 PARAMETER Experiment Name: Zm_50ppm_KNO3_L-to-H_P Parameter: Treatment Value: 50ppm KNO3 vs. 50ppm KCl

SEQ ID NO: 10082 - protein, 296 aa, Zea mays subsp. mays; identical to SEQ ID NO: 3494
  peptide (1)..(296): Ceres Seq. ID no. 13577618
  misc_feature (77)..(272): Pfam Name: Nucleosome assembly protein (NAP) Pfam Description: Nucleosome assembly protein (NAP)
  misc_feature (77)..(272): Pfam Name: Nucleosome assembly protein (NAP) Pfam Description: Nucleosome assembly protein (NAP)
  misc_feature (46)..(296): Homolog of NCBI NO: 14550110 NR Description: nucleosome/chromatin assembly factor A [Zea mays]
  misc_feature (46)..(293): Homolog of NCBI NO: 14550112 NR Description: nucleosome/chromatin assembly factor A [Zea mays]
  misc_feature (46)..(293): Homolog of NCBI NO: 21739223 NR Description: OSJNBa0072F16.2 [Oryza sativa (japonica
  misc_feature (51)..(296): Homolog of NCBI NO: 25354177 NR Description: hypothetical protein F6A14.10 [imported] - thaliana >gi|6730705|gb|AAF27100.1|AC011809_9 Putative phospatase
  misc_feature (51)..(296): Homolog of NCBI NO: 18394656 NR Description: expressed protein [Arabidopsis thaliana] putative SET protein, phospatase 2A inhibitor [Arabidopsis
  misc_feature (46)..(293): Homolog of NCBI NO: 14550112 NR Description: nucleosome/chromatin assembly factor A [Zea mays]
  misc_feature (51)..(296): Homolog of NCBI NO: 25354177 NR Description: hypothetical protein F6A14.10 [imported] - thaliana >gi|6730705|gb|AAF27100.1|AC011809_9 Putative phospatase
  misc_feature (46)..(295): Homolog of NCBI NO: 2144100 NR Description: Set beta isoform - rat >gi|545265|gb|AAC60682.1| beta isoform [Rattus sp.] >gi|12860381|dbj|BAB31936.1| unnamed
  misc_feature (46)..(293): Homolog of NCBI NO: 28279779 NR Description: Similar to SET translocation (myeloid
  misc_feature (46)..(293): Homolog of NCBI NO: 2253411 NR Description: PP2A inhibitor [Tetraodon fluviatilis]
  misc_feature (51)..(273): Homolog of NCBI NO: 26451105 NR Description: unknown protein [Arabidopsis thaliana]
  misc_feature (50)..(296): Homolog of NCBI NO: 15221298 NR Description: SET protein, phospatase 2A inhibitor -related
  misc_feature (51)..(296): Homolog of NCBI NO: 18394656 NR Description: expressed protein [Arabidopsis thaliana] putative SET protein, phospatase 2A inhibitor [Arabidopsis
  misc_feature (46)..(293): Homolog of NCBI NO: 21739223 NR Description: OSJNBa0072F16.2 [Oryza sativa (japonica
  misc_feature (46)..(296): Homolog of NCBI NO: 14550110 NR Description: nucleosome/chromatin assembly factor A [Zea mays]
  misc_feature (50)..(296): Homolog of NCBI NO: 15221298 NR Description: SET protein, phospatase 2A inhibitor -related
  misc_feature (51)..(273): Homolog of NCBI NO: 26451105 NR Description: unknown protein [Arabidopsis thaliana]
  misc_feature (46)..(293): Homolog of NCBI NO: 2253411 NR Description: PP2A inhibitor [Tetraodon fluviatilis]
  misc_feature (46)..(293): Homolog of NCBI NO: 28279779 NR Description: Similar to SET translocation (myeloid
  misc_feature (46)..(295): Homolog of NCBI NO: 2144100 NR Description: Set beta isoform - rat >gi|545265|gb|AAC60682.1| beta isoform [Rattus sp.] >gi|12860381|dbj|BAB31936.1| unnamed

SEQ ID NO: 10083 - protein, 251 aa, Zea mays subsp. mays; identical to SEQ ID NO: 3495
  peptide (1)..(251): Ceres Seq. ID no. 13577619
  misc_feature (32)..(227): Pfam Name: Nucleosome assembly protein (NAP) Pfam Description: Nucleosome assembly protein (NAP)
  misc_feature (32)..(227): Pfam Name: Nucleosome assembly protein (NAP) Pfam Description: Nucleosome assembly protein (NAP)
  misc_feature (1)..(251): Homolog of NCBI NO: 14550110 NR Description: nucleosome/chromatin assembly factor A [Zea mays]
  misc_feature (1)..(248): Homolog of NCBI NO: 14550112 NR Description: nucleosome/chromatin assembly factor A [Zea mays]
  misc_feature (1)..(248): Homolog of NCBI NO: 21739223 NR Description: OSJNBa0072F16.2 [Oryza sativa (japonica
  misc_feature (6)..(251): Homolog of NCBI NO: 25354177 NR Description: hypothetical protein F6A14.10 [imported] - thaliana >gi|6730705|gb|AAF27100.1|AC011809_9 Putative phospatase
  misc_feature (6)..(251): Homolog of NCBI NO: 18394656 NR Description: expressed protein [Arabidopsis thaliana] putative SET protein, phospatase 2A inhibitor [Arabidopsis
  misc_feature (1)..(248): Homolog of NCBI NO: 14550112 NR Description: nucleosome/chromatin assembly factor A [Zea mays]
  misc_feature (6)..(251): Homolog of NCBI NO: 25354177 NR Description: hypothetical protein F6A14.10 [imported] - thaliana >gi|6730705|gb|AAF27100.1|AC011809_9 Putative phospatase
  misc_feature (1)..(250): Homolog of NCBI NO: 2144100 NR Description: Set beta isoform - rat >gi|545265|gb|AAC60682.1| beta isoform [Rattus sp.] >gi|12860381|dbj|BAB31936.1| unnamed
  misc_feature (1)..(248): Homolog of NCBI NO: 28279779 NR Description: Similar to SET translocation (myeloid
  misc_feature (1)..(248): Homolog of NCBI NO: 2253411 NR Description: PP2A inhibitor [Tetraodon fluviatilis]
  misc_feature (6)..(228): Homolog of NCBI NO: 26451105 NR Description: unknown protein [Arabidopsis thaliana]
  misc_feature (5)..(251): Homolog of NCBI NO: 15221298 NR Description: SET protein, phospatase 2A inhibitor -related
  misc_feature (6)..(251): Homolog of NCBI NO: 18394656 NR Description: expressed protein [Arabidopsis thaliana] putative SET protein, phospatase 2A inhibitor [Arabidopsis
  misc_feature (1)..(248): Homolog of NCBI NO: 21739223 NR Description: OSJNBa0072F16.2 [Oryza sativa (japonica
  misc_feature (1)..(251): Homolog of NCBI NO: 14550110 NR Description: nucleosome/chromatin assembly factor A [Zea mays]
  misc_feature (5)..(251): Homolog of NCBI NO: 15221298 NR Description: SET protein, phospatase 2A inhibitor -related
  misc_feature (6)..(228): Homolog of NCBI NO: 26451105 NR Description: unknown protein [Arabidopsis thaliana]
  misc_feature (1)..(248): Homolog of NCBI NO: 2253411 NR Description: PP2A inhibitor [Tetraodon fluviatilis]
  misc_feature (1)..(248): Homolog of NCBI NO: 28279779 NR Description: Similar to SET translocation (myeloid
  misc_feature (1)..(250): Homolog of NCBI NO: 2144100 NR Description: Set beta isoform - rat >gi|545265|gb|AAC60682.1| beta isoform [Rattus sp.] >gi|12860381|dbj|BAB31936.1| unnamed

SEQ ID NO: 10084 - protein, 198 aa, Zea mays subsp. mays; identical to SEQ ID NO: 3496
  peptide (1)..(198): Ceres Seq. ID no. 13577620
  misc_feature (1)..(174): Pfam Name: Nucleosome assembly protein (NAP) Pfam Description: Nucleosome assembly protein (NAP)
  misc_feature (1)..(174): Pfam Name: Nucleosome assembly protein (NAP) Pfam Description: Nucleosome assembly protein (NAP)
  misc_feature (1)..(198): Homolog of NCBI NO: 14550110 NR Description: nucleosome/chromatin assembly factor A [Zea mays]
  misc_feature (1)..(195): Homolog of NCBI NO: 14550112 NR Description: nucleosome/chromatin assembly factor A [Zea mays]
  misc_feature (1)..(195): Homolog of NCBI NO: 21739223 NR Description: OSJNBa0072F16.2 [Oryza sativa (japonica
  misc_feature (1)..(198): Homolog of NCBI NO: 25354177 NR Description: hypothetical protein F6A14.10 [imported] - thaliana >gi|6730705|gb|AAF27100.1|AC011809_9 Putative phospatase
  misc_feature (1)..(198): Homolog of NCBI NO: 18394656 NR Description: expressed protein [Arabidopsis thaliana] putative SET protein, phospatase 2A inhibitor [Arabidopsis
  misc_feature (1)..(195): Homolog of NCBI NO: 14550112 NR Description: nucleosome/chromatin assembly factor A [Zea mays]
  misc_feature (1)..(198): Homolog of NCBI NO: 25354177 NR Description: hypothetical protein F6A14.10 [imported] - thaliana >gi|6730705|gb|AAF27100.1|AC011809_9 Putative phospatase
  misc_feature (1)..(197): Homolog of NCBI NO: 2144100 NR Description: Set beta isoform - rat >gi|545265|gb|AAC60682.1| beta isoform [Rattus sp.] >gi|12860381|dbj|BAB31936.1| unnamed
  misc_feature (1)..(195): Homolog of NCBI NO: 28279779 NR Description: Similar to SET translocation (myeloid
  misc_feature (1)..(195): Homolog of NCBI NO: 2253411 NR Description: PP2A inhibitor [Tetraodon fluviatilis]
  misc_feature (1)..(175): Homolog of NCBI NO: 26451105 NR Description: unknown protein [Arabidopsis thaliana]
  misc_feature (1)..(198): Homolog of NCBI NO: 15221298 NR Description: SET protein, phospatase 2A inhibitor -related
  misc_feature (1)..(198): Homolog of NCBI NO: 18394656 NR Description: expressed protein [Arabidopsis thaliana] putative SET protein, phospatase 2A inhibitor [Arabidopsis
  misc_feature (1)..(195): Homolog of NCBI NO: 21739223 NR Description: OSJNBa0072F16.2 [Oryza sativa (japonica
  misc_feature (1)..(198): Homolog of NCBI NO: 14550110 NR Description: nucleosome/chromatin assembly factor A [Zea mays]
  misc_feature (1)..(198): Homolog of NCBI NO: 15221298 NR Description: SET protein, phospatase 2A inhibitor -related
  misc_feature (1)..(175): Homolog of NCBI NO: 26451105 NR Description: unknown protein [Arabidopsis thaliana]
  misc_feature (1)..(195): Homolog of NCBI NO: 2253411 NR Description: PP2A inhibitor [Tetraodon fluviatilis]
  misc_feature (1)..(195): Homolog of NCBI NO: 28279779 NR Description: Similar to SET translocation (myeloid
  misc_feature (1)..(197): Homolog of NCBI NO: 2144100 NR Description: Set beta isoform - rat >gi|545265|gb|AAC60682.1| beta isoform [Rattus sp.] >gi|12860381|dbj|BAB31936.1| unnamed

SEQ ID NO: 10085 - DNA, 1626 bp, Zea mays subsp. mays
  misc_feature (1)..(1626): Ceres Seq. ID no. 12372619
  misc_feature: MA Experiment ID: 20000492 Result: Up-regulated in Transcription
  misc_feature: MA Experiment 20000492 PARAMETER Experiment Name: Zm_Hybrid_Seed_Dev_P Parameter: DAP Value: 12
  misc_feature: MA Experiment 20000492 PARAMETER Experiment Name: Zm_Hybrid_Seed_Dev_P Parameter: Organism Value: Zea mays
  misc_feature: MA Experiment 20000492 PARAMETER Experiment Name: Zm_Hybrid_Seed_Dev_P Parameter: Plant Line Value: 35A19
  misc_feature: MA Experiment 20000492 PARAMETER Experiment Name: Zm_Hybrid_Seed_Dev_P Parameter: Tissue Value: Fert Kernel vs. Unfert Floret
ctctgattccttcctctcctctcgccccacgcccctctccatctgctcccgctccgcctcgcctagggttttgcccccaaacctagcctcccccgaatctcccacgccatggacgtcgagggcgaggtccccgccgccgccgcggcggcggtggcgaacggcctgggcggcgcgggcgcggaggaggcctctccgtcgccggtctcggctgagcagctcgacgtggaggcgtacgcggcgcagtactcggggcggacccgcctcgtgcgcctcctctttgtcgccgaccggtgcggggtggaggcgatgcagctcgaggcgctgcggatggcttacgacgagatcaagcgcggggaggacgtgcagctccaccgcgacgtcgtcaccaagatcggcggccgcctcggtccgcgctacggcctcgaccaggcgtgggtcttcagcgtctcccgccgcgccgaccagcgcaaggagaagctcgagagcgagctcaatggatacaggactaacttaatcaaagagagcatcagaatgggctacaatgacattggtgatttcttctatgcccatggccaactttcagatgctttcaaaagctacatcaggactcgggactattgcaccacttccaaacatatagttcagatgtgcatgaatgtgattctggttagcattgagctggggcaatatgcacatgtttcaaactatgtcagcaaagcagagcaaacccccgactctctggatcctaccattgttgcaaagctgaaggcagctgcaggattagccaacttggaaacaaagaaatacaaatttgctgctcgtaagtttgttgagacaggaattgaactaggaaacaacttctctgaagtcatagctcctcaagacgtggcagtctatggtgccctttgtgcacttgcttcttttgaccgttcagacctgaagagcaaagtcattgacaatatcaacttccgtaactttctggagctggtgcctgaagtaagggagctggttaatgatttttatgcaagtcgctatggatcttgcttgggtcatcttgagaagctaaagcctaacctgctcctggatatccatttgcatcagcatgtagagactctgtatatggagattcgccacaaagcgatcatacagtacacacttccttttatatctgttgacctcaacacgatggcagccgcctttaagacttcggtctccatgctgcagaaggagctggccgcactgattactgaggacaaaatacaggcccggatagactcccacaacaagatcctttacgcaaggcatgctgaccagagaaatgcaactttccagcgtgtccttcaaaccggcaatgactttgagagagatgtcaagtccatgcttctgcgtgccaacctcctcaagcatgattacattcagaagacaagcggaccaaggaagatgtaaagattgcgggcgtcgctgctaggcaaggcttcctgctgcatgcctctccacttttttttttgaagaattgttctgtgacataaaagggaccgaagtctgtctaaatgccctccccctctttctttttattggttgatgaaagttattgtcgaagtaatgtatggttgagcatctggatgt

SEQ ID NO: 10086 - protein, 445 aa, Zea mays subsp. mays
  peptide (1)..(445): Ceres Seq. ID no. 12372620
  misc_feature (295)..(399): Pfam Name: PCI domain Pfam Description: PCI domain
  misc_feature (1)..(445): Homolog of NCBI NO: 7208213 NR Description: constitutive photomorphogenic 11 [Oryza sativa
  misc_feature (1)..(445): Homolog of NCBI NO: 10443485 NR Description: rCOP11 protein [Oryza sativa]
  misc_feature (23)..(445): Homolog of NCBI NO: 432446 NR Description: FUS6
  misc_feature (23)..(445): Homolog of NCBI NO: 18411857 NR Description: COP9 complex subunit, FUS6; protein id: supported by cDNA: gi_13430765, supported by cDNA: gi_15293244, by cDNA: gi_18056652 [Arabidopsis thaliana]
  misc_feature (23)..(445): Homolog of NCBI NO: 26450149 NR Description: putative FUSCA protein FUS6 [Arabidopsis thaliana]
  misc_feature (23)..(445): Homolog of NCBI NO: 11282867 NR Description: FUSCA PROTEIN FUS6 - Arabidopsis thaliana
  misc_feature (103)..(440): Homolog of NCBI NO: 24666528 NR Description: COP9 complex homolog subunit 1 CG3889-PA
  misc_feature (32)..(89): Homolog of NCBI NO: 24666528 NR Description: COP9 complex homolog subunit 1 CG3889-PA
  misc_feature (103)..(440): Homolog of NCBI NO: 4732103 NR Description: COP9 signalosome subunit 1 CSN1 [Drosophila
  misc_feature (32)..(89): Homolog of NCBI NO: 4732103 NR Description: COP9 signalosome subunit 1 CSN1 [Drosophila
MDVEGEVPAAAAAAVANGLGGAGAEEASPSPVSAEQLDVEAYAAQYSGRTRLVRLLFVADRCGVEAMQLEALRMAYDEIKRGEDVQLHRDVVTKIGGRLGPRYGLDQAWVFSVSRRADQRKEKLESELNGYRTNLIKESIRMGYNDIGDFFYAHGQLSDAFKSYIRTRDYCTTSKHIVQMCMNVILVSIELGQYAHVSNYVSKAEQTPDSLDPTIVAKLKAAAGLANLETKKYKFAARKFVETGIELGNNFSEVIAPQDVAVYGALCALASFDRSDLKSKVIDNINFRNFLELVPEVRELVNDFYASRYGSCLGHLEKLKPNLLLDIHLHQHVETLYMEIRHKAIIQYTLPFISVDLNTMAAAFKTSVSMLQKELAALITEDKIQARIDSHNKILYARHADQRNATFQRVLQTGNDFERDVKSMLLRANLLKHDYIQKTSGPRKM

SEQ ID NO: 10087 - protein, 379 aa, Zea mays subsp. mays
  peptide (1)..(379): Ceres Seq. ID no. 12372621
  misc_feature (229)..(333): Pfam Name: PCI domain Pfam Description: PCI domain
  misc_feature (1)..(379): Homolog of NCBI NO: 7208213 NR Description: constitutive photomorphogenic 11 [Oryza sativa
  misc_feature (1)..(379): Homolog of NCBI NO: 10443485 NR Description: rCOP11 protein [Oryza sativa]
  misc_feature (1)..(379): Homolog of NCBI NO: 432446 NR Description: FUS6
  misc_feature (1)..(379): Homolog of NCBI NO: 18411857 NR Description: COP9 complex subunit, FUS6; protein id: supported by cDNA: gi_13430765, supported by cDNA: gi_15293244, by cDNA: gi_18056652 [Arabidopsis thaliana]
  misc_feature (1)..(379): Homolog of NCBI NO: 26450149 NR Description: putative FUSCA protein FUS6 [Arabidopsis thaliana]
  misc_feature (1)..(379): Homolog of NCBI NO: 11282867 NR Description: FUSCA PROTEIN FUS6 - Arabidopsis thaliana
  misc_feature (37)..(374): Homolog of NCBI NO: 24666528 NR Description: COP9 complex homolog subunit 1 CG3889-PA
  misc_feature (1)..(23): Homolog of NCBI NO: 24666528 NR Description: COP9 complex homolog subunit 1 CG3889-PA
  misc_feature (37)..(374): Homolog of NCBI NO: 4732103 NR Description: COP9 signalosome subunit 1 CSN1 [Drosophila
  misc_feature (1)..(23): Homolog of NCBI NO: 4732103 NR Description: COP9 signalosome subunit 1 CSN1 [Drosophila
MQLEALRMAYDEIKRGEDVQLHRDVVTKIGGRLGPRYGLDQAWVFSVSRRADQRKEKLESELNGYRTNLIKESIRMGYNDIGDFFYAHGQLSDAFKSYIRTRDYCTTSKHIVQMCMNVILVSIELGQYAHVSNYVSKAEQTPDSLDPTIVAKLKAAAGLANLETKKYKFAARKFVETGIELGNNFSEVIAPQDVAVYGALCALASFDRSDLKSKVIDNINFRNFLELVPEVRELVNDFYASRYGSCLGHLEKLKPNLLLDIHLHQHVETLYMEIRHKAIIQYTLPFISVDLNTMAAAFKTSVSMLQKELAALITEDKIQARIDSHNKILYARHADQRNATFQRVLQTGNDFERDVKSMLLRANLLKHDYIQKTSGPRKM

SEQ ID NO: 10088 - protein, 372 aa, Zea mays subsp. mays
  peptide (1)..(372): Ceres Seq. ID no. 12372622
  misc_feature (222)..(326): Pfam Name: PCI domain Pfam Description: PCI domain
  misc_feature (1)..(372): Homolog of NCBI NO: 7208213 NR Description: constitutive photomorphogenic 11 [Oryza sativa
  misc_feature (1)..(372): Homolog of NCBI NO: 10443485 NR Description: rCOP11 protein [Oryza sativa]
  misc_feature (1)..(372): Homolog of NCBI NO: 432446 NR Description: FUS6
  misc_feature (1)..(372): Homolog of NCBI NO: 18411857 NR Description: COP9 complex subunit, FUS6; protein id: supported by cDNA: gi_13430765, supported by cDNA: gi_15293244, by cDNA: gi_18056652 [Arabidopsis thaliana]
  misc_feature (1)..(372): Homolog of NCBI NO: 26450149 NR Description: putative FUSCA protein FUS6 [Arabidopsis thaliana]
  misc_feature (1)..(372): Homolog of NCBI NO: 11282867 NR Description: FUSCA PROTEIN FUS6 - Arabidopsis thaliana
  misc_feature (30)..(367): Homolog of NCBI NO: 24666528 NR Description: COP9 complex homolog subunit 1 CG3889-PA
  misc_feature (1)..(16): Homolog of NCBI NO: 24666528 NR Description: COP9 complex homolog subunit 1 CG3889-PA
  misc_feature (30)..(367): Homolog of NCBI NO: 4732103 NR Description: COP9 signalosome subunit 1 CSN1 [Drosophila
  misc_feature (1)..(16): Homolog of NCBI NO: 4732103 NR Description: COP9 signalosome subunit 1 CSN1 [Drosophila
MAYDEIKRGEDVQLHRDVVTKIGGRLGPRYGLDQAWVFSVSRRADQRKEKLESELNGYRTNLIKESIRMGYNDIGDFFYAHGQLSDAFKSYIRTRDYCTTSKHIVQMCMNVILVSIELGQYAHVSNYVSKAEQTPDSLDPTIVAKLKAAAGLANLETKKYKFAARKFVETGIELGNNFSEVIAPQDVAVYGALCALASFDRSDLKSKVIDNINFRNFLELVPEVRELVNDFYASRYGSCLGHLEKLKPNLLLDIHLHQHVETLYMEIRHKAIIQYTLPFISVDLNTMAAAFKTSVSMLQKELAALITEDKIQARIDSHNKILYARHADQRNATFQRVLQTGNDFERDVKSMLLRANLLKHDYIQKTSGPRKM

SEQ ID NO: 10089 - DNA, 1086 bp, Zea mays subsp. mays
  misc_feature (1)..(1086): Ceres Seq. ID no. 12358654
  misc_feature: MA Experiment ID: 20000535 Result: Up-regulated in Transcription
  misc_feature: MA Experiment 20000535 PARAMETER Experiment Name: Zm_Hybrid_Seed_Dev_P Parameter: DAP Value: 30 vs. 12
  misc_feature: MA Experiment 20000535 PARAMETER Experiment Name: Zm_Hybrid_Seed_Dev_P Parameter: Organism Value: Zea mays
  misc_feature: MA Experiment 20000535 PARAMETER Experiment Name: Zm_Hybrid_Seed_Dev_P Parameter: Plant Line Value: 35A19
  misc_feature: MA Experiment 20000535 PARAMETER Experiment Name: Zm_Hybrid_Seed_Dev_P Parameter: Tissue Value: Embryo vs. Unfert Floret
agtatctggaggaaggacaatgtctaggtcatctgactctgggaaaatgagtaatgatgagaaagaagactttgaagcaaatgaagatgactatatggatgtcgacaagggacatgctagtgacagtgatacagaaaaccgtatgtcagatactgactcagacaatgaaatacacagacctgaaacccctgaaagagagaaggcaccacacaggtgtatcaatatgcttcaagattgcagaagtgttgatgagtttgagaggctcaacaaaattaacgagggcacatatggtgttgtatacagagcaagggataagaagacaagtgagattgttgcattgaagaaggtaaagatggagaaggagcgagaaggtttcccattaacctctcttagggaaataaatatcctcttgtctttccacaatccttcaattgtggatgttaaggaagtagtagttggaagtagtctagatagtatttttatggttatggagtacatggaacatgatcttaaaggtgtcatggagaccatgaaacaaccatatacccaaagcgaggtaaagtgtttgatgcttcagctgctagaaggtgtaaaatatctacatgacaattgggtgcttcatagggatctgaagacctcaaatcttttttgaataaccgtggtgagttaaaaatatgtgattttggactgtctcgtcaatatggaagcccattaaaaccttatactcaactggttgtgactttgtggtacagggccccagaattgttgttaggaacaaaggagtattctactgctattgatatgtggtctgtgggctgtataatggctgagcttcttgccaaagaaccgttattcaatggaaaaacagagtttgaacagctagataagatttttagaacactcggcacacctaatgagaagatttggcctggctatgctaaattaccaggtgtgaaagtaaattttgttaaacaaccgtataatagactaagggataagttcccagccgcttctttttctgggcgaccaatcctgtctgaagctggttttgatctattgaacagactgctgacttatgaccctgat

SEQ ID NO: 10090 - protein, 216 aa, Zea mays subsp. mays
  peptide (1)..(216): Ceres Seq. ID no. 12358655
  misc_feature (85)..(215): Pfam Name: Protein kinase domain Pfam Description: Protein kinase domain
  misc_feature (1)..(215): Homolog of NCBI NO: 38344237 NR Description: OJ991113_30.14 [Oryza sativa (japonica
  misc_feature (9)..(215): Homolog of NCBI NO: 15220477 NR Description: putative protein kinase; protein id: At1g67580.1
  misc_feature (9)..(215): Homolog of NCBI NO: 17064846 NR Description: putative protein kinase [Arabidopsis thaliana]
  misc_feature (16)..(215): Homolog of NCBI NO: 15242731 NR Description: protein kinase; protein id: At5g63370.1, by cDNA: gi_16974578, supported by cDNA: gi_17064769, supported cDNA: gi_20259873 [Arabidopsis thaliana]
  misc_feature (8)..(215): Homolog of NCBI NO: 3978441 NR Description: PITSLRE protein kinase alpha SV9 isoform [Homo
  misc_feature (5)..(215): Homolog of NCBI NO: 34879827 NR Description: similar to cell division cycle 2 homolog (S.
  misc_feature (15)..(215): Homolog of NCBI NO: 507158 NR Description: PITSLRE alpha 1
  misc_feature (15)..(215): Homolog of NCBI NO: 507160 NR Description: PITSLRE alpha 2-2
  misc_feature (15)..(215): Homolog of NCBI NO: 507162 NR Description: PITSLRE alpha 2-3
  misc_feature (15)..(215): Homolog of NCBI NO: 507164 NR Description: PITSLRE alpha 2-4
VSGGRTMSRSSDSGKMSNDEKEDFEANEDDYMDVDKGHASDSDTENRMSDTDSDNEIHRPETPEREKAPHRCINMLQDCRSVDEFERLNKINEGTYGVVYRARDKKTSEIVALKKVKMEKEREGFPLTSLREINILLSFHNPSIVDVKEVVVGSSLDSIFMVMEYMEHDLKGVMETMKQPYTQSEVKCLMLQLLEGVKYLHDNWVLHRDLKTSNLF

SEQ ID NO: 10091 - protein, 210 aa, Zea mays subsp. mays
  peptide (1)..(210): Ceres Seq. ID no. 12358656
  misc_feature (79)..(209): Pfam Name: Protein kinase domain Pfam Description: Protein kinase domain
  misc_feature (1)..(209): Homolog of NCBI NO: 38344237 NR Description: OJ991113_30.14 [Oryza sativa (japonica
  misc_feature (3)..(209): Homolog of NCBI NO: 15220477 NR Description: putative protein kinase; protein id: At1g67580.1
  misc_feature (3)..(209): Homolog of NCBI NO: 17064846 NR Description: putative protein kinase [Arabidopsis thaliana]
  misc_feature (10)..(209): Homolog of NCBI NO: 15242731 NR Description: protein kinase; protein id: At5g63370.1, by cDNA: gi_16974578, supported by cDNA: gi_17064769, supported cDNA: gi_20259873 [Arabidopsis thaliana]
  misc_feature (2)..(209): Homolog of NCBI NO: 3978441 NR Description: PITSLRE protein kinase alpha SV9 isoform [Homo
  misc_feature (1)..(209): Homolog of NCBI NO: 34879827 NR Description: similar to cell division cycle 2 homolog (S.
  misc_feature (9)..(209): Homolog of NCBI NO: 507158 NR Description: PITSLRE alpha 1
  misc_feature (9)..(209): Homolog of NCBI NO: 507160 NR Description: PITSLRE alpha 2-2
  misc_feature (9)..(209): Homolog of NCBI NO: 507168 NR Description: PITSLRE alpha 2-1
  misc_feature (9)..(209): Homolog of NCBI NO: 507164 NR Description: PITSLRE alpha 2-4
MSRSSDSGKMSNDEKEDFEANEDDYMDVDKGHASDSDTENRMSDTDSDNEIHRPETPEREKAPHRCINMLQDCRSVDEFERLNKINEGTYGVVYRARDKKTSEIVALKKVKMEKEREGFPLTSLREINILLSFHNPSIVDVKEVVVGSSLDSIFMVMEYMEHDLKGVMETMKQPYTQSEVKCLMLQLLEGVKYLHDNWVLHRDLKTSNLF

SEQ ID NO: 10092 - protein, 201 aa, Zea mays subsp. mays
  peptide (1)..(201): Ceres Seq. ID no. 12358657
  misc_feature (70)..(200): Pfam Name: Protein kinase domain Pfam Description: Protein kinase domain
  misc_feature (1)..(200): Homolog of NCBI NO: 38344237 NR Description: OJ991113_30.14 [Oryza sativa (japonica
  misc_feature (1)..(200): Homolog of NCBI NO: 15220477 NR Description: putative protein kinase; protein id: At1g67580.1
  misc_feature (1)..(200): Homolog of NCBI NO: 17064846 NR Description: putative protein kinase [Arabidopsis thaliana]
  misc_feature (1)..(200): Homolog of NCBI NO: 15242731 NR Description: protein kinase; protein id: At5g63370.1, by cDNA: gi_16974578, supported by cDNA: gi_17064769, supported cDNA: gi_20259873 [Arabidopsis thaliana]
  misc_feature (1)..(200): Homolog of NCBI NO: 3978441 NR Description: PITSLRE protein kinase alpha SV9 isoform [Homo
  misc_feature (1)..(200): Homolog of NCBI NO: 34879827 NR Description: similar to cell division cycle 2 homolog (S.
  misc_feature (1)..(200): Homolog of NCBI NO: 507158 NR Description: PITSLRE alpha 1
  misc_feature (1)..(200): Homolog of NCBI NO: 507160 NR Description: PITSLRE alpha 2-2
  misc_feature (1)..(200): Homolog of NCBI NO: 507164 NR Description: PITSLRE alpha 2-4
  misc_feature (1)..(200): Homolog of NCBI NO: 507168 NR Description: PITSLRE alpha 2-1
MSNDEKEDFEANEDDYMDVDKGHASDSDTENRMSDTDSDNEIHRPETPEREKAPHRCINMLQDCRSVDEFERLNKINEGTYGVVYRARDKKTSEIVALKKVKMEKEREGFPLTSLREINILLSFHNPSIVDVKEVVVGSSLDSIFMVMEYMEHDLKGVMETMKQPYTQSEVKCLMLQLLEGVKYLHDNWVLHRDLKTSNLF

SEQ ID NO: 10093 - DNA, 2101 bp, Zea mays subsp. mays
  misc_feature (1)..(2101): Ceres Seq. ID no. 12366931
  misc_feature: MA Experiment ID: 108529 Result: Up-regulated in Transcription
  misc_feature: MA Experiment 108529 PARAMETER Experiment Name: Zm_Imbibed_Seeds_P Parameter: Age (day) Value: 5 vs. 2
  misc_feature: MA Experiment 108529 PARAMETER Experiment Name: Zm_Imbibed_Seeds_P Parameter: Organism Value: Zea mays
  misc_feature: MA Experiment 108529 PARAMETER Experiment Name: Zm_Imbibed_Seeds_P Parameter: Plant Line Value: 35A19
  misc_feature: MA Experiment 108529 PARAMETER Experiment Name: Zm_Imbibed_Seeds_P Parameter: Tissue Value: Roots vs. Embryo
  misc_feature: MA Experiment ID: 108534 Result: Up-regulated in Transcription
  misc_feature: MA Experiment 108534 PARAMETER Experiment Name: Zm_4deg_Cold_P Parameter: Age (hr) Value: 8
  misc_feature: MA Experiment 108534 PARAMETER Experiment Name: Zm_4deg_Cold_P Parameter: Organism Value: Zea mays
  misc_feature: MA Experiment 108534 PARAMETER Experiment Name: Zm_4deg_Cold_P Parameter: Plant Line Value: 35A19
  misc_feature: MA Experiment 108534 PARAMETER Experiment Name: Zm_4deg_Cold_P Parameter: Temperature (deg C) Value: 4 vs. 22
  misc_feature: MA Experiment 108534 PARAMETER Experiment Name: Zm_4deg_Cold_P Parameter: Timepoint (hr) Value: 6
  misc_feature: MA Experiment 108534 PARAMETER Experiment Name: Zm_4deg_Cold_P Parameter: Tissue Value: Aerial
  misc_feature: MA Experiment ID: 108535 Result: Down-regulated in Transcription
  misc_feature: MA Experiment 108535 PARAMETER Experiment Name: Zm_Meristem_P Parameter: Age (day) Value: 8
  misc_feature: MA Experiment 108535 PARAMETER Experiment Name: Zm_Meristem_P Parameter: Organism Value: Zea mays
  misc_feature: MA Experiment 108535 PARAMETER Experiment Name: Zm_Meristem_P Parameter: Plant Line Value: 35A19
  misc_feature: MA Experiment 108535 PARAMETER Experiment Name: Zm_Meristem_P Parameter: Tissue Value: Root Meristem vs. Above Root Meristem
  misc_feature: MA Experiment ID: 108542 Result: Up-regulated in Transcription
  misc_feature: MA Experiment 108542 PARAMETER Experiment Name: Zm_150mM_NaCl_P Parameter: Age (day) Value: 8
  misc_feature: MA Experiment 108542 PARAMETER Experiment Name: Zm_150mM_NaCl_P Parameter: Organism Value: Zea mays
  misc_feature: MA Experiment 108542 PARAMETER Experiment Name: Zm_150mM_NaCl_P Parameter: Plant Line Value: 35A19
  misc_feature: MA Experiment 108542 PARAMETER Experiment Name: Zm_150mM_NaCl_P Parameter: Timepoint (hr) Value: 6
  misc_feature: MA Experiment 108542 PARAMETER Experiment Name: Zm_150mM_NaCl_P Parameter: Tissue Value: Aerial
  misc_feature: MA Experiment 108542 PARAMETER Experiment Name: Zm_150mM_NaCl_P Parameter: Treatment Value: 150mM NaCl vs. No Treatment
  misc_feature: MA Experiment ID: 108543 Result: Down-regulated in Transcription
  misc_feature: MA Experiment ID: 108546 Result: Up-regulated in Transcription
  misc_feature: MA Experiment 108546 PARAMETER Experiment Name: Zm_Imbibed_Seeds_P Parameter: Age (day) Value: 3 vs. 2
  misc_feature: MA Experiment 108546 PARAMETER Experiment Name: Zm_Imbibed_Seeds_P Parameter: Organism Value: Zea mays
  misc_feature: MA Experiment 108546 PARAMETER Experiment Name: Zm_Imbibed_Seeds_P Parameter: Plant Line Value: 35A19
  misc_feature: MA Experiment 108546 PARAMETER Experiment Name: Zm_Imbibed_Seeds_P Parameter: Tissue Value: Roots vs. Embryo
  misc_feature: MA Experiment ID: 108559 Result: Up-regulated in Transcription
  misc_feature: MA Experiment 108559 PARAMETER Experiment Name: Zm_5mM_NO_P Parameter: Age (day) Value: 8
  misc_feature: MA Experiment 108559 PARAMETER Experiment Name: Zm_5mM_NO_P Parameter: Organism Value: Zea mays
  misc_feature: MA Experiment 108559 PARAMETER Experiment Name: Zm_5mM_NO_P Parameter: Plant Line Value: 35A19
  misc_feature: MA Experiment 108559 PARAMETER Experiment Name: Zm_5mM_NO_P Parameter: Timepoint (hr) Value: 12
  misc_feature: MA Experiment 108559 PARAMETER Experiment Name: Zm_5mM_NO_P Parameter: Tissue Value: Aerial
  misc_feature: MA Experiment 108559 PARAMETER Experiment Name: Zm_5mM_NO_P Parameter: Treatment Value: 5mM NO vs. No Treatment
  misc_feature: MA Experiment ID: 20000488 Result: Down-regulated in Transcription
  misc_feature: MA Experiment 20000488 PARAMETER Experiment Name: Zm_50mM_NH4NO3_L_to_H_P Parameter: Organism Value: Zea mays
  misc_feature: MA Experiment 20000488 PARAMETER Experiment Name: Zm_50mM_NH4NO3_L_to_H_P Parameter: Timepoint (hr) Value: 8
  misc_feature: MA Experiment 20000488 PARAMETER Experiment Name: Zm_50mM_NH4NO3_L_to_H_P Parameter: Tissue Value: Leaves
  misc_feature: MA Experiment 20000488 PARAMETER Experiment Name: Zm_50mM_NH4NO3_L_to_H_P Parameter: Treatment Value: 50mM NH4NO3 vs. 100mM Mannitol
  misc_feature: MA Experiment ID: 20000492 Result: Down-regulated in Transcription
  misc_feature: MA Experiment 20000492 PARAMETER Experiment Name: Zm_Hybrid_Seed_Dev_P Parameter: DAP Value: 12
  misc_feature: MA Experiment 20000492 PARAMETER Experiment Name: Zm_Hybrid_Seed_Dev_P Parameter: Organism Value: Zea mays
  misc_feature: MA Experiment 20000492 PARAMETER Experiment Name: Zm_Hybrid_Seed_Dev_P Parameter: Plant Line Value: 35A19
  misc_feature: MA Experiment 20000492 PARAMETER Experiment Name: Zm_Hybrid_Seed_Dev_P Parameter: Tissue Value: Fert Kernel vs. Unfert Floret
  misc_feature: MA Experiment ID: 20000535 Result: Down-regulated in Transcription
  misc_feature: MA Experiment 20000535 PARAMETER Experiment Name: Zm_Hybrid_Seed_Dev_P Parameter: DAP Value: 30 vs. 12
  misc_feature: MA Experiment 20000535 PARAMETER Experiment Name: Zm_Hybrid_Seed_Dev_P Parameter: Organism Value: Zea mays
  misc_feature: MA Experiment 20000535 PARAMETER Experiment Name: Zm_Hybrid_Seed_Dev_P Parameter: Plant Line Value: 35A19
  misc_feature: MA Experiment 20000535 PARAMETER Experiment Name: Zm_Hybrid_Seed_Dev_P Parameter: Tissue Value: Embryo vs. Unfert Floret
  misc_feature: MA Experiment ID: 20000629 Result: Down-regulated in Transcription
  misc_feature: MA Experiment 20000629 PARAMETER Experiment Name: Zm_Herbicide-Treatments_P Parameter: Timepoint (hr) Value: 12
  misc_feature: MA Experiment 20000629 PARAMETER Experiment Name: Zm_Herbicide-Treatments_P Parameter: Tissue Value: Aerial
  misc_feature: MA Experiment 20000629 PARAMETER Experiment Name: Zm_Herbicide-Treatments_P Parameter: Treatment Value: Trimec vs. No Treatment
agctggattggatatttggactagtgttcttcttggcttggccacccgcctactccgtcttcttcatacgagacaagccgtgcgcttcttcttggcctagcccttcgagcagggcaggagaggaggccactctgactgtcactctgagcttcgcgtcacctgagtactgacggacgacatgggagaagttgaggacatgtacacccaagacgggaccgtggacatgaaagggaatcccgccgtgaagaagggcaccggcaactggcgcgcctgcccctacatcctcgcgaacgagtgctgcgagaggctggcttactatggcatgagcaccaacctggtgaactacatgaagacccgacttggccaggtgaactccgttgcctccaacaacgtcaccaactggcaagggacgtgctacatcacgccgctcatcggcgccttcttcgccgacgcgtacatggggaggttctggaccatcgccatcttcatgatcatctacattttcggcctggcgctgctgacgatggcttcgtcggtgaaggggctggtgcctacgtcgtgcggcgacaaggatgtgtgccacccgacggacgcgcaggcggcggtggtgttcgtggcgctgtacctcatcgcgctgggcacgggcgggatcaagccgtgcgtgtcctccttcggcgccgaccagttcgacgagaacgacgagcgggagaagaagagcaagagctccttcttcaactggttctacttctccatcaacatcggcgcgctggtggcgtccacagtgctggtgtacgtgcagacgcacgtgggctggggctggggcttcggcatccccgccgtggtcatggccatcgccgtcggcagcttcttcgtgggcacgccgctgtacaggcaccagaagcccgggggcagcccgctgacgcgcatcgcgcaggtgctcgtcgcgtgcgcgcgcaagtggaacgtggccgtgcccgcggacaagtcgcggctgcacgagacggtggacggggagtccggcatcgaggggagccgcaagctggagcactcggagcagctggcgtgcctcgacagggctgccgtggtgacggccgaggacggcgcggaggcgagcccgtggcgcctgtgctcggtgacgcaggtggaggagctcaagagcgtgatccggctgctgcccatctgggccagcgggatcgtgttcgcggcggtgtactcgcagatgagcaccatgttcgtgctgcagggtaacacgctggaccagagcatggggccccggttcaagatcccctcggcgacgctgtccatggtggacaccatcagcgtcatcgtctgggtcccccgtgtacgaccgcgccatcgtgcccctggtgcgctcctacaccgggaggccgcgcgggttcacgcagctgcagcgcatgggcatcggcctcgtcgtctccatcttctccatggtggcggcgggcgtgctggacatcgtgcggctgcgcgccatcgcgcggcacggcctgtacggcgaggacgacatcgtgcccatctccatcttctggcagataccgcagtacttcatcatcgggtgcgcggaggtgttcaccttcgtggggcagctggagttcttctacgaccaggcgcccgacgccatgaggagcatgtgctccgcgctgtcgctcaccaccgtcgcgctcggcaactacctcagcacggtcctggtgaccatcgtcacccacatcaccaccaggcacggccgcatcgggtggatcccggagaacctcaaccgcggccacctcgactacttcttctggctgctcgccgtgctcagccttctcaacttccttgcctacctcgtcatcgccagctggtacaagtacaagaagacggccgatgattaccctggcgccaaaggggagcacggtacagagcactgatgggcgagatggcggaaatggagtgatttctatgtgtggttagctgtctgtcgacttgttttgccacagtttgggtgcttaaacgttaacgtacgtactagttcaatatagtgtctcgggggcgaattggttgtttacatgtcatgtgtttatatatgcgcaatgttcgatctcagtgg

SEQ ID NO: 10094 - protein, 567 aa, Zea mays subsp. mays
  peptide (1)..(567): Ceres Seq. ID no. 12366932
  misc_feature (97)..(387): Pfam Name: POT family Pfam Description: POT family
  misc_feature (1)..(387): Homolog of NCBI NO: 6409176 NR Description: nitrate transporter [Oryza sativa]
  misc_feature (1)..(387): Homolog of NCBI NO: 7489404 NR Description: peptide transport protein - barley
  misc_feature (3)..(387): Homolog of NCBI NO: 15232435 NR Description: peptide transport - like protein; protein id: supported by cDNA: 117581., supported by cDNA: gi_13430485,
  misc_feature (1)..(387): Homolog of NCBI NO: 15240905 NR Description: oligopeptide transporter - like protein; protein At5g01180.1 [Arabidopsis thaliana] >gi|11358593|pir||T45958
  misc_feature (8)..(387): Homolog of NCBI NO: 15076661 NR Description: peptide transporter [Oryza sativa (japonica >gi|15076663|dbj|BAB62327.1| peptide transporter [Oryza sativa
  misc_feature (3)..(387): Homolog of NCBI NO: 4102839 NR Description: LeOPT1 [Lycopersicon esculentum]
  misc_feature (60)..(387): Homolog of NCBI NO: 28973642 NR Description: putative oligopeptide transporter protein
  misc_feature (3)..(387): Homolog of NCBI NO: 15226861 NR Description: histidine transport protein (PTR2-B); protein id: supported by cDNA: gi_13937184, supported by cDNA: gi_633939
  misc_feature (3)..(387): Homolog of NCBI NO: 1076331 NR Description: histidine transport protein - Arabidopsis thaliana
  misc_feature (3)..(387): Homolog of NCBI NO: 6635838 NR Description: amino acid/peptide transporter [Prunus dulcis]
MGEVEDMYTQDGTVDMKGNPAVKKGTGNWRACPYILANECCERLAYYGMSTNLVNYMKTRLGQVNSVASNNVTNWQGTCYITPLIGAFFADAYMGRFWTIAIFMIIYIFGLALLTMASSVKGLVPTSCGDKDVCHPTDAQAAVVFVALYLIALGTGGIKPCVSSFGADQFDENDEREKKSKSSFFNWFYFSINIGALVASTVLVYVQTHVGWGWGFGIPAVVMAIAVGSFFVGTPLYRHQKPGGSPLTRIAQVLVACARKWNVAVPADKSRLHETVDGESGIEGSRKLEHSEQLACLDRAAVVTAEDGAEASPWRLCSVTQVEELKSVIRLLPIWASGIVFAAVYSQMSTMFVLQGNTLDQSMGPRFKIPSATLSMVDTISVIVWVPRVRPRHRAPGALLHREAARVHAAAAHGHRPRRLHLLHGGGGRAGHRAAARHRAARPVRRGRHRAHLHLLADTAVLHHRVRGGVHLRGAAGVLLRPGARRHEEHVLRAVAHHRRARQLPQHGPGDHRHPHHHQARPHRVDPGEPQPRPPRLLLLAARRAQPSQLPCLPRHRQLVQVQEDGR

SEQ ID NO: 10095 - protein, 561 aa, Zea mays subsp. mays
  peptide (1)..(561): Ceres Seq. ID no. 12366933
  misc_feature (91)..(381): Pfam Name: POT family Pfam Description: POT family
  misc_feature (1)..(381): Homolog of NCBI NO: 7489404 NR Description: peptide transport protein - barley
  misc_feature (1)..(381): Homolog of NCBI NO: 15232435 NR Description: peptide transport - like protein; protein id: supported by cDNA: 117581., supported by cDNA: gi_13430485,
  misc_feature (1)..(381): Homolog of NCBI NO: 15240905 NR Description: oligopeptide transporter - like protein; protein At5g01180.1 [Arabidopsis thaliana] >gi|11358593|pir||T45958
  misc_feature (2)..(381): Homolog of NCBI NO: 15076661 NR Description: peptide transporter [Oryza sativa (japonica >gi|15076663|dbj|BAB62327.1| peptide transporter [Oryza sativa
  misc_feature (1)..(381): Homolog of NCBI NO: 4102839 NR Description: LeOPT1 [Lycopersicon esculentum]
  misc_feature (54)..(381): Homolog of NCBI NO: 28973642 NR Description: putative oligopeptide transporter protein
  misc_feature (1)..(381): Homolog of NCBI NO: 15226861 NR Description: histidine transport protein (PTR2-B); protein id: supported by cDNA: gi_13937184, supported by cDNA: gi_633939
  misc_feature (1)..(381): Homolog of NCBI NO: 1076331 NR Description: histidine transport protein - Arabidopsis thaliana
  misc_feature (1)..(381): Homolog of NCBI NO: 6635838 NR Description: amino acid/peptide transporter [Prunus dulcis]
  misc_feature (1)..(381): Homolog of NCBI NO: 6409176 NR Description: nitrate transporter [Oryza sativa]
MYTQDGTVDMKGNPAVKKGTGNWRACPYILANECCERLAYYGMSTNLVNYMKTRLGQVNSVASNNVTNWQGTCYITPLIGAFFADAYMGRFWTIAIFMIIYIFGLALLTMASSVKGLVPTSCGDKDVCHPTDAQAAVVFVALYLIALGTGGIKPCVSSFGADQFDENDEREKKSKSSFFNWFYFSINIGALVASTVLVYVQTHVGWGWGFGIPAVVMAIAVGSFFVGTPLYRHQKPGGSPLTRIAQVLVACARKWNVAVPADKSRLHETVDGESGIEGSRKLEHSEQLACLDRAAVVTAEDGAEASPWRLCSVTQVEELKSVIRLLPIWASGIVFAAVYSQMSTMFVLQGNTLDQSMGPRFKIPSATLSMVDTISVIVWVPRVRPRHRAPGALLHREAARVHAAAAHGHRPRRLHLLHGGGGRAGHRAAARHRAARPVRRGRHRAHLHLLADTAVLHHRVRGGVHLRGAAGVLLRPGARRHEEHVLRAVAHHRRARQLPQHGPGDHRHPHHHQARPHRVDPGEPQPRPPRLLLLAARRAQPSQLPCLPRHRQLVQVQEDGR

SEQ ID NO: 10096 - protein, 552 aa, Zea mays subsp. mays
  peptide (1)..(552): Ceres Seq. ID no. 12366934
  misc_feature (82)..(372): Pfam Name: POT family Pfam Description: POT family
  misc_feature (1)..(372): Homolog of NCBI NO: 7489404 NR Description: peptide transport protein - barley
  misc_feature (1)..(372): Homolog of NCBI NO: 15232435 NR Description: peptide transport - like protein; protein id: supported by cDNA: 117581., supported by cDNA: gi_13430485,
  misc_feature (1)..(372): Homolog of NCBI NO: 15240905 NR Description: oligopeptide transporter - like protein; protein At5g01180.1 [Arabidopsis thaliana] >gi|11358593|pir||T45958
  misc_feature (1)..(372): Homolog of NCBI NO: 15076661 NR Description: peptide transporter [Oryza sativa (japonica >gi|15076663|dbj|BAB62327.1| peptide transporter [Oryza sativa
  misc_feature (1)..(372): Homolog of NCBI NO: 4102839 NR Description: LeOPT1 [Lycopersicon esculentum]
  misc_feature (45)..(372): Homolog of NCBI NO: 28973642 NR Description: putative oligopeptide transporter protein
  misc_feature (1)..(372): Homolog of NCBI NO: 15226861 NR Description: histidine transport protein (PTR2-B); protein id: supported by cDNA: gi_13937184, supported by cDNA: gi_633939
  misc_feature (1)..(372): Homolog of NCBI NO: 1076331 NR Description: histidine transport protein - Arabidopsis thaliana
  misc_feature (1)..(372): Homolog of NCBI NO: 6635838 NR Description: amino acid/peptide transporter [Prunus dulcis]
  misc_feature (1)..(372): Homolog of NCBI NO: 6409176 NR Description: nitrate transporter [Oryza sativa]
MKGNPAVKKGTGNWRACPYILANECCERLAYYGMSTNLVNYMKTRLGQVNSVASNNVTNWQGTCYITPLIGAFFADAYMGRFWTIAIFMIIYIFGLALLTMASSVKGLVPTSCGDKDVCHPTDAQAAVVFVALYLIALGTGGIKPCVSSFGADQFDENDEREKKSKSSFFNWFYFSINIGALVASTVLVYVQTHVGWGWGFGIPAVVMAIAVGSFFVGTPLYRHQKPGGSPLTRIAQVLVACARKWNVAVPADKSRLHETVDGESGIEGSRKLEHSEQLACLDRAAVVTAEDGAEASPWRLCSVTQVEELKSVIRLLPIWASGIVFAAVYSQMSTMFVLQGNTLDQSMGPRFKIPSATLSMVDTISVIVWVPRVRPRHRAPGALLHREAARVHAAAAHGHRPRRLHLLHGGGGRAGHRAAARHRAARPVRRGRHRAHLHLLADTAVLHHRVRGGVHLRGAAGVLLRPGARRHEEHVLRAVAHHRRARQLPQHGPGDHRHPHHHQARPHRVDPGEPQPRPPRLLLLAARRAQPSQLPCLPRHRQLVQVQEDGR

SEQ ID NO: 10097 - DNA, 1461 bp, Zea mays subsp. mays
  misc_feature (1)..(1461): Ceres Seq. ID no. 12353132
  misc_feature: MA Experiment ID: 108535 Result: Up-regulated in Transcription
  misc_feature: MA Experiment 108535 PARAMETER Experiment Name: Zm_Meristem_P Parameter: Age (day) Value: 8
  misc_feature: MA Experiment 108535 PARAMETER Experiment Name: Zm_Meristem_P Parameter: Organism Value: Zea mays
  misc_feature: MA Experiment 108535 PARAMETER Experiment Name: Zm_Meristem_P Parameter: Plant Line Value: 35A19
  misc_feature: MA Experiment 108535 PARAMETER Experiment Name: Zm_Meristem_P Parameter: Tissue Value: Root Meristem vs. Above Root Meristem
  misc_feature: MA Experiment ID: 108544 Result: Down-regulated in Transcription
  misc_feature: MA Experiment ID: 108556 Result: Down-regulated in Transcription
  misc_feature: MA Experiment 108556 PARAMETER Experiment Name: Zm_Drought_P Parameter: Age (day) Value: 9
  misc_feature: MA Experiment 108556 PARAMETER Experiment Name: Zm_Drought_P Parameter: Organism Value: Zea mays
  misc_feature: MA Experiment 108556 PARAMETER Experiment Name: Zm_Drought_P Parameter: Plant Line Value: 35A19
  misc_feature: MA Experiment 108556 PARAMETER Experiment Name: Zm_Drought_P Parameter: Timepoint (hr) Value: 24
  misc_feature: MA Experiment 108556 PARAMETER Experiment Name: Zm_Drought_P Parameter: Tissue Value: Aerial
  misc_feature: MA Experiment 108556 PARAMETER Experiment Name: Zm_Drought_P Parameter: Treatment Value: Drought vs. No Drought
  misc_feature: MA Experiment ID: 20000478 Result: Down-regulated in Transcription
  misc_feature: MA Experiment 20000478 PARAMETER Experiment Name: Zm_5mM_SA_P Parameter: Age (day) Value: 11
  misc_feature: MA Experiment 20000478 PARAMETER Experiment Name: Zm_5mM_SA_P Parameter: Organism Value: Zea mays
  misc_feature: MA Experiment 20000478 PARAMETER Experiment Name: Zm_5mM_SA_P Parameter: Plant Line Value: 35A19
  misc_feature: MA Experiment 20000478 PARAMETER Experiment Name: Zm_5mM_SA_P Parameter: Timepoint (hr) Value: 72
  misc_feature: MA Experiment 20000478 PARAMETER Experiment Name: Zm_5mM_SA_P Parameter: Tissue Value: Aerial
  misc_feature: MA Experiment 20000478 PARAMETER Experiment Name: Zm_5mM_SA_P Parameter: Treatment Value: 5mM SA vs. No Treatment
  misc_feature: MA Experiment ID: 20000492 Result: Up-regulated in Transcription
  misc_feature: MA Experiment 20000492 PARAMETER Experiment Name: Zm_Hybrid_Seed_Dev_P Parameter: DAP Value: 12
  misc_feature: MA Experiment 20000492 PARAMETER Experiment Name: Zm_Hybrid_Seed_Dev_P Parameter: Organism Value: Zea mays
  misc_feature: MA Experiment 20000492 PARAMETER Experiment Name: Zm_Hybrid_Seed_Dev_P Parameter: Plant Line Value: 35A19
  misc_feature: MA Experiment 20000492 PARAMETER Experiment Name: Zm_Hybrid_Seed_Dev_P Parameter: Tissue Value: Fert Kernel vs. Unfert Floret
  misc_feature: MA Experiment ID: 20000535 Result: Up-regulated in Transcription
  misc_feature: MA Experiment 20000535 PARAMETER Experiment Name: Zm_Hybrid_Seed_Dev_P Parameter: DAP Value: 30 vs. 12
  misc_feature: MA Experiment 20000535 PARAMETER Experiment Name: Zm_Hybrid_Seed_Dev_P Parameter: Organism Value: Zea mays
  misc_feature: MA Experiment 20000535 PARAMETER Experiment Name: Zm_Hybrid_Seed_Dev_P Parameter: Plant Line Value: 35A19
  misc_feature: MA Experiment 20000535 PARAMETER Experiment Name: Zm_Hybrid_Seed_Dev_P Parameter: Tissue Value: Embryo vs. Unfert Floret
  misc_feature: MA Experiment ID: 20000632 Result: Down-regulated in Transcription
  misc_feature: MA Experiment 20000632 PARAMETER Experiment Name: Zm_Herbicide-Treatments_P Parameter: Timepoint (hr) Value: 4
  misc_feature: MA Experiment 20000632 PARAMETER Experiment Name: Zm_Herbicide-Treatments_P Parameter: Tissue Value: Aerial
  misc_feature: MA Experiment 20000632 PARAMETER Experiment Name: Zm_Herbicide-Treatments_P Parameter: Treatment Value: Glean vs. No Treatment
actagttcagcacttcagccttcactccactccaccacagtccacgcagcccaccgaaatggggaagctgctccctcgccacccttcccccctcctcctcctcgccgcggcgatctgcatctccagcagcagcctcgcggccgtccggggcgcgccggtgtaccgcgcggactacctggtggacgggaaccagctggtggacatgcagtaccacatgggccccgtcgtgtccgggacgccgaccaacctctacctcatctggtacgggcggtgggaggccgcggcgcaggccgtgctccgggacttcctcgcctcgctctcggccccggccccgttcccggccgtctccgactggtgggcgcgcacgccgcggatgtacgcggaccagacgggcgccaacgtgacgggcgccttcgccgtcgccggggagcactccgacgccgggtactcccacggcgcgtcgctccggcgcatcgacgtgcagtccgtgatccggtcggcggtgtacgcgtacccggacccgctgccgctggacccctacagcggggcgtacctggtgctgacgtcccccgacgtgcaggtggacgagttctgccgcgccgtctgcggcttccactacttcaccttcgcgtccgtggtcggggtcacggtgccctacgcctgggtcgggaacagcgccacgcagtgcccgggcaagtgcgcgtacccgttcgccgccgccgccgagtacggcgccgggggagcccagccccaggcggtgctgcggccgcccaacggcgacgctggggtggacgggatggtgatcgtgctggggcacgagctggcggagatgtccacgaacccgctggtgaacgcgtggtacgccggggacacgcccacggcgccgaccgagatcgcggacctgtgcctgggcgtgtacggtgatggcggcggcgcgggcggcctggtcgggaacgtgtcccgcgcgcccgatggcagcgcctacaacgtcaacggcgtcaacggccggcggttcctcgtgcagtggctctggaaccccgtccgcggcgcctgctacggccccaactccagcaactgacccgagtcgtcgctaggggcgagggcggttggaggacgcctcatgccattctgctggattgaatggcattgcagaaatccatggcggtttcaatggatggagacagcgttcgtccacttccctgtccgttcagggaatggtccacaggagacgggacgaggatcagatgatgaagccgacccagtaatttgaagctgcactgcatgagacacatcgtgtggatcctgcctgatctatctgcagttcggtaggaaacaacgagaaaatgccattttgttgttcgttttttttaccttgatttccgggactcgaattttgtttcagctcccgagccagcatctcttgcttgctgaaacaaagtggtcgcctgatcgattgctttc

SEQ ID NO: 10098 - protein, 358 aa, Zea mays subsp. mays
  peptide (1)..(358): Ceres Seq. ID no. 12353133
  misc_feature (68)..(355): Pfam Name: Phosphate-induced protein 1 conserved region Pfam Description: Phosphate-induced protein 1 conserved region
  misc_feature (30)..(358): Homolog of NCBI NO: 34901824 NR Description: putative phi-1(phosphate-induced protein 1)
  misc_feature (63)..(358): Homolog of NCBI NO: 18403760 NR Description: Expressed protein; protein id: At2g35150.1, by cDNA: 37897. [Arabidopsis thaliana]
  misc_feature (63)..(358): Homolog of NCBI NO: 25408357 NR Description: hypothetical protein At2g35150 [imported] -
  misc_feature (63)..(356): Homolog of NCBI NO: 18398352 NR Description: expressed protein; protein id: At2g17230.1, by cDNA: 641., supported by cDNA: gi_16604329, supported by cDNA: [Arabidopsis thaliana] >gi|25371899|pir||F84549
  misc_feature (63)..(356): Homolog of NCBI NO: 21594010 NR Description: unknown [Arabidopsis thaliana]
  misc_feature (63)..(356): Homolog of NCBI NO: 11875173 NR Description: contains ESTs
  misc_feature (53)..(356): Homolog of NCBI NO: 15242118 NR Description: putative protein; protein id: At5g51550.1, by cDNA: 33455., supported by cDNA: gi_16226761, supported by gi_16604526 [Arabidopsis thaliana] >gi|9758197|dbj|BAB08671.1|
  misc_feature (53)..(356): Homolog of NCBI NO: 16604527 NR Description: AT5g51550/K17N15_10 [Arabidopsis thaliana]
  misc_feature (53)..(356): Homolog of NCBI NO: 21592873 NR Description: unknown [Arabidopsis thaliana]
  misc_feature (57)..(351): Homolog of NCBI NO: 15219504 NR Description: phosphate-induced (phi-1) protein, putative; id: At1g35140.1, supported by cDNA: 118937., supported by cDNA:
LVQHFSLHSTPPQSTQPTEMGKLLPRHPSPLLLLAAAICISSSSLAAVRGAPVYRADYLVDGNQLVDMQYHMGPVVSGTPTNLYLIWYGRWEAAAQAVLRDFLASLSAPAPFPAVSDWWARTPRMYADQTGANVTGAFAVAGEHSDAGYSHGASLRRIDVQSVIRSAVYAYPDPLPLDPYSGAYLVLTSPDVQVDEFCRAVCGFHYFTFASVVGVTVPYAWVGNSATQCPGKCAYPFAAAAEYGAGGAQPQAVLRPPNGDAGVDGMVIVLGHELAEMSTNPLVNAWYAGDTPTAPTEIADLCLGVYGDGGGAGGLVGNVSRAPDGSAYNVNGVNGRRFLVQWLWNPVRGACYGPNSSN

SEQ ID NO: 10099 - protein, 339 aa, Zea mays subsp. mays
  peptide (1)..(339): Ceres Seq. ID no. 12353134
  misc_feature (49)..(336): Pfam Name: Phosphate-induced protein 1 conserved region Pfam Description: Phosphate-induced protein 1 conserved region
  misc_feature (11)..(339): Homolog of NCBI NO: 34901824 NR Description: putative phi-1(phosphate-induced protein 1)
  misc_feature (44)..(339): Homolog of NCBI NO: 18403760 NR Description: Expressed protein; protein id: At2g35150.1, by cDNA: 37897. [Arabidopsis thaliana]
  misc_feature (44)..(339): Homolog of NCBI NO: 25408357 NR Description: hypothetical protein At2g35150 [imported] -
  misc_feature (44)..(337): Homolog of NCBI NO: 18398352 NR Description: expressed protein; protein id: At2g17230.1, by cDNA: 641., supported by cDNA: gi_16604329, supported by cDNA: [Arabidopsis thaliana] >gi|25371899|pir||F84549
  misc_feature (44)..(337): Homolog of NCBI NO: 21594010 NR Description: unknown [Arabidopsis thaliana]
  misc_feature (44)..(337): Homolog of NCBI NO: 11875173 NR Description: contains ESTs
  misc_feature (34)..(337): Homolog of NCBI NO: 15242118 NR Description: putative protein; protein id: At5g51550.1, by cDNA: 33455., supported by cDNA: gi_16226761, supported by gi_16604526 [Arabidopsis thaliana] >gi|9758197|dbj|BAB08671.1|
  misc_feature (34)..(337): Homolog of NCBI NO: 16604527 NR Description: AT5g51550/K17N15_10 [Arabidopsis thaliana]
  misc_feature (34)..(337): Homolog of NCBI NO: 21592873 NR Description: unknown [Arabidopsis thaliana]
  misc_feature (38)..(332): Homolog of NCBI NO: 15219504 NR Description: phosphate-induced (phi-1) protein, putative; id: At1g35140.1, supported by cDNA: 118937., supported by cDNA:
MGKLLPRHPSPLLLLAAAICISSSSLAAVRGAPVYRADYLVDGNQLVDMQYHMGPVVSGTPTNLYLIWYGRWEAAAQAVLRDFLASLSAPAPFPAVSDWWARTPRMYADQTGANVTGAFAVAGEHSDAGYSHGASLRRIDVQSVIRSAVYAYPDPLPLDPYSGAYLVLTSPDVQVDEFCRAVCGFHYFTFASVVGVTVPYAWVGNSATQCPGKCAYPFAAAAEYGAGGAQPQAVLRPPNGDAGVDGMVIVLGHELAEMSTNPLVNAWYAGDTPTAPTEIADLCLGVYGDGGGAGGLVGNVSRAPDGSAYNVNGVNGRRFLVQWLWNPVRGACYGPNSSN

SEQ ID NO: 10100 - protein, 307 aa, Zea mays subsp. mays
  peptide (1)..(307): Ceres Seq. ID no. 12353135
  misc_feature (195)..(307): Pfam Name: Cupin Pfam Description: Cupin
  misc_feature (35)..(290): Homolog of NCBI NO: 23103936 NR Description: hypothetical protein [Azotobacter vinelandii]
TSSALQPSLHSTTVHAAHRNGEAAPSPPFPPPPPRRGDLHLQQQPRGRPGRAGVPRGLPGGREPAGGHAVPHGPRRVRDADQPLPHLVRAVGGRGAGRAPGLPRLALGPGPVPGRLRLVGAHAADVRGPDGRQRDGRLRRRRGALRRRVLPRRVAPAHRRAVRDPVGGVRVPGPAAAGPLQRGVPGADVPRRAGGRVLPRRLRLPLLHLRVRGRGHGALRLGREQRHAVPGQVRVPVRRRRRVRRRGSPAPGGAAAAQRRRWGGRDGDRAGARAGGDVHEPAGERVVRRGHAHGADRDRGPVPGRVR

SEQ ID NO: 10101 - DNA, 1772 bp, Zea mays subsp. mays
  misc_feature (1)..(1772): Ceres Seq. ID no. 13496422
  misc_feature: MA Experiment ID: 108529 Result: Up-regulated in Transcription
  misc_feature: MA Experiment 108529 PARAMETER Experiment Name: Zm_Imbibed_Seeds_P Parameter: Age (day) Value: 5 vs. 2
  misc_feature: MA Experiment 108529 PARAMETER Experiment Name: Zm_Imbibed_Seeds_P Parameter: Organism Value: Zea mays
  misc_feature: MA Experiment 108529 PARAMETER Experiment Name: Zm_Imbibed_Seeds_P Parameter: Plant Line Value: 35A19
  misc_feature: MA Experiment 108529 PARAMETER Experiment Name: Zm_Imbibed_Seeds_P Parameter: Tissue Value: Roots vs. Embryo
  misc_feature: MA Experiment ID: 108535 Result: Down-regulated in Transcription
  misc_feature: MA Experiment 108535 PARAMETER Experiment Name: Zm_Meristem_P Parameter: Age (day) Value: 8
  misc_feature: MA Experiment 108535 PARAMETER Experiment Name: Zm_Meristem_P Parameter: Organism Value: Zea mays
  misc_feature: MA Experiment 108535 PARAMETER Experiment Name: Zm_Meristem_P Parameter: Plant Line Value: 35A19
  misc_feature: MA Experiment 108535 PARAMETER Experiment Name: Zm_Meristem_P Parameter: Tissue Value: Root Meristem vs. Above Root Meristem
  misc_feature: MA Experiment ID: 108543 Result: Up-regulated in Transcription
  misc_feature: MA Experiment ID: 108546 Result: Up-regulated in Transcription
  misc_feature: MA Experiment 108546 PARAMETER Experiment Name: Zm_Imbibed_Seeds_P Parameter: Age (day) Value: 3 vs. 2
  misc_feature: MA Experiment 108546 PARAMETER Experiment Name: Zm_Imbibed_Seeds_P Parameter: Organism Value: Zea mays
  misc_feature: MA Experiment 108546 PARAMETER Experiment Name: Zm_Imbibed_Seeds_P Parameter: Plant Line Value: 35A19
  misc_feature: MA Experiment 108546 PARAMETER Experiment Name: Zm_Imbibed_Seeds_P Parameter: Tissue Value: Roots vs. Embryo
  misc_feature: MA Experiment ID: 108689 Result: Up-regulated in Transcription
  misc_feature: MA Experiment 108689 PARAMETER Experiment Name: Zm_Drought_Roots_P Parameter: Age (day) Value: 9
  misc_feature: MA Experiment 108689 PARAMETER Experiment Name: Zm_Drought_Roots_P Parameter: Organism Value: Zea mays
  misc_feature: MA Experiment 108689 PARAMETER Experiment Name: Zm_Drought_Roots_P Parameter: Plant Line Value: 35A19
  misc_feature: MA Experiment 108689 PARAMETER Experiment Name: Zm_Drought_Roots_P Parameter: Timepoint (hr) Value: 24
  misc_feature: MA Experiment 108689 PARAMETER Experiment Name: Zm_Drought_Roots_P Parameter: Tissue Value: Roots
  misc_feature: MA Experiment 108689 PARAMETER Experiment Name: Zm_Drought_Roots_P Parameter: Treatment Value: Drought vs. No Drought
  misc_feature: MA Experiment ID: 20000477 Result: Down-regulated in Transcription
  misc_feature: MA Experiment 20000477 PARAMETER Experiment Name: Zm_5mM_SA_P Parameter: Age (day) Value: 10
  misc_feature: MA Experiment 20000477 PARAMETER Experiment Name: Zm_5mM_SA_P Parameter: Organism Value: Zea mays
  misc_feature: MA Experiment 20000477 PARAMETER Experiment Name: Zm_5mM_SA_P Parameter: Plant Line Value: 35A19
  misc_feature: MA Experiment 20000477 PARAMETER Experiment Name: Zm_5mM_SA_P Parameter: Timepoint (hr) Value: 48
  misc_feature: MA Experiment 20000477 PARAMETER Experiment Name: Zm_5mM_SA_P Parameter: Tissue Value: Aerial
  misc_feature: MA Experiment 20000477 PARAMETER Experiment Name: Zm_5mM_SA_P Parameter: Treatment Value: 5mM SA vs. No Treatment
  misc_feature: MA Experiment ID: 20000478 Result: Down-regulated in Transcription
  misc_feature: MA Experiment 20000478 PARAMETER Experiment Name: Zm_5mM_SA_P Parameter: Age (day) Value: 11
  misc_feature: MA Experiment 20000478 PARAMETER Experiment Name: Zm_5mM_SA_P Parameter: Organism Value: Zea mays
  misc_feature: MA Experiment 20000478 PARAMETER Experiment Name: Zm_5mM_SA_P Parameter: Plant Line Value: 35A19
  misc_feature: MA Experiment 20000478 PARAMETER Experiment Name: Zm_5mM_SA_P Parameter: Timepoint (hr) Value: 72
  misc_feature: MA Experiment 20000478 PARAMETER Experiment Name: Zm_5mM_SA_P Parameter: Tissue Value: Aerial
  misc_feature: MA Experiment 20000478 PARAMETER Experiment Name: Zm_5mM_SA_P Parameter: Treatment Value: 5mM SA vs. No Treatment
  misc_feature: MA Experiment ID: 20000479 Result: Down-regulated in Transcription
  misc_feature: MA Experiment 20000479 PARAMETER Experiment Name: Zm_Drought_P Parameter: Age (day) Value: 10
  misc_feature: MA Experiment 20000479 PARAMETER Experiment Name: Zm_Drought_P Parameter: Organism Value: Zea mays
  misc_feature: MA Experiment 20000479 PARAMETER Experiment Name: Zm_Drought_P Parameter: Plant Line Value: 35A19
  misc_feature: MA Experiment 20000479 PARAMETER Experiment Name: Zm_Drought_P Parameter: Timepoint (hr) Value: 48
  misc_feature: MA Experiment 20000479 PARAMETER Experiment Name: Zm_Drought_P Parameter: Tissue Value: Aerial
  misc_feature: MA Experiment 20000479 PARAMETER Experiment Name: Zm_Drought_P Parameter: Treatment Value: Drought vs. No Drought
  misc_feature: MA Experiment ID: 20000488 Result: Down-regulated in Transcription
  misc_feature: MA Experiment 20000488 PARAMETER Experiment Name: Zm_50mM_NH4NO3_L_to_H_P Parameter: Organism Value: Zea mays
  misc_feature: MA Experiment 20000488 PARAMETER Experiment Name: Zm_50mM_NH4NO3_L_to_H_P Parameter: Timepoint (hr) Value: 8
  misc_feature: MA Experiment 20000488 PARAMETER Experiment Name: Zm_50mM_NH4NO3_L_to_H_P Parameter: Tissue Value: Leaves
  misc_feature: MA Experiment 20000488 PARAMETER Experiment Name: Zm_50mM_NH4NO3_L_to_H_P Parameter: Treatment Value: 50mM NH4NO3 vs. 100mM Mannitol
ccattacctagaacatcctaatcgaaaaactactcgatggaaccagcaacatgggccgcgttcctcggcattgccctttgcgcagcggcagcgctcttccttttgcgtggccggcgcccggtctacaaccccccgccgggccccaagccatggccgatcatcggcaaccttaacctcatgggcgagctgccccaccgctccatgaacgagctctccaagcggtacggtccgctcatgcagctctggttcgggtcgttgcctgttgtcgtcggcgcgtccgccgagatggcaaagctcttcctcaagaccaacgacgcggcgttctccgaccggccgaggttcgcagtcggcaagtacaccgcgtacgactgctccggccttctgtgggctccttttgagccgtacctgcgccaggcacgcaggatctgcgccaccgagctcttcagcgccacgcggctcgagtccttcgagcacatccgcgacgaggaggtgcgcgtgatgctccgacagctgcgccaagcggctgggcgcaccgtgcggcttagggactacctgcagatgttggcgctcggcgtgatctcgcgcatagttctgggcaagaagtacgtcatggaggaggcggcggacggtgagggggactcagcgccggcgataacgcctgccgagttcagggagatggtggacgagttcttcgcgcttcacggtgcgtttaacattggtgattatatcccttggctagattggctggacctgcagggctacgttgctaggatgaagagaatgaaggcgaggtttggtcgattcctggaacgagtcttggacgtgcacaacgagcggcgactacgcgagggagggaactttgtggcaaaggatatgttggacgtgctgctgcagctggccgatgacactagtcttgaagtccagctcagcagggacaatgttaaggctatcacacaggacctaatcatcgcaggcacggatagtaatgcaaacacgctggagtgggctgtctcggagctcctcaagaaccctaagatcttagccaaggccatggaggagctgaaccatgtcatagggccggaccgactggtgacggaaagcgacctccctcgcctcccctacatcgaggctgtgctcaaggagaccatgcgcgtgcaccctgccgcgccgatgctggcaccccacgtggcccgcgaggacacatccgtggacggatacgacgtgctcgctggcacggtcttgttcatcaacgtgtgggcaatcggccgcgaccctggactgtgggacgcgccggaggagttccggccggagcggttcgtcgagagcaagatcgacgtgaggggccatgacttccagctgctgccgttcggctctggccggcgaatgtgccccgggatcaacctcgcgctaaaggtgatggctttgagtcttgccaatctgctacacggcttcgagtggaggcttccggacggcgtgacggcagaggagctgagcatggatgaggccttcaagctcgcggtaccgcgtaaattcccgctcatggtcgtggccgagcccaggttgccagctcgcctgtatactggcgcttgatgccagtacgtgtcttcggttgttggcatgcgtggagtatagcacatgattttcagctcttggaactttgttttaataaaacacaaatatatgtgttatgttggttagatgaatgtgaatataaagttgacaacctaggtaattcgaacccctattggtatataattttactttatttttgc

SEQ ID NO: 10102 - protein, 517 aa, Zea mays subsp. mays
  peptide (1)..(517): Ceres Seq. ID no. 13496423
  misc_feature (33)..(501): Pfam Name: Cytochrome P450 Pfam Description: Cytochrome P450
  misc_feature (1)..(517): Homolog of NCBI NO: 18377404 NR Description: cytochrome P450 monooxygenase CYP92A1 [Zea mays
  misc_feature (5)..(515): Homolog of NCBI NO: 14423327 NR Description: elicitor-inducible cytochrome P450 [Nicotiana
  misc_feature (1)..(501): Homolog of NCBI NO: 7430637 NR Description: cytochrome P450 - common tobacco
  misc_feature (5)..(515): Homolog of NCBI NO: 7430636 NR Description: probable cytochrome P450, - common tobacco >gi|1171579|emb|CAA64635.1| cytochrome P450
  misc_feature (16)..(498): Homolog of NCBI NO: 12004682 NR Description: cytochrome P450 [Pisum sativum]
  misc_feature (21)..(516): Homolog of NCBI NO: 27151498 NR Description: Flavonoid 3'-monooxygenase (Flavonoid
  misc_feature (8)..(515): Homolog of NCBI NO: 37694931 NR Description: flavonoid 3'-hydroxylase [Ipomoea purpurea]
  misc_feature (33)..(514): Homolog of NCBI NO: 12231880 NR Description: putative flavonoid 3'-hydroxylase [Callistephus
  misc_feature (12)..(514): Homolog of NCBI NO: 12231882 NR Description: flavonoid 3',5'-hydroxylase [Callistephus
  misc_feature (13)..(514): Homolog of NCBI NO: 12231914 NR Description: flavonoid 3'-hydroxylase [Pelargonium x hortorum]
MEPATWAAFLGIALCAAAALFLLRGRRPVYNPPPGPKPWPIIGNLNLMGELPHRSMNELSKRYGPLMQLWFGSLPVVVGASAEMAKLFLKTNDAAFSDRPRFAVGKYTAYDCSGLLWAPFEPYLRQARRICATELFSATRLESFEHIRDEEVRVMLRQLRQAAGRTVRLRDYLQMLALGVISRIVLGKKYVMEEAADGEGDSAPAITPAEFREMVDEFFALHGAFNIGDYIPWLDWLDLQGYVARMKRMKARFGRFLERVLDVHNERRLREGGNFVAKDMLDVLLQLADDTSLEVQLSRDNVKAITQDLIIAGTDSNANTLEWAVSELLKNPKILAKAMEELNHVIGPDRLVTESDLPRLPYIEAVLKETMRVHPAAPMLAPHVAREDTSVDGYDVLAGTVLFINVWAIGRDPGLWDAPEEFRPERFVESKIDVRGHDFQLLPFGSGRRMCPGINLALKVMALSLANLLHGFEWRLPDGVTAEELSMDEAFKLAVPRKFPLMVVAEPRLPARLYTGA

SEQ ID NO: 10103 - protein, 470 aa, Zea mays subsp. mays
  peptide (1)..(470): Ceres Seq. ID no. 13496424
  misc_feature (1)..(454): Pfam Name: Cytochrome P450 Pfam Description: Cytochrome P450
  misc_feature (1)..(470): Homolog of NCBI NO: 18377404 NR Description: cytochrome P450 monooxygenase CYP92A1 [Zea mays
  misc_feature (1)..(468): Homolog of NCBI NO: 14423327 NR Description: elicitor-inducible cytochrome P450 [Nicotiana
  misc_feature (1)..(454): Homolog of NCBI NO: 7430637 NR Description: cytochrome P450 - common tobacco
  misc_feature (1)..(468): Homolog of NCBI NO: 7430636 NR Description: probable cytochrome P450, - common tobacco >gi|1171579|emb|CAA64635.1| cytochrome P450
  misc_feature (1)..(451): Homolog of NCBI NO: 12004682 NR Description: cytochrome P450 [Pisum sativum]
  misc_feature (1)..(469): Homolog of NCBI NO: 27151498 NR Description: Flavonoid 3'-monooxygenase (Flavonoid
  misc_feature (1)..(468): Homolog of NCBI NO: 37694931 NR Description: flavonoid 3'-hydroxylase [Ipomoea purpurea]
  misc_feature (1)..(467): Homolog of NCBI NO: 12231880 NR Description: putative flavonoid 3'-hydroxylase [Callistephus
  misc_feature (1)..(467): Homolog of NCBI NO: 12231882 NR Description: flavonoid 3',5'-hydroxylase [Callistephus
  misc_feature (1)..(467): Homolog of NCBI NO: 12231914 NR Description: flavonoid 3'-hydroxylase [Pelargonium x hortorum]
MGELPHRSMNELSKRYGPLMQLWFGSLPVVVGASAEMAKLFLKTNDAAFSDRPRFAVGKYTAYDCSGLLWAPFEPYLRQARRICATELFSATRLESFEHIRDEEVRVMLRQLRQAAGRTVRLRDYLQMLALGVISRIVLGKKYVMEEAADGEGDSAPAITPAEFREMVDEFFALHGAFNIGDYIPWLDWLDLQGYVARMKRMKARFGRFLERVLDVHNERRLREGGNFVAKDMLDVLLQLADDTSLEVQLSRDNVKAITQDLIIAGTDSNANTLEWAVSELLKNPKILAKAMEELNHVIGPDRLVTESDLPRLPYIEAVLKETMRVHPAAPMLAPHVAREDTSVDGYDVLAGTVLFINVWAIGRDPGLWDAPEEFRPERFVESKIDVRGHDFQLLPFGSGRRMCPGINLALKVMALSLANLLHGFEWRLPDGVTAEELSMDEAFKLAVPRKFPLMVVAEPRLPARLYTGA

SEQ ID NO: 10104 - protein, 462 aa, Zea mays subsp. mays
  peptide (1)..(462): Ceres Seq. ID no. 13496425
  misc_feature (1)..(446): Pfam Name: Cytochrome P450 Pfam Description: Cytochrome P450
  misc_feature (1)..(462): Homolog of NCBI NO: 18377404 NR Description: cytochrome P450 monooxygenase CYP92A1 [Zea mays
  misc_feature (1)..(460): Homolog of NCBI NO: 14423327 NR Description: elicitor-inducible cytochrome P450 [Nicotiana
  misc_feature (1)..(446): Homolog of NCBI NO: 7430637 NR Description: cytochrome P450 - common tobacco
  misc_feature (1)..(460): Homolog of NCBI NO: 7430636 NR Description: probable cytochrome P450, - common tobacco >gi|1171579|emb|CAA64635.1| cytochrome P450
  misc_feature (1)..(443): Homolog of NCBI NO: 12004682 NR Description: cytochrome P450 [Pisum sativum]
  misc_feature (1)..(461): Homolog of NCBI NO: 27151498 NR Description: Flavonoid 3'-monooxygenase (Flavonoid
  misc_feature (1)..(460): Homolog of NCBI NO: 37694931 NR Description: flavonoid 3'-hydroxylase [Ipomoea purpurea]
  misc_feature (1)..(459): Homolog of NCBI NO: 12231880 NR Description: putative flavonoid 3'-hydroxylase [Callistephus
  misc_feature (1)..(459): Homolog of NCBI NO: 12231882 NR Description: flavonoid 3',5'-hydroxylase [Callistephus
  misc_feature (1)..(459): Homolog of NCBI NO: 12231914 NR Description: flavonoid 3'-hydroxylase [Pelargonium x hortorum]
MNELSKRYGPLMQLWFGSLPVVVGASAEMAKLFLKTNDAAFSDRPRFAVGKYTAYDCSGLLWAPFEPYLRQARRICATELFSATRLESFEHIRDEEVRVMLRQLRQAAGRTVRLRDYLQMLALGVISRIVLGKKYVMEEAADGEGDSAPAITPAEFREMVDEFFALHGAFNIGDYIPWLDWLDLQGYVARMKRMKARFGRFLERVLDVHNERRLREGGNFVAKDMLDVLLQLADDTSLEVQLSRDNVKAITQDLIIAGTDSNANTLEWAVSELLKNPKILAKAMEELNHVIGPDRLVTESDLPRLPYIEAVLKETMRVHPAAPMLAPHVAREDTSVDGYDVLAGTVLFINVWAIGRDPGLWDAPEEFRPERFVESKIDVRGHDFQLLPFGSGRRMCPGINLALKVMALSLANLLHGFEWRLPDGVTAEELSMDEAFKLAVPRKFPLMVVAEPRLPARLYTGA

SEQ ID NO: 10105 - DNA, 1573 bp, Zea mays subsp. mays
  misc_feature (1)..(1573): Ceres Seq. ID no. 12366004
  misc_feature: MA Experiment ID: 108504 Result: Down-regulated in Transcription
  misc_feature: MA Experiment 108504 PARAMETER Experiment Name: Zm_Drought_P Parameter: Age (day) Value: 8
  misc_feature: MA Experiment 108504 PARAMETER Experiment Name: Zm_Drought_P Parameter: Organism Value: Zea mays
  misc_feature: MA Experiment 108504 PARAMETER Experiment Name: Zm_Drought_P Parameter: Plant Line Value: 35A19
  misc_feature: MA Experiment 108504 PARAMETER Experiment Name: Zm_Drought_P Parameter: Timepoint (hr) Value: 12
  misc_feature: MA Experiment 108504 PARAMETER Experiment Name: Zm_Drought_P Parameter: Tissue Value: Aerial
  misc_feature: MA Experiment 108504 PARAMETER Experiment Name: Zm_Drought_P Parameter: Treatment Value: Drought vs. No Drought
  misc_feature: MA Experiment ID: 108522 Result: Down-regulated in Transcription
  misc_feature: MA Experiment 108522 PARAMETER Experiment Name: Zm_42deg_Heat_P Parameter: Age (day) Value: 8
  misc_feature: MA Experiment 108522 PARAMETER Experiment Name: Zm_42deg_Heat_P Parameter: Organism Value: Zea mays
  misc_feature: MA Experiment 108522 PARAMETER Experiment Name: Zm_42deg_Heat_P Parameter: Plant Line Value: 35A19
  misc_feature: MA Experiment 108522 PARAMETER Experiment Name: Zm_42deg_Heat_P Parameter: Temperature (deg C) Value: 42 vs. 22
  misc_feature: MA Experiment 108522 PARAMETER Experiment Name: Zm_42deg_Heat_P Parameter: Timepoint (hr) Value: 1
  misc_feature: MA Experiment 108522 PARAMETER Experiment Name: Zm_42deg_Heat_P Parameter: Tissue Value: Aerial
  misc_feature: MA Experiment ID: 108527 Result: Down-regulated in Transcription
  misc_feature: MA Experiment 108527 PARAMETER Experiment Name: Zm_5mM_NO_P Parameter: Age (day) Value: 8
  misc_feature: MA Experiment 108527 PARAMETER Experiment Name: Zm_5mM_NO_P Parameter: Organism Value: Zea mays
  misc_feature: MA Experiment 108527 PARAMETER Experiment Name: Zm_5mM_NO_P Parameter: Plant Line Value: 35A19
  misc_feature: MA Experiment 108527 PARAMETER Experiment Name: Zm_5mM_NO_P Parameter: Timepoint (hr) Value: 6
  misc_feature: MA Experiment 108527 PARAMETER Experiment Name: Zm_5mM_NO_P Parameter: Tissue Value: Aerial
  misc_feature: MA Experiment 108527 PARAMETER Experiment Name: Zm_5mM_NO_P Parameter: Treatment Value: 5mM NO vs. No Treatment
  misc_feature: MA Experiment ID: 108535 Result: Down-regulated in Transcription
  misc_feature: MA Experiment 108535 PARAMETER Experiment Name: Zm_Meristem_P Parameter: Age (day) Value: 8
  misc_feature: MA Experiment 108535 PARAMETER Experiment Name: Zm_Meristem_P Parameter: Organism Value: Zea mays
  misc_feature: MA Experiment 108535 PARAMETER Experiment Name: Zm_Meristem_P Parameter: Plant Line Value: 35A19
  misc_feature: MA Experiment 108535 PARAMETER Experiment Name: Zm_Meristem_P Parameter: Tissue Value: Root Meristem vs. Above Root Meristem
  misc_feature: MA Experiment ID: 108536 Result: Up-regulated in Transcription
  misc_feature: MA Experiment 108536 PARAMETER Experiment Name: Zm_Meristem_P Parameter: Age (day) Value: 8
  misc_feature: MA Experiment 108536 PARAMETER Experiment Name: Zm_Meristem_P Parameter: Organism Value: Zea mays
  misc_feature: MA Experiment 108536 PARAMETER Experiment Name: Zm_Meristem_P Parameter: Plant Line Value: 35A19
  misc_feature: MA Experiment 108536 PARAMETER Experiment Name: Zm_Meristem_P Parameter: Tissue Value: Shoot Meristem vs. Above Shoot Meristem
  misc_feature: MA Experiment ID: 108544 Result: Up-regulated in Transcription
  misc_feature: MA Experiment ID: 108556 Result: Down-regulated in Transcription
  misc_feature: MA Experiment 108556 PARAMETER Experiment Name: Zm_Drought_P Parameter: Age (day) Value: 9
  misc_feature: MA Experiment 108556 PARAMETER Experiment Name: Zm_Drought_P Parameter: Organism Value: Zea mays
  misc_feature: MA Experiment 108556 PARAMETER Experiment Name: Zm_Drought_P Parameter: Plant Line Value: 35A19
  misc_feature: MA Experiment 108556 PARAMETER Experiment Name: Zm_Drought_P Parameter: Timepoint (hr) Value: 24
  misc_feature: MA Experiment 108556 PARAMETER Experiment Name: Zm_Drought_P Parameter: Tissue Value: Aerial
  misc_feature: MA Experiment 108556 PARAMETER Experiment Name: Zm_Drought_P Parameter: Treatment Value: Drought vs. No Drought
  misc_feature: MA Experiment ID: 108559 Result: Down-regulated in Transcription
  misc_feature: MA Experiment 108559 PARAMETER Experiment Name: Zm_5mM_NO_P Parameter: Age (day) Value: 8
  misc_feature: MA Experiment 108559 PARAMETER Experiment Name: Zm_5mM_NO_P Parameter: Organism Value: Zea mays
  misc_feature: MA Experiment 108559 PARAMETER Experiment Name: Zm_5mM_NO_P Parameter: Plant Line Value: 35A19
  misc_feature: MA Experiment 108559 PARAMETER Experiment Name: Zm_5mM_NO_P Parameter: Timepoint (hr) Value: 12
  misc_feature: MA Experiment 108559 PARAMETER Experiment Name: Zm_5mM_NO_P Parameter: Tissue Value: Aerial
  misc_feature: MA Experiment 108559 PARAMETER Experiment Name: Zm_5mM_NO_P Parameter: Treatment Value: 5mM NO vs. No Treatment
  misc_feature: MA Experiment ID: 108597 Result: Down-regulated in Transcription
  misc_feature: MA Experiment 108597 PARAMETER Experiment Name: Zm_100uM_ABA_P Parameter: Age (day) Value: 9
  misc_feature: MA Experiment 108597 PARAMETER Experiment Name: Zm_100uM_ABA_P Parameter: Organism Value: Zea mays
  misc_feature: MA Experiment 108597 PARAMETER Experiment Name: Zm_100uM_ABA_P Parameter: Plant Line Value: 35A19
  misc_feature: MA Experiment 108597 PARAMETER Experiment Name: Zm_100uM_ABA_P Parameter: Timepoint (hr) Value: 24
  misc_feature: MA Experiment 108597 PARAMETER Experiment Name: Zm_100uM_ABA_P Parameter: Tissue Value: Aerial
  misc_feature: MA Experiment 108597 PARAMETER Experiment Name: Zm_100uM_ABA_P Parameter: Treatment Value: 100uM ABA vs. No Treatment
  misc_feature: MA Experiment ID: 108688 Result: Down-regulated in Transcription
  misc_feature: MA Experiment 108688 PARAMETER Experiment Name: Zm_Embryos-Flowers__P Parameter: Tissue Value: Immature Flowers vs. Aerial+
  misc_feature: MA Experiment ID: 108689 Result: Down-regulated in Transcription
  misc_feature: MA Experiment 108689 PARAMETER Experiment Name: Zm_Drought_Roots_P Parameter: Age (day) Value: 9
  misc_feature: MA Experiment 108689 PARAMETER Experiment Name: Zm_Drought_Roots_P Parameter: Organism Value: Zea mays
  misc_feature: MA Experiment 108689 PARAMETER Experiment Name: Zm_Drought_Roots_P Parameter: Plant Line Value: 35A19
  misc_feature: MA Experiment 108689 PARAMETER Experiment Name: Zm_Drought_Roots_P Parameter: Timepoint (hr) Value: 24
  misc_feature: MA Experiment 108689 PARAMETER Experiment Name: Zm_Drought_Roots_P Parameter: Tissue Value: Roots
  misc_feature: MA Experiment 108689 PARAMETER Experiment Name: Zm_Drought_Roots_P Parameter: Treatment Value: Drought vs. No Drought
  misc_feature: MA Experiment ID: 20000108 Result: Down-regulated in Transcription
  misc_feature: MA Experiment 20000108 PARAMETER Experiment Name: Zm_Root-Tips_P Parameter: Age (day) Value: 12
  misc_feature: MA Experiment 20000108 PARAMETER Experiment Name: Zm_Root-Tips_P Parameter: Organism Value: Zea mays
  misc_feature: MA Experiment 20000108 PARAMETER Experiment Name: Zm_Root-Tips_P Parameter: Tissue Value: Root tips vs. Root mid region    35
  misc_feature: MA Experiment 20000108 PARAMETER Experiment Name: Zm_Root-Tips_P Parameter: Tissue Value: Root tips vs. Root mid region   Sequence Listing-Misc Features (4)
  misc_feature: MA Experiment ID: 20000477 Result: Down-regulated in Transcription
  misc_feature: MA Experiment 20000477 PARAMETER Experiment Name: Zm_5mM_SA_P Parameter: Age (day) Value: 10
  misc_feature: MA Experiment 20000477 PARAMETER Experiment Name: Zm_5mM_SA_P Parameter: Organism Value: Zea mays
  misc_feature: MA Experiment 20000477 PARAMETER Experiment Name: Zm_5mM_SA_P Parameter: Plant Line Value: 35A19
  misc_feature: MA Experiment 20000477 PARAMETER Experiment Name: Zm_5mM_SA_P Parameter: Timepoint (hr) Value: 48
  misc_feature: MA Experiment 20000477 PARAMETER Experiment Name: Zm_5mM_SA_P Parameter: Tissue Value: Aerial
  misc_feature: MA Experiment 20000477 PARAMETER Experiment Name: Zm_5mM_SA_P Parameter: Treatment Value: 5mM SA vs. No Treatment
  misc_feature: MA Experiment ID: 20000478 Result: Down-regulated in Transcription
  misc_feature: MA Experiment 20000478 PARAMETER Experiment Name: Zm_5mM_SA_P Parameter: Age (day) Value: 11
  misc_feature: MA Experiment 20000478 PARAMETER Experiment Name: Zm_5mM_SA_P Parameter: Organism Value: Zea mays
  misc_feature: MA Experiment 20000478 PARAMETER Experiment Name: Zm_5mM_SA_P Parameter: Plant Line Value: 35A19
  misc_feature: MA Experiment 20000478 PARAMETER Experiment Name: Zm_5mM_SA_P Parameter: Timepoint (hr) Value: 72
  misc_feature: MA Experiment 20000478 PARAMETER Experiment Name: Zm_5mM_SA_P Parameter: Tissue Value: Aerial
  misc_feature: MA Experiment 20000478 PARAMETER Experiment Name: Zm_5mM_SA_P Parameter: Treatment Value: 5mM SA vs. No Treatment
  misc_feature: MA Experiment ID: 20000479 Result: Down-regulated in Transcription
  misc_feature: MA Experiment 20000479 PARAMETER Experiment Name: Zm_Drought_P Parameter: Age (day) Value: 10
  misc_feature: MA Experiment 20000479 PARAMETER Experiment Name: Zm_Drought_P Parameter: Organism Value: Zea mays
  misc_feature: MA Experiment 20000479 PARAMETER Experiment Name: Zm_Drought_P Parameter: Plant Line Value: 35A19
  misc_feature: MA Experiment 20000479 PARAMETER Experiment Name: Zm_Drought_P Parameter: Timepoint (hr) Value: 48
  misc_feature: MA Experiment 20000479 PARAMETER Experiment Name: Zm_Drought_P Parameter: Tissue Value: Aerial
  misc_feature: MA Experiment 20000479 PARAMETER Experiment Name: Zm_Drought_P Parameter: Treatment Value: Drought vs. No Drought
  misc_feature: MA Experiment ID: 20000480 Result: Down-regulated in Transcription
  misc_feature: MA Experiment 20000480 PARAMETER Experiment Name: Zm_Drought_P Parameter: Age (day) Value: 11
  misc_feature: MA Experiment 20000480 PARAMETER Experiment Name: Zm_Drought_P Parameter: Organism Value: Zea mays
  misc_feature: MA Experiment 20000480 PARAMETER Experiment Name: Zm_Drought_P Parameter: Plant Line Value: 35A19
  misc_feature: MA Experiment 20000480 PARAMETER Experiment Name: Zm_Drought_P Parameter: Timepoint (hr) Value: 72
  misc_feature: MA Experiment 20000480 PARAMETER Experiment Name: Zm_Drought_P Parameter: Tissue Value: Aerial
  misc_feature: MA Experiment 20000480 PARAMETER Experiment Name: Zm_Drought_P Parameter: Treatment Value: Drought vs. No Drought
  misc_feature: MA Experiment ID: 20000488 Result: Down-regulated in Transcription
  misc_feature: MA Experiment 20000488 PARAMETER Experiment Name: Zm_50mM_NH4NO3_L_to_H_P Parameter: Organism Value: Zea mays
  misc_feature: MA Experiment 20000488 PARAMETER Experiment Name: Zm_50mM_NH4NO3_L_to_H_P Parameter: Timepoint (hr) Value: 8
  misc_feature: MA Experiment 20000488 PARAMETER Experiment Name: Zm_50mM_NH4NO3_L_to_H_P Parameter: Tissue Value: Leaves
  misc_feature: MA Experiment 20000488 PARAMETER Experiment Name: Zm_50mM_NH4NO3_L_to_H_P Parameter: Treatment Value: 50mM NH4NO3 vs. 100mM Mannitol
  misc_feature: MA Experiment ID: 20000534 Result: Down-regulated in Transcription
  misc_feature: MA Experiment 20000534 PARAMETER Experiment Name: Zm_Hybrid_Pollen_P Parameter: Age (day) Value: 8
  misc_feature: MA Experiment 20000534 PARAMETER Experiment Name: Zm_Hybrid_Pollen_P Parameter: Organism Value: Zea mays
  misc_feature: MA Experiment 20000534 PARAMETER Experiment Name: Zm_Hybrid_Pollen_P Parameter: Plant Line Value: 35A19
  misc_feature: MA Experiment 20000534 PARAMETER Experiment Name: Zm_Hybrid_Pollen_P Parameter: Tissue Value: Pollen vs. Aerial
  misc_feature: MA Experiment ID: 20000535 Result: Down-regulated in Transcription
  misc_feature: MA Experiment 20000535 PARAMETER Experiment Name: Zm_Hybrid_Seed_Dev_P Parameter: DAP Value: 30 vs. 12
  misc_feature: MA Experiment 20000535 PARAMETER Experiment Name: Zm_Hybrid_Seed_Dev_P Parameter: Organism Value: Zea mays
  misc_feature: MA Experiment 20000535 PARAMETER Experiment Name: Zm_Hybrid_Seed_Dev_P Parameter: Plant Line Value: 35A19
  misc_feature: MA Experiment 20000535 PARAMETER Experiment Name: Zm_Hybrid_Seed_Dev_P Parameter: Tissue Value: Embryo vs. Unfert Floret
acacgaggctccagggcctccatcgccacaccggtgcgtgcgagcgcgattaccagaggcgggcggcagggacgatgctgctgcaaaggcgcggcggcctcctctgctgcgggtgcggcgccagcgccgtggccgtggccgtcagtggccgcgttccggaagacgacggcggtgccgtcgtcgatggccagccgcctgacgccaagagcgtgtctggtaccagtgtctccgctgccgtgacgaccgcaaacgcgaggcagctctcgtgggcgcaggtggaggccatgacgggaggcttcacgtcagccatcgtcggcgagggcggcttcagcaccgtttacctcgcccgcctcgctggctccctcgccgccgtgaaggtccatcgtagtagcgagcgtcttcatcgcgcgttccgccaggagctcgacgcgctcctccgcgttcgccatccccacatcgtccgcctcctcgccttctgcgaccagcgagacgaaggcgtgctggtgctagagttcgcgccgaacggcagcctgcacgagcagctccacggcggcggcgcgggcgcggcgccgatgccgtgggcgcggcgggtgccggtggcgctgcaggtggcccgcgccctggagtacctccacgagcggtgcgagccgcaggtggtgcacggcgacgtgaaggcgtcgaacgtgctgctggacgcgggcatgggcgccaggctgtgcgacttcgggtcggcgcgcgcggggttctcggcggccgtggccgttgccgctgcaggcccgcgcccgcgcgccgtgttcgggtccccgggctacgtcgacccgcactacctccgctccggcgtggtcaccaagaagagcgacgtgtacagcttcggcgtgctcctgctggagctgctcaccggcgtgcaggcgttccgcgacggccggctcctgacggcgtccgtggcgccgaggctcgccgccgccgcagccggcgacctcgtggaccggaggctggggtgccgatacgacgcccgcgaggcggcggccgtgctggcgctagcggccgcgtgcgtccgggacaaaccgggcctccggccgtcgatggccgacgtggtgcgggccctggagcagctgcagccgcagcacggccggagcttgttgggcgccggagggaagctgtagctgctgtcgtagacacgtggcgcgcattgttgtttgtggtggtcgtggggatgcgactgctcaactgaccacaccctccctctattggaattgggttggtgaggaacaggaggcgttgggatttgcgctttgggggtattggggtggggggtgatttgcttatcatctttagctgggatgatgggtcatcatgtcattagccaccaaatcaaaagtagagcaactgctgagataaaacgaacagcaggaggatggaagtatccgtcattatcaagtgtgtatacagtagtaactaaaatgtaaacagagttgcttctttttcgtctgtgttgcatgtatgatgtacctgtgtgtggtatgcacacatgtttagccaaaagaaaagaactgtgcatatacattatcattct

SEQ ID NO: 10106 - protein, 386 aa, Zea mays subsp. mays
  peptide (1)..(386): Ceres Seq. ID no. 12366005
  misc_feature (103)..(368): Pfam Name: Protein kinase domain Pfam Description: Protein kinase domain
  misc_feature (25)..(377): Homolog of NCBI NO: 27476081 NR Description: Hypothetical protein [Oryza sativa (japonica
  misc_feature (29)..(370): Homolog of NCBI NO: 37536060 NR Description: putative receptor protein kinase [Oryza sativa
  misc_feature (37)..(370): Homolog of NCBI NO: 38344983 NR Description: OSJNBa0011L07.13 [Oryza sativa (japonica
  misc_feature (73)..(383): Homolog of NCBI NO: 15235071 NR Description: putative protein kinase; protein id: At4g10390.1, by cDNA: gi_20260591 [Arabidopsis thaliana]
  misc_feature (88)..(315): Homolog of NCBI NO: 30692836 NR Description: protein kinase family [Arabidopsis thaliana]
  misc_feature (88)..(315): Homolog of NCBI NO: 25403176 NR Description: probable protein kinase [imported] - Arabidopsis >gi|12322574|gb|AAG51288.1|AC027035_11 protein kinase, putative
  misc_feature (85)..(375): Homolog of NCBI NO: 18402188 NR Description: unknown protein; protein id: At3g19300.1 thaliana] >gi|11994452|dbj|BAB02454.1| contains similarity to
  misc_feature (199)..(370): Homolog of NCBI NO: 29367339 NR Description: putative receptor protein kinase [Oryza sativa
  misc_feature (85)..(376): Homolog of NCBI NO: 38345516 NR Description: OSJNBa0039K24.19 [Oryza sativa (japonica
  misc_feature (64)..(370): Homolog of NCBI NO: 15227018 NR Description: putative receptor-like protein kinase; protein id:
TRLQGLHRHTGACERDYQRRAAGTMLLQRRGGLLCCGCGASAVAVAVSGRVPEDDGGAVVDGQPPDAKSVSGTSVSAAVTTANARQLSWAQVEAMTGGFTSAIVGEGGFSTVYLARLAGSLAAVKVHRSSERLHRAFRQELDALLRVRHPHIVRLLAFCDQRDEGVLVLEFAPNGSLHEQLHGGGAGAAPMPWARRVPVALQVARALEYLHERCEPQVVHGDVKASNVLLDAGMGARLCDFGSARAGFSAAVAVAAAGPRPRAVFGSPGYVDPHYLRSGVVTKKSDVYSFGVLLLELLTGVQAFRDGRLLTASVAPRLAAAAAGDLVDRRLGCRYDAREAAAVLALAAACVRDKPGLRPSMADVVRALEQLQPQHGRSLLGAGGKL

SEQ ID NO: 10107 - protein, 362 aa, Zea mays subsp. mays
  peptide (1)..(362): Ceres Seq. ID no. 12366006
  misc_feature (79)..(344): Pfam Name: Protein kinase domain Pfam Description: Protein kinase domain
  misc_feature (1)..(353): Homolog of NCBI NO: 27476081 NR Description: Hypothetical protein [Oryza sativa (japonica
  misc_feature (5)..(346): Homolog of NCBI NO: 37536060 NR Description: putative receptor protein kinase [Oryza sativa
  misc_feature (13)..(346): Homolog of NCBI NO: 38344983 NR Description: OSJNBa0011L07.13 [Oryza sativa (japonica
  misc_feature (49)..(359): Homolog of NCBI NO: 15235071 NR Description: putative protein kinase; protein id: At4g10390.1, by cDNA: gi_20260591 [Arabidopsis thaliana]
  misc_feature (64)..(291): Homolog of NCBI NO: 30692836 NR Description: protein kinase family [Arabidopsis thaliana]
  misc_feature (64)..(291): Homolog of NCBI NO: 25403176 NR Description: probable protein kinase [imported] - Arabidopsis >gi|12322574|gb|AAG51288.1|AC027035_11 protein kinase, putative
  misc_feature (61)..(351): Homolog of NCBI NO: 18402188 NR Description: unknown protein; protein id: At3g19300.1 thaliana] >gi|11994452|dbj|BAB02454.1| contains similarity to
  misc_feature (175)..(346): Homolog of NCBI NO: 29367339 NR Description: putative receptor protein kinase [Oryza sativa
  misc_feature (61)..(352): Homolog of NCBI NO: 38345516 NR Description: OSJNBa0039K24.19 [Oryza sativa (japonica
  misc_feature (40)..(346): Homolog of NCBI NO: 15227018 NR Description: putative receptor-like protein kinase; protein id:
MLLQRRGGLLCCGCGASAVAVAVSGRVPEDDGGAVVDGQPPDAKSVSGTSVSAAVTTANARQLSWAQVEAMTGGFTSAIVGEGGFSTVYLARLAGSLAAVKVHRSSERLHRAFRQELDALLRVRHPHIVRLLAFCDQRDEGVLVLEFAPNGSLHEQLHGGGAGAAPMPWARRVPVALQVARALEYLHERCEPQVVHGDVKASNVLLDAGMGARLCDFGSARAGFSAAVAVAAAGPRPRAVFGSPGYVDPHYLRSGVVTKKSDVYSFGVLLLELLTGVQAFRDGRLLTASVAPRLAAAAAGDLVDRRLGCRYDAREAAAVLALAAACVRDKPGLRPSMADVVRALEQLQPQHGRSLLGAGGKL

SEQ ID NO: 10108 - protein, 292 aa, Zea mays subsp. mays
  peptide (1)..(292): Ceres Seq. ID no. 12366007
  misc_feature (9)..(274): Pfam Name: Protein kinase domain Pfam Description: Protein kinase domain
  misc_feature (1)..(283): Homolog of NCBI NO: 27476081 NR Description: Hypothetical protein [Oryza sativa (japonica
  misc_feature (1)..(276): Homolog of NCBI NO: 37536060 NR Description: putative receptor protein kinase [Oryza sativa
  misc_feature (1)..(276): Homolog of NCBI NO: 38344983 NR Description: OSJNBa0011L07.13 [Oryza sativa (japonica
  misc_feature (1)..(289): Homolog of NCBI NO: 15235071 NR Description: putative protein kinase; protein id: At4g10390.1, by cDNA: gi_20260591 [Arabidopsis thaliana]
  misc_feature (1)..(221): Homolog of NCBI NO: 30692836 NR Description: protein kinase family [Arabidopsis thaliana]
  misc_feature (1)..(221): Homolog of NCBI NO: 25403176 NR Description: probable protein kinase [imported] - Arabidopsis >gi|12322574|gb|AAG51288.1|AC027035_11 protein kinase, putative
  misc_feature (1)..(281): Homolog of NCBI NO: 18402188 NR Description: unknown protein; protein id: At3g19300.1 thaliana] >gi|11994452|dbj|BAB02454.1| contains similarity to
  misc_feature (105)..(276): Homolog of NCBI NO: 29367339 NR Description: putative receptor protein kinase [Oryza sativa
  misc_feature (1)..(282): Homolog of NCBI NO: 38345516 NR Description: OSJNBa0039K24.19 [Oryza sativa (japonica
  misc_feature (1)..(276): Homolog of NCBI NO: 15227018 NR Description: putative receptor-like protein kinase; protein id:
MTGGFTSAIVGEGGFSTVYLARLAGSLAAVKVHRSSERLHRAFRQELDALLRVRHPHIVRLLAFCDQRDEGVLVLEFAPNGSLHEQLHGGGAGAAPMPWARRVPVALQVARALEYLHERCEPQVVHGDVKASNVLLDAGMGARLCDFGSARAGFSAAVAVAAAGPRPRAVFGSPGYVDPHYLRSGVVTKKSDVYSFGVLLLELLTGVQAFRDGRLLTASVAPRLAAAAAGDLVDRRLGCRYDAREAAAVLALAAACVRDKPGLRPSMADVVRALEQLQPQHGRSLLGAGGKL

SEQ ID NO: 10109 - DNA, 1714 bp, Zea mays subsp. mays
  misc_feature (1)..(1714): Ceres Seq. ID no. 12363889
  misc_feature: MA Experiment ID: 108523 Result: Up-regulated in Transcription
  misc_feature: MA Experiment 108523 PARAMETER Experiment Name: Zm_42deg_Heat_P Parameter: Age (day) Value: 8
  misc_feature: MA Experiment 108523 PARAMETER Experiment Name: Zm_42deg_Heat_P Parameter: Organism Value: Zea mays
  misc_feature: MA Experiment 108523 PARAMETER Experiment Name: Zm_42deg_Heat_P Parameter: Plant Line Value: 35A19
  misc_feature: MA Experiment 108523 PARAMETER Experiment Name: Zm_42deg_Heat_P Parameter: Temperature (deg C) Value: 42 vs. 22
  misc_feature: MA Experiment 108523 PARAMETER Experiment Name: Zm_42deg_Heat_P Parameter: Timepoint (hr) Value: 6
  misc_feature: MA Experiment 108523 PARAMETER Experiment Name: Zm_42deg_Heat_P Parameter: Tissue Value: Aerial
  misc_feature: MA Experiment ID: 108527 Result: Up-regulated in Transcription
  misc_feature: MA Experiment 108527 PARAMETER Experiment Name: Zm_5mM_NO_P Parameter: Age (day) Value: 8
  misc_feature: MA Experiment 108527 PARAMETER Experiment Name: Zm_5mM_NO_P Parameter: Organism Value: Zea mays
  misc_feature: MA Experiment 108527 PARAMETER Experiment Name: Zm_5mM_NO_P Parameter: Plant Line Value: 35A19
  misc_feature: MA Experiment 108527 PARAMETER Experiment Name: Zm_5mM_NO_P Parameter: Timepoint (hr) Value: 6
  misc_feature: MA Experiment 108527 PARAMETER Experiment Name: Zm_5mM_NO_P Parameter: Tissue Value: Aerial
  misc_feature: MA Experiment 108527 PARAMETER Experiment Name: Zm_5mM_NO_P Parameter: Treatment Value: 5mM NO vs. No Treatment
  misc_feature: MA Experiment ID: 108536 Result: Up-regulated in Transcription
  misc_feature: MA Experiment 108536 PARAMETER Experiment Name: Zm_Meristem_P Parameter: Age (day) Value: 8
  misc_feature: MA Experiment 108536 PARAMETER Experiment Name: Zm_Meristem_P Parameter: Organism Value: Zea mays
  misc_feature: MA Experiment 108536 PARAMETER Experiment Name: Zm_Meristem_P Parameter: Plant Line Value: 35A19
  misc_feature: MA Experiment 108536 PARAMETER Experiment Name: Zm_Meristem_P Parameter: Tissue Value: Shoot Meristem vs. Above Shoot Meristem
  misc_feature: MA Experiment ID: 20000630 Result: Up-regulated in Transcription
  misc_feature: MA Experiment 20000630 PARAMETER Experiment Name: Zm_Herbicide-Treatments_P Parameter: Timepoint (hr) Value: 4
  misc_feature: MA Experiment 20000630 PARAMETER Experiment Name: Zm_Herbicide-Treatments_P Parameter: Tissue Value: Aerial
  misc_feature: MA Experiment 20000630 PARAMETER Experiment Name: Zm_Herbicide-Treatments_P Parameter: Treatment Value: Roundup vs. No Treatment
gcacgagaccattacctagaacatcctaatcgaaaagatttgccggaaggcgcctcggcggaagctgctatctagttgaagccagccatggccgccgagcccccggcgtacttgctgctccttcccctcatcgccataccgctcatcgtcttcctcgtcctgtcccgccgaagggatgaccagcggcgcttcccaccggcgccgtgggcgctgccggtcatcggccacctgcaccacctcgccggcgcgccaccgcaccgtgccctgcgggaccttgcgaggcgccacggcccgctcatgacgctccgcttctggcgagctccgggtcgtggtcgcctcgtcgccggacgccgcgcgggagatcttgaggacccacgacgtggacttcgcgtcgcggcccatcgggccgatgctgcagctcgtgttccggggcgccgagggcctcatcttcgcgccctacggcgacgggtggcggcagctccgcaagatctgcaccctcgaactcctcagcgcccgccgcgtccactccttccggcccgtccgcgaggacgaggtcggccgcctcctcggctcggtcgcgtccgccgcggcggcggggttgcccgtgaacctgagtgagaggatcacggcgttcgtcgcggacgcagcggtgcgcgccatcatcggcagccgggagcgagcaccgcgacgagttcttgcgcctgctgatggacgggctcaagataattccgggattgagcctgccggacctcttcccgtcgtcacgcctcgcgatgctcgtcagcagcgttcccggtaaaatcgagcgccgccggaaaggcctccttgacatcgtcgaccccatcattctggagcatcaggagaagagagcggccggtggcatagacgaagatgaggacttgcttgacgtgctcttgagactccagaaagacatggactcccagtaccctctcaccaccgacaacatcaaatccgtcctcatcgacatgtttggagcaagcagcgagacgtcggcgacgacgctgaagtggacaatggccgagctgatgcggaacccggcggtgatgcggaaggcgcaagatgaggtcaggggagcactcgccggccacgacgaggtggcggaggacagcctggtcaatctgcggtacctgcagctagtcataaaggagacgctgcggctgcacccgccggcgccattgctgctgccgcgggagtgccgcagcccgtgccaggtgctcggctacgacgtgcctcgtggcaccatggtgctggtgaacgcgtgggcaataggcagggacccagcgctgtgggacgcgccggaggatttcgtgccggaaaggttcgaggagagtggacgagacttcaagggcatggattttgagttcatcccgttcggtgcgggaaggaggatgtgccccggcatggcgttcgggctggcgcacattgagctcgctctcgcggcgttgctgtttcacttcgactggaagctaccggaaggggtggtcggctggtcgccgaggagatagacatggccgaggcggtcgcgatcacggcccctccgcgatctgatttagtggtgctccctgttactaggctaccggtgtcaatataatgtgcttcggcccaaaagcttattttctttcagtatgctagaaatagaacaacaacttttctttcgctttcggcggttgtgaaggtcgaaaccttttcctcg

SEQ ID NO: 10110 - protein, 272 aa, Zea mays subsp. mays
  peptide (1)..(272): Ceres Seq. ID no. 12363890
  misc_feature (1)..(266): Pfam Name: Cytochrome P450 Pfam Description: Cytochrome P450
  misc_feature (1)..(265): Homolog of NCBI NO: 5915835 NR Description: Cytochrome P450 71D6 >gi|7430643|pir||T10493
  misc_feature (1)..(260): Homolog of NCBI NO: 34896754 NR Description: putative cytochrome P450 [Oryza sativa (japonica group)] >gi|28269474|gb|AAO38017.1| putative cytochrome P450
  misc_feature (1)..(264): Homolog of NCBI NO: 34897000 NR Description: putative cytochrome P450 [Oryza sativa (japonica group)] >gi|28269479|gb|AAO38022.1| putative cytochrome P450
  misc_feature (1)..(262): Homolog of NCBI NO: 37534746 NR Description: putative cytochrome P450 [Oryza sativa (japonica group)] >gi|31432312|gb|AAP53962.1| putative cytochrome P450
  misc_feature (1)..(265): Homolog of NCBI NO: 12331298 NR Description: cytochrome P450 [Solanum tuberosum]
  misc_feature (1)..(265): Homolog of NCBI NO: 5915836 NR Description: Cytochrome P450 71D7 >gi|7430645|pir||T10499
  misc_feature (1)..(266): Homolog of NCBI NO: 38345354 NR Description: OSJNBa0032I19.6 [Oryza sativa (japonica
  misc_feature (1)..(266): Homolog of NCBI NO: 37534744 NR Description: putative cytochrome P450 [Oryza sativa (japonica group)] >gi|31432311|gb|AAP53961.1| putative cytochrome P450
  misc_feature (1)..(266): Homolog of NCBI NO: 34914838 NR Description: putative cytochrome P450 [Oryza sativa (japonica group)] >gi|13365974|dbj|BAB39252.1| putative cytochrome P450
  misc_feature (1)..(264): Homolog of NCBI NO: 13516744 NR Description: cytochrome P450 [Triticum aestivum]
MDGLKIIPGLSLPDLFPSSRLAMLVSSVPGKIERRRKGLLDIVDPIILEHQEKRAAGGIDEDEDLLDVLLRLQKDMDSQYPLTTDNIKSVLIDMFGASSETSATTLKWTMAELMRNPAVMRKAQDEVRGALAGHDEVAEDSLVNLRYLQLVIKETLRLHPPAPLLLPRECRSPCQVLGYDVPRGTMVLVNAWAIGRDPALWDAPEDFVPERFEESGRDFKGMDFEFIPFGAGRRMCPGMAFGLAHIELALAALLFHFDWKLPEGVVGWSPRR

SEQ ID NO: 10111 - protein, 250 aa, Zea mays subsp. mays
  peptide (1)..(250): Ceres Seq. ID no. 12363891
  misc_feature (1)..(244): Pfam Name: Cytochrome P450 Pfam Description: Cytochrome P450
  misc_feature (1)..(238): Homolog of NCBI NO: 34896754 NR Description: putative cytochrome P450 [Oryza sativa (japonica group)] >gi|28269474|gb|AAO38017.1| putative cytochrome P450
  misc_feature (1)..(244): Homolog of NCBI NO: 34914838 NR Description: putative cytochrome P450 [Oryza sativa (japonica group)] >gi|13365974|dbj|BAB39252.1| putative cytochrome P450
  misc_feature (1)..(242): Homolog of NCBI NO: 34897000 NR Description: putative cytochrome P450 [Oryza sativa (japonica group)] >gi|28269479|gb|AAO38022.1| putative cytochrome P450
  misc_feature (1)..(244): Homolog of NCBI NO: 37534744 NR Description: putative cytochrome P450 [Oryza sativa (japonica group)] >gi|31432311|gb|AAP53961.1| putative cytochrome P450
  misc_feature (1)..(240): Homolog of NCBI NO: 37534746 NR Description: putative cytochrome P450 [Oryza sativa (japonica group)] >gi|31432312|gb|AAP53962.1| putative cytochrome P450
  misc_feature (1)..(244): Homolog of NCBI NO: 38345354 NR Description: OSJNBa0032I19.6 [Oryza sativa (japonica
  misc_feature (1)..(243): Homolog of NCBI NO: 12331298 NR Description: cytochrome P450 [Solanum tuberosum]
  misc_feature (1)..(243): Homolog of NCBI NO: 5915836 NR Description: Cytochrome P450 71D7 >gi|7430645|pir||T10499
  misc_feature (1)..(243): Homolog of NCBI NO: 5915835 NR Description: Cytochrome P450 71D6 >gi|7430643|pir||T10493
  misc_feature (1)..(242): Homolog of NCBI NO: 13516744 NR Description: cytochrome P450 [Triticum aestivum]
MLVSSVPGKIERRRKGLLDIVDPIILEHQEKRAAGGIDEDEDLLDVLLRLQKDMDSQYPLTTDNIKSVLIDMFGASSETSATTLKWTMAELMRNPAVMRKAQDEVRGALAGHDEVAEDSLVNLRYLQLVIKETLRLHPPAPLLLPRECRSPCQVLGYDVPRGTMVLVNAWAIGRDPALWDAPEDFVPERFEESGRDFKGMDFEFIPFGAGRRMCPGMAFGLAHIELALAALLFHFDWKLPEGVVGWSPRR

SEQ ID NO: 10112 - protein, 197 aa, Zea mays subsp. mays
  peptide (1)..(197): Ceres Seq. ID no. 12363892
  misc_feature (1)..(191): Pfam Name: Cytochrome P450 Pfam Description: Cytochrome P450
  misc_feature (1)..(185): Homolog of NCBI NO: 34896754 NR Description: putative cytochrome P450 [Oryza sativa (japonica group)] >gi|28269474|gb|AAO38017.1| putative cytochrome P450
  misc_feature (1)..(191): Homolog of NCBI NO: 34914838 NR Description: putative cytochrome P450 [Oryza sativa (japonica group)] >gi|13365974|dbj|BAB39252.1| putative cytochrome P450
  misc_feature (1)..(189): Homolog of NCBI NO: 34897000 NR Description: putative cytochrome P450 [Oryza sativa (japonica group)] >gi|28269479|gb|AAO38022.1| putative cytochrome P450
  misc_feature (1)..(191): Homolog of NCBI NO: 37534744 NR Description: putative cytochrome P450 [Oryza sativa (japonica group)] >gi|31432311|gb|AAP53961.1| putative cytochrome P450
  misc_feature (1)..(187): Homolog of NCBI NO: 37534746 NR Description: putative cytochrome P450 [Oryza sativa (japonica group)] >gi|31432312|gb|AAP53962.1| putative cytochrome P450
  misc_feature (1)..(191): Homolog of NCBI NO: 38345354 NR Description: OSJNBa0032I19.6 [Oryza sativa (japonica
  misc_feature (1)..(190): Homolog of NCBI NO: 12331298 NR Description: cytochrome P450 [Solanum tuberosum]
  misc_feature (1)..(190): Homolog of NCBI NO: 5915836 NR Description: Cytochrome P450 71D7 >gi|7430645|pir||T10499
  misc_feature (1)..(190): Homolog of NCBI NO: 5915835 NR Description: Cytochrome P450 71D6 >gi|7430643|pir||T10493
  misc_feature (1)..(189): Homolog of NCBI NO: 13516744 NR Description: cytochrome P450 [Triticum aestivum]
MDSQYPLTTDNIKSVLIDMFGASSETSATTLKWTMAELMRNPAVMRKAQDEVRGALAGHDEVAEDSLVNLRYLQLVIKETLRLHPPAPLLLPRECRSPCQVLGYDVPRGTMVLVNAWAIGRDPALWDAPEDFVPERFEESGRDFKGMDFEFIPFGAGRRMCPGMAFGLAHIELALAALLFHFDWKLPEGVVGWSPRR

SEQ ID NO: 10113 - DNA, 1627 bp, Zea mays subsp. mays
  misc_feature (1)..(1627): Ceres Seq. ID no. 12350273
  misc_feature: MA Experiment ID: 108522 Result: Up-regulated in Transcription
  misc_feature: MA Experiment 108522 PARAMETER Experiment Name: Zm_42deg_Heat_P Parameter: Age (day) Value: 8
  misc_feature: MA Experiment 108522 PARAMETER Experiment Name: Zm_42deg_Heat_P Parameter: Organism Value: Zea mays
  misc_feature: MA Experiment 108522 PARAMETER Experiment Name: Zm_42deg_Heat_P Parameter: Plant Line Value: 35A19
  misc_feature: MA Experiment 108522 PARAMETER Experiment Name: Zm_42deg_Heat_P Parameter: Temperature (deg C) Value: 42 vs. 22
  misc_feature: MA Experiment 108522 PARAMETER Experiment Name: Zm_42deg_Heat_P Parameter: Timepoint (hr) Value: 1
  misc_feature: MA Experiment 108522 PARAMETER Experiment Name: Zm_42deg_Heat_P Parameter: Tissue Value: Aerial
attctcttcctcttccggtgctcgtgctcgtgctcgtgctctccgccctccccctccgccacctcgcgcggaacggaacccaggccgccgccgacccagccaccgctaggcgaccgcgcggcatggtggcgcttttacactacctatgctagtttgcctgatgctacatttccacgatggttaagctgactatgatagcgcgtgtcactgatggccttccattgtcggagggattagatgatagtcgggatctgaaagatgctgacttctacaagcagcaagcaaaactgttgttcaagaacttgtccagagggcagcatgaggcgtcaaggatgtcaattgagacaggaccataccttttccagtatcctaagacctttttctcatttgcaaaattctttgttccacaattaatcatttagaaatatatgtgattcttcatcatgatcctaaattagagtttttgtgaactggcaagtttaggcagcctaaccatataccgtaaacttgaccagtattgtgtatatattggattcaatattaagtagttcaagttcctttgacaagcaccagcttatgcatatcatatgattatcgtctgtctccattgatgtgtggattacaccaagtaagcgctatcactaatgacgtatggtatgaaaatgatcattttctgcactaaaatgcttctggtgctctagttgtaccttaattcaataaaacagctacatcatagaaggccgtgtttgctatttgactttgtgtgaccgttcttatcccaagaaacttgcattccagtatctcgaagatctcaaaaatgaatttgagaaagtcaatggcagccaaattgaaacagctgcaaggccatatgcatttattaaatttggtatggttctctgctcatgtcttgtatttttttttcctcattcgcttaatatttctgctaggtgaaagtgtatgtgttcctgtgtacttgttcagatgcattcatacagaagaccaagaaactgtatttggataccagaacacagaggaaccttgctaagctgaatgatgagctctatgaggtgcaccagatcatgactcgcaatgttcaagaagttctcggtgttggtgaaaaactagaccaggtgagtgagatgtcaagtaggttgacttcggatactagaatctatgcagagaaggcgaaagatctcaatcgccaggcattgattcgtaaatatgcccccgttgctattgtgattgggatagtggtgatgctcttctgggtgaagaacaagatatggtgactggtgccatcttgcgatttcacagttatcatgctggaaccagctgagttgtcttgtcttccctcgtgcaaccatatgtttgatcgtggtcccaaaaagaaaagatggctcgatggtttatcccgcatctgccgattcaagcgactactttagctatcaaaagcaaaaccacggtagtagagatagccttggaactgcacatttctattaactggacatgtataaatatagttctcgtgagcgcaccatgtaatcgtcgaaattcatccatgtgttgtgacattttttgagcacagttgaacatgtggtggagcctggaggcaggtcattctcagccc

SEQ ID NO: 10114 - protein, 81 aa, Zea mays subsp. mays
  peptide (1)..(81): Ceres Seq. ID no. 12350274
  misc_feature (1)..(64): Homolog of NCBI NO: 28269424 NR Description: putative vesicle trafficking protein [Oryza
  misc_feature (1)..(64): Homolog of NCBI NO: 25402691 NR Description: hypothetical protein [imported] - Arabidopsis >gi|3157951|gb|AAC17634.1| Contains similarity to vesicle protein gb|U91538 from Mus musculus. ESTs gb|F15494 and gb|F14097
  misc_feature (1)..(64): Homolog of NCBI NO: 15221123 NR Description: putative vesicle transport protein; protein id: supported by cDNA: 273., supported by cDNA: gi_15027876, by cDNA: gi_19310826 [Arabidopsis thaliana]
  misc_feature (1)..(64): Homolog of NCBI NO: 34904386 NR Description: unnamed protein product [Oryza sativa (japonica group)] >gi|8467999|dbj|BAA96600.1| unnamed protein product
  misc_feature (1)..(64): Homolog of NCBI NO: 34015230 NR Description: putative vesicle trafficking protein [Oryza
  misc_feature (1)..(64): Homolog of NCBI NO: 29351641 NR Description: Similar to SEC22 vesicle trafficking protein-like
  misc_feature (1)..(64): Homolog of NCBI NO: 32450293 NR Description: Unknown (protein for MGC:64555) [Xenopus laevis]
  misc_feature (1)..(81): Homolog of NCBI NO: 35215218 NR Description: putative vesicle trafficking protein [Oryza
MVKLTMIARVTDGLPLSEGLDDSRDLKDADFYKQQAKLLFKNLSRGQHEASRMSIETGPYLFQYPKTFFSFAKFFVPQLII

SEQ ID NO: 10115 - protein, 76 aa, Zea mays subsp. mays
  peptide (1)..(76): Ceres Seq. ID no. 12350275
  misc_feature (1)..(59): Homolog of NCBI NO: 28269424 NR Description: putative vesicle trafficking protein [Oryza
  misc_feature (1)..(59): Homolog of NCBI NO: 25402691 NR Description: hypothetical protein [imported] - Arabidopsis >gi|3157951|gb|AAC17634.1| Contains similarity to vesicle protein gb|U91538 from Mus musculus. ESTs gb|F15494 and gb|F14097
  misc_feature (1)..(59): Homolog of NCBI NO: 15221123 NR Description: putative vesicle transport protein; protein id: supported by cDNA: 273., supported by cDNA: gi_15027876, by cDNA: gi_19310826 [Arabidopsis thaliana]
  misc_feature (1)..(59): Homolog of NCBI NO: 34904386 NR Description: unnamed protein product [Oryza sativa (japonica group)] >gi|8467999|dbj|BAA96600.1| unnamed protein product
  misc_feature (1)..(59): Homolog of NCBI NO: 34015230 NR Description: putative vesicle trafficking protein [Oryza
  misc_feature (1)..(59): Homolog of NCBI NO: 29351641 NR Description: Similar to SEC22 vesicle trafficking protein-like
  misc_feature (1)..(59): Homolog of NCBI NO: 32450293 NR Description: Unknown (protein for MGC:64555) [Xenopus laevis]
  misc_feature (1)..(76): Homolog of NCBI NO: 35215218 NR Description: putative vesicle trafficking protein [Oryza
MIARVTDGLPLSEGLDDSRDLKDADFYKQQAKLLFKNLSRGQHEASRMSIETGPYLFQYPKTFFSFAKFFVPQLII

SEQ ID NO: 10116 - protein, 75 aa, Zea mays subsp. mays
  peptide (1)..(75): Ceres Seq. ID no. 12350276
MNLRKSMAAKLKQLQGHMHLLNLVWFSAHVLYFFFLIRLIFLLGESVCVPVYLFRCIHTEDQETVFGYQNTEEPC

SEQ ID NO: 10117 - DNA, 1468 bp, Zea mays subsp. mays
  misc_feature (1)..(1468): Ceres Seq. ID no. 12566388
  misc_feature: MA Experiment ID: 108526 Result: Up-regulated in Transcription
  misc_feature: MA Experiment 108526 PARAMETER Experiment Name: Zm_5mM_NO_P Parameter: Age (day) Value: 8
  misc_feature: MA Experiment 108526 PARAMETER Experiment Name: Zm_5mM_NO_P Parameter: Organism Value: Zea mays
  misc_feature: MA Experiment 108526 PARAMETER Experiment Name: Zm_5mM_NO_P Parameter: Plant Line Value: 35A19
  misc_feature: MA Experiment 108526 PARAMETER Experiment Name: Zm_5mM_NO_P Parameter: Timepoint (hr) Value: 1
  misc_feature: MA Experiment 108526 PARAMETER Experiment Name: Zm_5mM_NO_P Parameter: Tissue Value: Aerial
  misc_feature: MA Experiment 108526 PARAMETER Experiment Name: Zm_5mM_NO_P Parameter: Treatment Value: 5mM NO vs. No Treatment
  misc_feature: MA Experiment ID: 108527 Result: Up-regulated in Transcription
  misc_feature: MA Experiment 108527 PARAMETER Experiment Name: Zm_5mM_NO_P Parameter: Age (day) Value: 8
  misc_feature: MA Experiment 108527 PARAMETER Experiment Name: Zm_5mM_NO_P Parameter: Organism Value: Zea mays
  misc_feature: MA Experiment 108527 PARAMETER Experiment Name: Zm_5mM_NO_P Parameter: Plant Line Value: 35A19
  misc_feature: MA Experiment 108527 PARAMETER Experiment Name: Zm_5mM_NO_P Parameter: Timepoint (hr) Value: 6
  misc_feature: MA Experiment 108527 PARAMETER Experiment Name: Zm_5mM_NO_P Parameter: Tissue Value: Aerial
  misc_feature: MA Experiment 108527 PARAMETER Experiment Name: Zm_5mM_NO_P Parameter: Treatment Value: 5mM NO vs. No Treatment
  misc_feature: MA Experiment ID: 108530 Result: Down-regulated in Transcription
  misc_feature: MA Experiment 108530 PARAMETER Experiment Name: Zm_Imbibed_Seeds_P Parameter: Age (day) Value: 6 vs. 2
  misc_feature: MA Experiment 108530 PARAMETER Experiment Name: Zm_Imbibed_Seeds_P Parameter: Organism Value: Zea mays
  misc_feature: MA Experiment 108530 PARAMETER Experiment Name: Zm_Imbibed_Seeds_P Parameter: Plant Line Value: 35A19
  misc_feature: MA Experiment 108530 PARAMETER Experiment Name: Zm_Imbibed_Seeds_P Parameter: Tissue Value: Aerial vs. Embryo
  misc_feature: MA Experiment ID: 108535 Result: Down-regulated in Transcription
  misc_feature: MA Experiment 108535 PARAMETER Experiment Name: Zm_Meristem_P Parameter: Age (day) Value: 8
  misc_feature: MA Experiment 108535 PARAMETER Experiment Name: Zm_Meristem_P Parameter: Organism Value: Zea mays
  misc_feature: MA Experiment 108535 PARAMETER Experiment Name: Zm_Meristem_P Parameter: Plant Line Value: 35A19
  misc_feature: MA Experiment 108535 PARAMETER Experiment Name: Zm_Meristem_P Parameter: Tissue Value: Root Meristem vs. Above Root Meristem
  misc_feature: MA Experiment ID: 108545 Result: Down-regulated in Transcription
  misc_feature: MA Experiment 108545 PARAMETER Experiment Name: Zm_Imbibed_Seeds_P Parameter: Age (day) Value: 3 vs. 2
  misc_feature: MA Experiment 108545 PARAMETER Experiment Name: Zm_Imbibed_Seeds_P Parameter: Organism Value: Zea mays
  misc_feature: MA Experiment 108545 PARAMETER Experiment Name: Zm_Imbibed_Seeds_P Parameter: Plant Line Value: 35A19
  misc_feature: MA Experiment 108545 PARAMETER Experiment Name: Zm_Imbibed_Seeds_P Parameter: Tissue Value: Aerial vs. Embryo
  misc_feature: MA Experiment ID: 108559 Result: Up-regulated in Transcription
  misc_feature: MA Experiment 108559 PARAMETER Experiment Name: Zm_5mM_NO_P Parameter: Age (day) Value: 8
  misc_feature: MA Experiment 108559 PARAMETER Experiment Name: Zm_5mM_NO_P Parameter: Organism Value: Zea mays
  misc_feature: MA Experiment 108559 PARAMETER Experiment Name: Zm_5mM_NO_P Parameter: Plant Line Value: 35A19
  misc_feature: MA Experiment 108559 PARAMETER Experiment Name: Zm_5mM_NO_P Parameter: Timepoint (hr) Value: 12
  misc_feature: MA Experiment 108559 PARAMETER Experiment Name: Zm_5mM_NO_P Parameter: Tissue Value: Aerial
  misc_feature: MA Experiment 108559 PARAMETER Experiment Name: Zm_5mM_NO_P Parameter: Treatment Value: 5mM NO vs. No Treatment
  misc_feature: MA Experiment ID: 20000477 Result: Up-regulated in Transcription
  misc_feature: MA Experiment 20000477 PARAMETER Experiment Name: Zm_5mM_SA_P Parameter: Age (day) Value: 10
  misc_feature: MA Experiment 20000477 PARAMETER Experiment Name: Zm_5mM_SA_P Parameter: Organism Value: Zea mays
  misc_feature: MA Experiment 20000477 PARAMETER Experiment Name: Zm_5mM_SA_P Parameter: Plant Line Value: 35A19
  misc_feature: MA Experiment 20000477 PARAMETER Experiment Name: Zm_5mM_SA_P Parameter: Timepoint (hr) Value: 48
  misc_feature: MA Experiment 20000477 PARAMETER Experiment Name: Zm_5mM_SA_P Parameter: Tissue Value: Aerial
  misc_feature: MA Experiment 20000477 PARAMETER Experiment Name: Zm_5mM_SA_P Parameter: Treatment Value: 5mM SA vs. No Treatment
  misc_feature: MA Experiment ID: 20000478 Result: Up-regulated in Transcription
  misc_feature: MA Experiment 20000478 PARAMETER Experiment Name: Zm_5mM_SA_P Parameter: Age (day) Value: 11
  misc_feature: MA Experiment 20000478 PARAMETER Experiment Name: Zm_5mM_SA_P Parameter: Organism Value: Zea mays
  misc_feature: MA Experiment 20000478 PARAMETER Experiment Name: Zm_5mM_SA_P Parameter: Plant Line Value: 35A19
  misc_feature: MA Experiment 20000478 PARAMETER Experiment Name: Zm_5mM_SA_P Parameter: Timepoint (hr) Value: 72
  misc_feature: MA Experiment 20000478 PARAMETER Experiment Name: Zm_5mM_SA_P Parameter: Tissue Value: Aerial
  misc_feature: MA Experiment 20000478 PARAMETER Experiment Name: Zm_5mM_SA_P Parameter: Treatment Value: 5mM SA vs. No Treatment
  misc_feature: MA Experiment ID: 20000492 Result: Down-regulated in Transcription
  misc_feature: MA Experiment 20000492 PARAMETER Experiment Name: Zm_Hybrid_Seed_Dev_P Parameter: DAP Value: 12
  misc_feature: MA Experiment 20000492 PARAMETER Experiment Name: Zm_Hybrid_Seed_Dev_P Parameter: Organism Value: Zea mays
  misc_feature: MA Experiment 20000492 PARAMETER Experiment Name: Zm_Hybrid_Seed_Dev_P Parameter: Plant Line Value: 35A19
  misc_feature: MA Experiment 20000492 PARAMETER Experiment Name: Zm_Hybrid_Seed_Dev_P Parameter: Tissue Value: Fert Kernel vs. Unfert Floret
  misc_feature: MA Experiment ID: 20000535 Result: Down-regulated in Transcription
  misc_feature: MA Experiment 20000535 PARAMETER Experiment Name: Zm_Hybrid_Seed_Dev_P Parameter: DAP Value: 30 vs. 12
  misc_feature: MA Experiment 20000535 PARAMETER Experiment Name: Zm_Hybrid_Seed_Dev_P Parameter: Organism Value: Zea mays
  misc_feature: MA Experiment 20000535 PARAMETER Experiment Name: Zm_Hybrid_Seed_Dev_P Parameter: Plant Line Value: 35A19
  misc_feature: MA Experiment 20000535 PARAMETER Experiment Name: Zm_Hybrid_Seed_Dev_P Parameter: Tissue Value: Embryo vs. Unfert Floret
gcacgagaccattacctagaacatcctaatcgaaaaacctcctcttctcgcctgtgccttttgcccctgtgctcgccacacgcggcgcaaccgcccacccacccagccaggagaagaagatctccgtcgcctgctcttcgcttcgcttcgaatcggaggtgtcgagtagccagtggtgtccctatggattcagcttttagaagagctctcaatgagcctatgtgcttggaagaaaccgtcgtccaacaaggaattgaaaggtgcccattcctgaggaacatcaatgagcctacaagtttttccttctcgtccgtcaacttccctattcccgcaagaggagccaagggaccgattttcgaagatgggcctaattttgacatggcatttcgagttttccatggtagagatggggttgttccactttcagaagggtcattggcccagattgagaagccactgccaaagcccaatcctgagttcaacccattggcagccaaagcagcaaccatcagtctatctgcatttggagggtttttcagctttggtgacttctcaaataagcgcaataagaaaaactccaacaagaagaaccccaacaacctcccccagaataaaggccagcctaacaataacaaccatgaagcactgagcaacgagtggctggagatgggccaatgtccacttgcgaaatcttatagggcattaagtggaattgtgccacttgtcgcaaagatgatgacacccccagctggtatgaaacttaagtgcccacctgccgtggttgctgcccgcgcagcactatcccgcacagcctttgctaaggggcttcgccctcagcccctgccaacaaaaatactggtgattgcattgcttggtatggcagcaaatgttcctctgggcatctggagggagcacacacagaagttttcattgcagtggtttgccgcagtacatgctgcagtgccgttcatagggatgctcaggaaatctgtgctgatgcctaagacagccatggcccttactatagccgcctcgatattgggtcagacaatcgggtcaagagctgaacgtatcagactgaagagggccgcggcagcaaaattagcaagagagagccatggtgacgctgctgactacatcaaagcaccaatgagtctgaaaacagggaaccacactgttcagttttgggatccgctttccctcagagctgaaagcacagtggctgcaggtaccacagcagttcttgtccctgccatttctgctttcaactgatgacaggaatggattcattacgattgtaccagcatcgctggttggtgtattcttttttttctcctattctaaataatctgattgttgtatccattactgtacttttgagcttaagaaagaaatacttcacggcaaactcttcatcctgttttggtggccacatgacagcgaataaattagagaacacgttgagctg

SEQ ID NO: 10118 - protein, 423 aa, Zea mays subsp. mays
  peptide (1)..(423): Ceres Seq. ID no. 12566389
  misc_feature (62)..(417): Homolog of NCBI NO: 37537220 NR Description: unknown protein [Oryza sativa (japonica
  misc_feature (199)..(419): Homolog of NCBI NO: 34897958 NR Description: contains ESTs AU068434(C30250)~similar to Oryza sativa chromosome 7,
  misc_feature (53)..(221): Homolog of NCBI NO: 34897958 NR Description: contains ESTs AU068434(C30250)~similar to Oryza sativa chromosome 7,
  misc_feature (62)..(413): Homolog of NCBI NO: 33146734 NR Description: unknown protein [Oryza sativa (japonica
  misc_feature (62)..(413): Homolog of NCBI NO: 34899856 NR Description: OJ1714_H10.10 [Oryza sativa (japonica
  misc_feature (82)..(415): Homolog of NCBI NO: 15234866 NR Description: putative protein; protein id: At4g25030.1, by cDNA: 16463. [Arabidopsis thaliana] >gi|7485448|pir||T05524
  misc_feature (85)..(383): Homolog of NCBI NO: 21595083 NR Description: unknown [Arabidopsis thaliana]
  misc_feature (85)..(368): Homolog of NCBI NO: 21954084 NR Description: unknown protein [Arabidopsis thaliana]
  misc_feature (85)..(368): Homolog of NCBI NO: 30694759 NR Description: expressed protein [Arabidopsis thaliana] gene_id:MFC19.8~pir||T05524~similar to unknown protein thaliana] >gi|27754261|gb|AAO22584.1| unknown protein
ARDHYLEHPNRKTSSSRLCLLPLCSPHAAQPPTHPARRRRSPSPALRFASNRRCRVASGVPMDSAFRRALNEPMCLEETVVQQGIERCPFLRNINEPTSFSFSSVNFPIPARGAKGPIFEDGPNFDMAFRVFHGRDGVVPLSEGSLAQIEKPLPKPNPEFNPLAAKAATISLSAFGGFFSFGDFSNKRNKKNSNKKNPNNLPQNKGQPNNNNHEALSNEWLEMGQCPLAKSYRALSGIVPLVAKMMTPPAGMKLKCPPAVVAARAALSRTAFAKGLRPQPLPTKILVIALLGMAANVPLGIWREHTQKFSLQWFAAVHAAVPFIGMLRKSVLMPKTAMALTIAASILGQTIGSRAERIRLKRAAAAKLARESHGDAADYIKAPMSLKTGNHTVQFWDPLSLRAESTVAAGTTAVLVPAISAFN

SEQ ID NO: 10119 - protein, 362 aa, Zea mays subsp. mays
  peptide (1)..(362): Ceres Seq. ID no. 12566390
  misc_feature (1)..(356): Homolog of NCBI NO: 37537220 NR Description: unknown protein [Oryza sativa (japonica
  misc_feature (138)..(358): Homolog of NCBI NO: 34897958 NR Description: contains ESTs AU068434(C30250)~similar to Oryza sativa chromosome 7,
  misc_feature (1)..(160): Homolog of NCBI NO: 34897958 NR Description: contains ESTs AU068434(C30250)~similar to Oryza sativa chromosome 7,
  misc_feature (1)..(352): Homolog of NCBI NO: 33146734 NR Description: unknown protein [Oryza sativa (japonica
  misc_feature (1)..(352): Homolog of NCBI NO: 34899856 NR Description: OJ1714_H10.10 [Oryza sativa (japonica
  misc_feature (21)..(354): Homolog of NCBI NO: 15234866 NR Description: putative protein; protein id: At4g25030.1, by cDNA: 16463. [Arabidopsis thaliana] >gi|7485448|pir||T05524
  misc_feature (24)..(322): Homolog of NCBI NO: 21595083 NR Description: unknown [Arabidopsis thaliana]
  misc_feature (24)..(307): Homolog of NCBI NO: 21954084 NR Description: unknown protein [Arabidopsis thaliana]
  misc_feature (24)..(307): Homolog of NCBI NO: 30694759 NR Description: expressed protein [Arabidopsis thaliana] gene_id:MFC19.8~pir||T05524~similar to unknown protein thaliana] >gi|27754261|gb|AAO22584.1| unknown protein
MDSAFRRALNEPMCLEETVVQQGIERCPFLRNINEPTSFSFSSVNFPIPARGAKGPIFEDGPNFDMAFRVFHGRDGVVPLSEGSLAQIEKPLPKPNPEFNPLAAKAATISLSAFGGFFSFGDFSNKRNKKNSNKKNPNNLPQNKGQPNNNNHEALSNEWLEMGQCPLAKSYRALSGIVPLVAKMMTPPAGMKLKCPPAVVAARAALSRTAFAKGLRPQPLPTKILVIALLGMAANVPLGIWREHTQKFSLQWFAAVHAAVPFIGMLRKSVLMPKTAMALTIAASILGQTIGSRAERIRLKRAAAAKLARESHGDAADYIKAPMSLKTGNHTVQFWDPLSLRAESTVAAGTTAVLVPAISAFN

SEQ ID NO: 10120 - protein, 350 aa, Zea mays subsp. mays
  peptide (1)..(350): Ceres Seq. ID no. 12566391
  misc_feature (1)..(344): Homolog of NCBI NO: 37537220 NR Description: unknown protein [Oryza sativa (japonica
  misc_feature (126)..(346): Homolog of NCBI NO: 34897958 NR Description: contains ESTs AU068434(C30250)~similar to Oryza sativa chromosome 7,
  misc_feature (1)..(148): Homolog of NCBI NO: 34897958 NR Description: contains ESTs AU068434(C30250)~similar to Oryza sativa chromosome 7,
  misc_feature (1)..(340): Homolog of NCBI NO: 33146734 NR Description: unknown protein [Oryza sativa (japonica
  misc_feature (1)..(340): Homolog of NCBI NO: 34899856 NR Description: OJ1714_H10.10 [Oryza sativa (japonica
  misc_feature (9)..(342): Homolog of NCBI NO: 15234866 NR Description: putative protein; protein id: At4g25030.1, by cDNA: 16463. [Arabidopsis thaliana] >gi|7485448|pir||T05524
  misc_feature (12)..(310): Homolog of NCBI NO: 21595083 NR Description: unknown [Arabidopsis thaliana]
  misc_feature (12)..(295): Homolog of NCBI NO: 21954084 NR Description: unknown protein [Arabidopsis thaliana]
  misc_feature (12)..(295): Homolog of NCBI NO: 30694759 NR Description: expressed protein [Arabidopsis thaliana] gene_id:MFC19.8~pir||T05524~similar to unknown protein thaliana] >gi|27754261|gb|AAO22584.1| unknown protein
MCLEETVVQQGIERCPFLRNINEPTSFSFSSVNFPIPARGAKGPIFEDGPNFDMAFRVFHGRDGVVPLSEGSLAQIEKPLPKPNPEFNPLAAKAATISLSAFGGFFSFGDFSNKRNKKNSNKKNPNNLPQNKGQPNNNNHEALSNEWLEMGQCPLAKSYRALSGIVPLVAKMMTPPAGMKLKCPPAVVAARAALSRTAFAKGLRPQPLPTKILVIALLGMAANVPLGIWREHTQKFSLQWFAAVHAAVPFIGMLRKSVLMPKTAMALTIAASILGQTIGSRAERIRLKRAAAAKLARESHGDAADYIKAPMSLKTGNHTVQFWDPLSLRAESTVAAGTTAVLVPAISAFN

SEQ ID NO: 10121 - DNA, 1490 bp, Zea mays subsp. mays
  misc_feature (1)..(1490): Ceres Seq. ID no. 12365955
  misc_feature: MA Experiment ID: 108504 Result: Down-regulated in Transcription
  misc_feature: MA Experiment 108504 PARAMETER Experiment Name: Zm_Drought_P Parameter: Age (day) Value: 8
  misc_feature: MA Experiment 108504 PARAMETER Experiment Name: Zm_Drought_P Parameter: Organism Value: Zea mays
  misc_feature: MA Experiment 108504 PARAMETER Experiment Name: Zm_Drought_P Parameter: Plant Line Value: 35A19
  misc_feature: MA Experiment 108504 PARAMETER Experiment Name: Zm_Drought_P Parameter: Timepoint (hr) Value: 12
  misc_feature: MA Experiment 108504 PARAMETER Experiment Name: Zm_Drought_P Parameter: Tissue Value: Aerial
  misc_feature: MA Experiment 108504 PARAMETER Experiment Name: Zm_Drought_P Parameter: Treatment Value: Drought vs. No Drought
  misc_feature: MA Experiment ID: 108689 Result: Down-regulated in Transcription
  misc_feature: MA Experiment 108689 PARAMETER Experiment Name: Zm_Drought_Roots_P Parameter: Age (day) Value: 9
  misc_feature: MA Experiment 108689 PARAMETER Experiment Name: Zm_Drought_Roots_P Parameter: Organism Value: Zea mays
  misc_feature: MA Experiment 108689 PARAMETER Experiment Name: Zm_Drought_Roots_P Parameter: Plant Line Value: 35A19
  misc_feature: MA Experiment 108689 PARAMETER Experiment Name: Zm_Drought_Roots_P Parameter: Timepoint (hr) Value: 24
  misc_feature: MA Experiment 108689 PARAMETER Experiment Name: Zm_Drought_Roots_P Parameter: Tissue Value: Roots
  misc_feature: MA Experiment 108689 PARAMETER Experiment Name: Zm_Drought_Roots_P Parameter: Treatment Value: Drought vs. No Drought
  misc_feature: MA Experiment ID: 20000534 Result: Down-regulated in Transcription
  misc_feature: MA Experiment 20000534 PARAMETER Experiment Name: Zm_Hybrid_Pollen_P Parameter: Age (day) Value: 8
  misc_feature: MA Experiment 20000534 PARAMETER Experiment Name: Zm_Hybrid_Pollen_P Parameter: Organism Value: Zea mays
  misc_feature: MA Experiment 20000534 PARAMETER Experiment Name: Zm_Hybrid_Pollen_P Parameter: Plant Line Value: 35A19
  misc_feature: MA Experiment 20000534 PARAMETER Experiment Name: Zm_Hybrid_Pollen_P Parameter: Tissue Value: Pollen vs. Aerial
  misc_feature: MA Experiment ID: 20000632 Result: Down-regulated in Transcription
  misc_feature: MA Experiment 20000632 PARAMETER Experiment Name: Zm_Herbicide-Treatments_P Parameter: Timepoint (hr) Value: 4
  misc_feature: MA Experiment 20000632 PARAMETER Experiment Name: Zm_Herbicide-Treatments_P Parameter: Tissue Value: Aerial
  misc_feature: MA Experiment 20000632 PARAMETER Experiment Name: Zm_Herbicide-Treatments_P Parameter: Treatment Value: Glean vs. No Treatment
aaggatcacttacgctgacacggttgaggcgacccaccagttcgacgaggagaacgtgctcagccgaggccgccacggcctcgtgttcaaggcttgttacagtgacggcaccgtgctggcgattctgcggctcccgtccaggtctgccgatggcgccgtggtgatcgacgagggatcgttcaggaaggaggccgagtctctcgggaaggtgaagcacaggaacctcacggtgctccgtggctactatgccgggcctccgccggacgtccggctgctggtctatgactacatgcccaacggcaacctcgccacgctgctgcaggaagcgtcacaccgggacggccacattctcaactggccgatgaggcacctcatcgcgctcggcgtctcgcgcggtcttgcgttcctgcaccagtccggggtggtgcacggcgacgtcaagccgcagaacattctcttcgacgccgacttcgagccgcacctgtctgatttcggcctcgagccgatggtggtgactgcggccgccgccgccgcgtcgacatcggctgcaactgcaacaccacccgtgggctccctcggctacgtggcccccgacgcggccgctgccgggcaggccacgagggagggcgacgtgtacagcttcggcatcgtgctgctggagctcctcacgggtcggcgccccggcatgttcgccggggagaaggaggaggaggaggaagaggacatcgtgaagtgggtgaagcggcagctgcagcgcggcgccgtggcggaactgctggagccgggcctgctggagctggacccggagtcgtccgagtgggaggagttcctgctgggcatcaaggtcgggctgctgtgcaccgcgtccgacccgctggaccgcccggccatgggcgacgtggtgttcatgctggagggctgccgcgtcggcccggacatcccgtccccgtcctccgccgaccccacctcccagccgtcgccggcctgatctcccggcggctccggcattgccgcccgccagattcagttcggtagcttgttccatttttttttctgtcgctgattgatttatttaattagttcagattagttttgctcccgtcgacagtcgaactgacacgtgggggccggtaaccgtttcccgccagtagccgttggttaggggaggccagtcagcagcgggcacggcggagcagggagccatgtgcgcactgctgctcaagcgtgtgcgtgtcgtcgtgctgcgcatgtggggtttccctgcccaagcatcggcaacggctactagaggcaggacatgcctgtcgcctcctggccgttgatctcggccgatctgtacctgtactctctaacgattgatttcgtgtagtggcctgcttggcttcctgggatccttgtcttttaatctcgtttcaccaatgcaacaatcggccgttttgtgccacgtgctgtacatttgtctgtattttgttatcctgattgattggccc

SEQ ID NO: 10122 - protein, 328 aa, Zea mays subsp. mays
  peptide (1)..(328): Ceres Seq. ID no. 12365956
  misc_feature (1)..(328): Homolog of NCBI NO: 38345533 NR Description: OSJNBa0020J04.8 [Oryza sativa (japonica
  misc_feature (1)..(328): Homolog of NCBI NO: 19347728 NR Description: putative receptor protein kinase [Arabidopsis
  misc_feature (1)..(328): Homolog of NCBI NO: 7434426 NR Description: hypothetical protein F23E13.70 - Arabidopsis >gi|2961377|emb|CAA18124.1| putative receptor protein kinase thaliana] >gi|7270570|emb|CAB81527.1| putative receptor protein
  misc_feature (1)..(328): Homolog of NCBI NO: 30690596 NR Description: leucine rich repeat protein family [Arabidopsis
  misc_feature (1)..(328): Homolog of NCBI NO: 15222322 NR Description: leucine-rich repeat transmembrane protein kinase, protein id: At1g75640.1 [Arabidopsis thaliana]
  misc_feature (1)..(323): Homolog of NCBI NO: 13620169 NR Description: hypothetical protein [Capsella rubella]
  misc_feature (1)..(328): Homolog of NCBI NO: 15219817 NR Description: receptor-like kinase, putative; protein id: [Arabidopsis thaliana] >gi|15810511|gb|AAL07143.1| putative kinase [Arabidopsis thaliana] >gi|23297726|gb|AAN12912.1|
  misc_feature (1)..(328): Homolog of NCBI NO: 25404291 NR Description: probable Serine/Threonine protein kinase F8A5.31
  misc_feature (1)..(311): Homolog of NCBI NO: 34906992 NR Description: putative receptor-like protein [Oryza sativa
  misc_feature (1)..(323): Homolog of NCBI NO: 15222751 NR Description: receptor kinase, putative; protein id: At1g55610.1
RITYADTVEATHQFDEENVLSRGRHGLVFKACYSDGTVLAILRLPSRSADGAVVIDEGSFRKEAESLGKVKHRNLTVLRGYYAGPPPDVRLLVYDYMPNGNLATLLQEASHRDGHILNWPMRHLIALGVSRGLAFLHQSGVVHGDVKPQNILFDADFEPHLSDFGLEPMVVTAAAAAASTSAATATPPVGSLGYVAPDAAAAGQATREGDVYSFGIVLLELLTGRRPGMFAGEKEEEEEEDIVKWVKRQLQRGAVAELLEPGLLELDPESSEWEEFLLGIKVGLLCTASDPLDRPAMGDVVFMLEGCRVGPDIPSPSSADPTSQPSPA

SEQ ID NO: 10123 - protein, 232 aa, Zea mays subsp. mays
  peptide (1)..(232): Ceres Seq. ID no. 12365957
  misc_feature (1)..(232): Homolog of NCBI NO: 38345533 NR Description: OSJNBa0020J04.8 [Oryza sativa (japonica
  misc_feature (1)..(232): Homolog of NCBI NO: 19347728 NR Description: putative receptor protein kinase [Arabidopsis
  misc_feature (1)..(232): Homolog of NCBI NO: 7434426 NR Description: hypothetical protein F23E13.70 - Arabidopsis >gi|2961377|emb|CAA18124.1| putative receptor protein kinase thaliana] >gi|7270570|emb|CAB81527.1| putative receptor protein
  misc_feature (1)..(232): Homolog of NCBI NO: 30690596 NR Description: leucine rich repeat protein family [Arabidopsis
  misc_feature (1)..(232): Homolog of NCBI NO: 15222322 NR Description: leucine-rich repeat transmembrane protein kinase, protein id: At1g75640.1 [Arabidopsis thaliana]
  misc_feature (1)..(227): Homolog of NCBI NO: 13620169 NR Description: hypothetical protein [Capsella rubella]
  misc_feature (1)..(232): Homolog of NCBI NO: 15219817 NR Description: receptor-like kinase, putative; protein id: [Arabidopsis thaliana] >gi|15810511|gb|AAL07143.1| putative kinase [Arabidopsis thaliana] >gi|23297726|gb|AAN12912.1|
  misc_feature (1)..(232): Homolog of NCBI NO: 25404291 NR Description: probable Serine/Threonine protein kinase F8A5.31
  misc_feature (1)..(215): Homolog of NCBI NO: 34906992 NR Description: putative receptor-like protein [Oryza sativa
  misc_feature (1)..(227): Homolog of NCBI NO: 15222751 NR Description: receptor kinase, putative; protein id: At1g55610.1
MPNGNLATLLQEASHRDGHILNWPMRHLIALGVSRGLAFLHQSGVVHGDVKPQNILFDADFEPHLSDFGLEPMVVTAAAAAASTSAATATPPVGSLGYVAPDAAAAGQATREGDVYSFGIVLLELLTGRRPGMFAGEKEEEEEEDIVKWVKRQLQRGAVAELLEPGLLELDPESSEWEEFLLGIKVGLLCTASDPLDRPAMGDVVFMLEGCRVGPDIPSPSSADPTSQPSPA

SEQ ID NO: 10124 - protein, 208 aa, Zea mays subsp. mays
  peptide (1)..(208): Ceres Seq. ID no. 12365958
  misc_feature (1)..(208): Homolog of NCBI NO: 38345533 NR Description: OSJNBa0020J04.8 [Oryza sativa (japonica
  misc_feature (1)..(208): Homolog of NCBI NO: 19347728 NR Description: putative receptor protein kinase [Arabidopsis
  misc_feature (1)..(208): Homolog of NCBI NO: 7434426 NR Description: hypothetical protein F23E13.70 - Arabidopsis >gi|2961377|emb|CAA18124.1| putative receptor protein kinase thaliana] >gi|7270570|emb|CAB81527.1| putative receptor protein
  misc_feature (1)..(208): Homolog of NCBI NO: 30690596 NR Description: leucine rich repeat protein family [Arabidopsis
  misc_feature (1)..(208): Homolog of NCBI NO: 15222322 NR Description: leucine-rich repeat transmembrane protein kinase, protein id: At1g75640.1 [Arabidopsis thaliana]
  misc_feature (1)..(203): Homolog of NCBI NO: 13620169 NR Description: hypothetical protein [Capsella rubella]
  misc_feature (1)..(208): Homolog of NCBI NO: 15219817 NR Description: receptor-like kinase, putative; protein id: [Arabidopsis thaliana] >gi|15810511|gb|AAL07143.1| putative kinase [Arabidopsis thaliana] >gi|23297726|gb|AAN12912.1|
  misc_feature (1)..(208): Homolog of NCBI NO: 25404291 NR Description: probable Serine/Threonine protein kinase F8A5.31
  misc_feature (1)..(191): Homolog of NCBI NO: 34906992 NR Description: putative receptor-like protein [Oryza sativa
  misc_feature (1)..(203): Homolog of NCBI NO: 15222751 NR Description: receptor kinase, putative; protein id: At1g55610.1
MRHLIALGVSRGLAFLHQSGVVHGDVKPQNILFDADFEPHLSDFGLEPMVVTAAAAAASTSAATATPPVGSLGYVAPDAAAAGQATREGDVYSFGIVLLELLTGRRPGMFAGEKEEEEEEDIVKWVKRQLQRGAVAELLEPGLLELDPESSEWEEFLLGIKVGLLCTASDPLDRPAMGDVVFMLEGCRVGPDIPSPSSADPTSQPSPA

SEQ ID NO: 10125 - DNA, 1425 bp, Zea mays subsp. mays
  misc_feature (1)..(1425): Ceres Seq. ID no. 12391880
  misc_feature: MA Experiment ID: 108527 Result: Up-regulated in Transcription
  misc_feature: MA Experiment 108527 PARAMETER Experiment Name: Zm_5mM_NO_P Parameter: Age (day) Value: 8
  misc_feature: MA Experiment 108527 PARAMETER Experiment Name: Zm_5mM_NO_P Parameter: Organism Value: Zea mays
  misc_feature: MA Experiment 108527 PARAMETER Experiment Name: Zm_5mM_NO_P Parameter: Plant Line Value: 35A19
  misc_feature: MA Experiment 108527 PARAMETER Experiment Name: Zm_5mM_NO_P Parameter: Timepoint (hr) Value: 6
  misc_feature: MA Experiment 108527 PARAMETER Experiment Name: Zm_5mM_NO_P Parameter: Tissue Value: Aerial
  misc_feature: MA Experiment 108527 PARAMETER Experiment Name: Zm_5mM_NO_P Parameter: Treatment Value: 5mM NO vs. No Treatment
  misc_feature: MA Experiment ID: 108540 Result: Up-regulated in Transcription
  misc_feature: MA Experiment 108540 PARAMETER Experiment Name: Zm_20percent_PEG_P Parameter: Age (day) Value: 8
  misc_feature: MA Experiment 108540 PARAMETER Experiment Name: Zm_20percent_PEG_P Parameter: Organism Value: Zea mays
  misc_feature: MA Experiment 108540 PARAMETER Experiment Name: Zm_20percent_PEG_P Parameter: Plant Line Value: 35A19
  misc_feature: MA Experiment 108540 PARAMETER Experiment Name: Zm_20percent_PEG_P Parameter: Timepoint (hr) Value: 6
  misc_feature: MA Experiment 108540 PARAMETER Experiment Name: Zm_20percent_PEG_P Parameter: Tissue Value: Aerial
  misc_feature: MA Experiment 108540 PARAMETER Experiment Name: Zm_20percent_PEG_P Parameter: Treatment Value: 20percent PEG vs. No Treatment
  misc_feature: MA Experiment ID: 108687 Result: Down-regulated in Transcription
  misc_feature: MA Experiment 108687 PARAMETER Experiment Name: Zm_Embryos-Flowers__P Parameter: Tissue Value: Embryo vs. Aerial+
  misc_feature: MA Experiment ID: 20000492 Result: Down-regulated in Transcription
  misc_feature: MA Experiment 20000492 PARAMETER Experiment Name: Zm_Hybrid_Seed_Dev_P Parameter: DAP Value: 12
  misc_feature: MA Experiment 20000492 PARAMETER Experiment Name: Zm_Hybrid_Seed_Dev_P Parameter: Organism Value: Zea mays
  misc_feature: MA Experiment 20000492 PARAMETER Experiment Name: Zm_Hybrid_Seed_Dev_P Parameter: Plant Line Value: 35A19
  misc_feature: MA Experiment 20000492 PARAMETER Experiment Name: Zm_Hybrid_Seed_Dev_P Parameter: Tissue Value: Fert Kernel vs. Unfert Floret
aactaaccaacggacggaagtggcgtggcgaggcaaggccgccgcgaagccgagcaaatccaagcctccctcctctacccgttcctctcctgccttctcgggatctgcccgcccgccttgtgtgatcttgccgcctcgccccccgcggttggagctccggctgcacgacaccatgagcccccgcgcgtagaggctgggagagagggagcggggaacaaagttaggcaccaacaaagttaagtggggaggccagagctgcccagctgggtcgctgttctaccagagggatggacgggagcgccggctccttcgtcgccgtccgccggctctccggctccgaccgcgccgccgccttccaccactcctcttcggcggaggtcgtgacggggtcgacggcgtggatcgggagggggctctcctgcgtctgcgcgcagaggagggacagcgatgcgcgcctttccttcgatttgacgcctgtgcaggaagaatgcctacagaggttacaaaaccgtatagaagttcagtatgatagtgcaaacagagagcatcaggaagcactacagtccctttggtgtgcttcttttcctggcaccgagcttcgggggctaatatcagaacagtggaaagagatgggttggcaagggaaagacccatctacagattttagaggtggaggcttcatctccttggagaatctattgtactttgctaggaactatccaaaatctttccaggaactccttcgcaagcagaatggtgaccgtgcaatctgggagtatccatttgctgtcgctggtgtaaatataaccttcatgctcattcagatgcttgatctccaatcagttaaaccgaggtcattgttcggagcagttttcctaaagcttctttcagaaaacgatcaagcttttgacattctctactgcataaccttcaagctgatggatcagcaatggcttgacatgcatgctacttacatggacttcaacacggtcatgaagtctacacggcgtcagctagaaagggagctgttaattgaagatattcagaggattgaggacatgccatcatacaggcttctggcccggtagctagaagaaactgaaaccttaacatggctacatattgcaaggcggcttgagatgctaatggatcgcaacttatgtggacggcgacaatcttgaaatgtagatgacatgtatccttgtgtgttaggtacttgtggtctctggtaacctgatctctgaagattacaagatagggtttttttcctggtgatagaatgccacgtagggtaactgaagtgtctgatcagctcccatggccaaaaaaaaatttgtagggtgtgttattacaatctggtcgttgtccatcataccacgaaaggaagtattcctagggttgttgttgtaaacaggaggatttggg

SEQ ID NO: 10126 - protein, 266 aa, Zea mays subsp. mays
  peptide (1)..(266): Ceres Seq. ID no. 12391881
  misc_feature (86)..(246): Pfam Name: Protein of unknown function, DUF609 Pfam Description: Protein of unknown function, DUF609
  misc_feature (1)..(266): Homolog of NCBI NO: 11288393 NR Description: hypothetical protein F27H5.50 - Arabidopsis >gi|7576202|emb|CAB87863.1| putative protein [Arabidopsis
  misc_feature (33)..(265): Homolog of NCBI NO: 18408759 NR Description: hypothetical protein; protein id: At1g67400.1 thaliana] >gi|9828622|gb|AAG00245.1|AC002130_10 F1N21.22
  misc_feature (1)..(266): Homolog of NCBI NO: 14140119 NR Description: putative protein [Oryza sativa]
  misc_feature (1)..(264): Homolog of NCBI NO: 18406626 NR Description: expressed protein; protein id: At2g44770.1, by cDNA: 36996., supported by cDNA: gi_15810013, supported by gi_17981658 [Arabidopsis thaliana] >gi|20197031|gb|AAC27479.2|
  misc_feature (1)..(266): Homolog of NCBI NO: 18411543 NR Description: putative protein; protein id: At3g60260.1, by cDNA: 104796., supported by cDNA: gi_17473881, supported by gi_20148670 [Arabidopsis thaliana] >gi|17473882|gb|AAL38361.1|
  misc_feature (1)..(264): Homolog of NCBI NO: 7485547 NR Description: hypothetical protein At2g44770 [imported] -
  misc_feature (1)..(264): Homolog of NCBI NO: 15810014 NR Description: At2g44770/F16B22.26 [Arabidopsis thaliana]
  misc_feature (1)..(266): Homolog of NCBI NO: 38345956 NR Description: OSJNBb0038F03.14 [Oryza sativa (japonica
  misc_feature (28)..(264): Homolog of NCBI NO: 15218859 NR Description: hypothetical protein; protein id: At1g03620.1
  misc_feature (32)..(264): Homolog of NCBI NO: 38344760 NR Description: OSJNBa0068L06.3 [Oryza sativa (japonica
MDGSAGSFVAVRRLSGSDRAAAFHHSSSAEVVTGSTAWIGRGLSCVCAQRRDSDARLSFDLTPVQEECLQRLQNRIEVQYDSANREHQEALQSLWCASFPGTELRGLISEQWKEMGWQGKDPSTDFRGGGFISLENLLYFARNYPKSFQELLRKQNGDRAIWEYPFAVAGVNITFMLIQMLDLQSVKPRSLFGAVFLKLLSENDQAFDILYCITFKLMDQQWLDMHATYMDFNTVMKSTRRQLERELLIEDIQRIEDMPSYRLLAR

SEQ ID NO: 10127 - protein, 152 aa, Zea mays subsp. mays
  peptide (1)..(152): Ceres Seq. ID no. 12391882
  misc_feature (1)..(132): Pfam Name: Protein of unknown function, DUF609 Pfam Description: Protein of unknown function, DUF609
  misc_feature (1)..(152): Homolog of NCBI NO: 14140119 NR Description: putative protein [Oryza sativa]
  misc_feature (1)..(152): Homolog of NCBI NO: 38345956 NR Description: OSJNBb0038F03.14 [Oryza sativa (japonica
  misc_feature (1)..(150): Homolog of NCBI NO: 18406626 NR Description: expressed protein; protein id: At2g44770.1, by cDNA: 36996., supported by cDNA: gi_15810013, supported by gi_17981658 [Arabidopsis thaliana] >gi|20197031|gb|AAC27479.2|
  misc_feature (1)..(150): Homolog of NCBI NO: 15810014 NR Description: At2g44770/F16B22.26 [Arabidopsis thaliana]
  misc_feature (1)..(152): Homolog of NCBI NO: 18411543 NR Description: putative protein; protein id: At3g60260.1, by cDNA: 104796., supported by cDNA: gi_17473881, supported by gi_20148670 [Arabidopsis thaliana] >gi|17473882|gb|AAL38361.1|
  misc_feature (1)..(150): Homolog of NCBI NO: 7485547 NR Description: hypothetical protein At2g44770 [imported] -
  misc_feature (1)..(152): Homolog of NCBI NO: 11288393 NR Description: hypothetical protein F27H5.50 - Arabidopsis >gi|7576202|emb|CAB87863.1| putative protein [Arabidopsis
  misc_feature (1)..(151): Homolog of NCBI NO: 18408759 NR Description: hypothetical protein; protein id: At1g67400.1 thaliana] >gi|9828622|gb|AAG00245.1|AC002130_10 F1N21.22
  misc_feature (1)..(150): Homolog of NCBI NO: 15218859 NR Description: hypothetical protein; protein id: At1g03620.1
  misc_feature (1)..(150): Homolog of NCBI NO: 38344760 NR Description: OSJNBa0068L06.3 [Oryza sativa (japonica
MGWQGKDPSTDFRGGGFISLENLLYFARNYPKSFQELLRKQNGDRAIWEYPFAVAGVNITFMLIQMLDLQSVKPRSLFGAVFLKLLSENDQAFDILYCITFKLMDQQWLDMHATYMDFNTVMKSTRRQLERELLIEDIQRIEDMPSYRLLAR

SEQ ID NO: 10128 - DNA, 1199 bp, Zea mays subsp. mays
  misc_feature (1)..(1199): Ceres Seq. ID no. 12407579
  misc_feature: MA Experiment ID: 20000479 Result: Up-regulated in Transcription
  misc_feature: MA Experiment 20000479 PARAMETER Experiment Name: Zm_Drought_P Parameter: Age (day) Value: 10
  misc_feature: MA Experiment 20000479 PARAMETER Experiment Name: Zm_Drought_P Parameter: Organism Value: Zea mays
  misc_feature: MA Experiment 20000479 PARAMETER Experiment Name: Zm_Drought_P Parameter: Plant Line Value: 35A19
  misc_feature: MA Experiment 20000479 PARAMETER Experiment Name: Zm_Drought_P Parameter: Timepoint (hr) Value: 48
  misc_feature: MA Experiment 20000479 PARAMETER Experiment Name: Zm_Drought_P Parameter: Tissue Value: Aerial
  misc_feature: MA Experiment 20000479 PARAMETER Experiment Name: Zm_Drought_P Parameter: Treatment Value: Drought vs. No Drought
gcaaatcgccccccaaaccaaccgggccggccgacacaagcagcatcccgtcggcggcgatggacctggtgtcgagcgacctcgcggcgctgggcgcggtggagctggtccgcgtctcggcgtcgatcccgcgcgcggctccgcgcaccttcgcgctgctcaccgcctgcctcgtcttcccgctctccttcgccgtgctcgcgcactccctcttcacccaccccatcctgctccgcatccggggcgccgcccactcggggttcgcgccgtggctcggcctcttcgcgtaccagttcatgtacctcatcgtcctcttcaccttctccctcctctccaccgccgccgccgtcttcaccgtcgcctccctctacgccgggaagcccgcgtccgtctcctcctcgctcagcgcgctgcgccccatcctgccccgcctcctccgcaccttcctctgggtctccctcctcatgctcgcctaccacctcgccttcgcgctcgccgtcctcctgctcgtcgtcctcgtcttcctcgggatccacgtctacatctccgcgctgtggcacctcgccagcgtcgtctccgtgctcgagccgctctgcgggctcgccgccatggccaagagcaggcagctgctccagggccgcaccggcaccgcagccacgcttgtcgtctcctacttcgcggtctgcggcgcgacctcgctgctgttccgtgccgctgtcgttaagggacgcaccgaggaggggagcttcggcctggccttgcctggccggctgcttgtcggcgccgtgctggtgtgcgttcttgtctctgtcaatctgctaggactgctcgtgcagagtgtcttctactacgcctgcaaggccttccacagccagcagattgaccgcactgcattgtatgagcaccttggaggctaccttggggagtacgtgccactcaagagcaatatccagatggagaacctttgagagttggagcataggacaagggtaatcttctcacctctcattgctacatactagcagttttctatggatctttctcaaaagatgactatggtttacttggagctatctggtcttgttgtttctagtatcctgtagtagtgtagtttagaatctgtacaagtgaaaatgcgcagtatggaaccaatctatggaatggaacgtagatgcatgaacaaggttgtctttcgtctc

SEQ ID NO: 10129 - protein, 321 aa, Zea mays subsp. mays
  peptide (1)..(321): Ceres Seq. ID no. 12407580
  misc_feature (160)..(321): Homolog of NCBI NO: 34908936 NR Description: P0691E06.20 [Oryza sativa (japonica
  misc_feature (20)..(172): Homolog of NCBI NO: 34908936 NR Description: P0691E06.20 [Oryza sativa (japonica
  misc_feature (90)..(320): Homolog of NCBI NO: 30684945 NR Description: expressed protein [Arabidopsis thaliana]
  misc_feature (90)..(320): Homolog of NCBI NO: 15241607 NR Description: putative protein; protein id: At5g44860.1, by cDNA: 31042. [Arabidopsis thaliana] >gi|2660664|gb|AAC79135.1| protein [Arabidopsis thaliana] >gi|10177476|dbj|BAB10867.1|
  misc_feature (90)..(321): Homolog of NCBI NO: 18397813 NR Description: expressed protein; protein id: At1g31130.1, by cDNA: 151489., supported by cDNA: gi_13272450, supported by gi_19698822 [Arabidopsis thaliana] >gi|25513746|pir||H86436
  misc_feature (20)..(320): Homolog of NCBI NO: 7485737 NR Description: hypothetical protein F18F4.50 - Arabidopsis >gi|2827649|emb|CAA16603.1| putative protein [Arabidopsis >gi|7268790|emb|CAB78995.1| putative protein [Arabidopsis
  misc_feature (20)..(277): Homolog of NCBI NO: 15241607 NR Description: putative protein; protein id: At5g44860.1, by cDNA: 31042. [Arabidopsis thaliana] >gi|2660664|gb|AAC79135.1| protein [Arabidopsis thaliana] >gi|10177476|dbj|BAB10867.1|
  misc_feature (20)..(175): Homolog of NCBI NO: 30684945 NR Description: expressed protein [Arabidopsis thaliana]
  misc_feature (20)..(172): Homolog of NCBI NO: 18397813 NR Description: expressed protein; protein id: At1g31130.1, by cDNA: 151489., supported by cDNA: gi_13272450, supported by gi_19698822 [Arabidopsis thaliana] >gi|25513746|pir||H86436
KSPPKPTGPADTSSIPSAAMDLVSSDLAALGAVELVRVSASIPRAAPRTFALLTACLVFPLSFAVLAHSLFTHPILLRIRGAAHSGFAPWLGLFAYQFMYLIVLFTFSLLSTAAAVFTVASLYAGKPASVSSSLSALRPILPRLLRTFLWVSLLMLAYHLAFALAVLLLVVLVFLGIHVYISALWHLASVVSVLEPLCGLAAMAKSRQLLQGRTGTAATLVVSYFAVCGATSLLFRAAVVKGRTEEGSFGLALPGRLLVGAVLVCVLVSVNLLGLLVQSVFYYACKAFHSQQIDRTALYEHLGGYLGEYVPLKSNIQMENL

SEQ ID NO: 10130 - protein, 302 aa, Zea mays subsp. mays
  peptide (1)..(302): Ceres Seq. ID no. 12407581
  misc_feature (141)..(302): Homolog of NCBI NO: 34908936 NR Description: P0691E06.20 [Oryza sativa (japonica
  misc_feature (1)..(153): Homolog of NCBI NO: 34908936 NR Description: P0691E06.20 [Oryza sativa (japonica
  misc_feature (71)..(301): Homolog of NCBI NO: 30684945 NR Description: expressed protein [Arabidopsis thaliana]
  misc_feature (71)..(301): Homolog of NCBI NO: 15241607 NR Description: putative protein; protein id: At5g44860.1, by cDNA: 31042. [Arabidopsis thaliana] >gi|2660664|gb|AAC79135.1| protein [Arabidopsis thaliana] >gi|10177476|dbj|BAB10867.1|
  misc_feature (71)..(302): Homolog of NCBI NO: 18397813 NR Description: expressed protein; protein id: At1g31130.1, by cDNA: 151489., supported by cDNA: gi_13272450, supported by gi_19698822 [Arabidopsis thaliana] >gi|25513746|pir||H86436
  misc_feature (1)..(301): Homolog of NCBI NO: 7485737 NR Description: hypothetical protein F18F4.50 - Arabidopsis >gi|2827649|emb|CAA16603.1| putative protein [Arabidopsis >gi|7268790|emb|CAB78995.1| putative protein [Arabidopsis
  misc_feature (1)..(258): Homolog of NCBI NO: 15241607 NR Description: putative protein; protein id: At5g44860.1, by cDNA: 31042. [Arabidopsis thaliana] >gi|2660664|gb|AAC79135.1| protein [Arabidopsis thaliana] >gi|10177476|dbj|BAB10867.1|
  misc_feature (1)..(156): Homolog of NCBI NO: 30684945 NR Description: expressed protein [Arabidopsis thaliana]
  misc_feature (1)..(153): Homolog of NCBI NO: 18397813 NR Description: expressed protein; protein id: At1g31130.1, by cDNA: 151489., supported by cDNA: gi_13272450, supported by gi_19698822 [Arabidopsis thaliana] >gi|25513746|pir||H86436
MDLVSSDLAALGAVELVRVSASIPRAAPRTFALLTACLVFPLSFAVLAHSLFTHPILLRIRGAAHSGFAPWLGLFAYQFMYLIVLFTFSLLSTAAAVFTVASLYAGKPASVSSSLSALRPILPRLLRTFLWVSLLMLAYHLAFALAVLLLVVLVFLGIHVYISALWHLASVVSVLEPLCGLAAMAKSRQLLQGRTGTAATLVVSYFAVCGATSLLFRAAVVKGRTEEGSFGLALPGRLLVGAVLVCVLVSVNLLGLLVQSVFYYACKAFHSQQIDRTALYEHLGGYLGEYVPLKSNIQMENL

SEQ ID NO: 10131 - protein, 273 aa, Zea mays subsp. mays
  peptide (1)..(273): Ceres Seq. ID no. 12407582
  misc_feature (49)..(205): Pfam Name: Glycoprotein GG/GX Pfam Description: Glycoprotein GG/GX
  misc_feature (35)..(273): Homolog of NCBI NO: 13592175 NR Description: ppg3 [Leishmania major]
  misc_feature (37)..(245): Homolog of NCBI NO: 11359723 NR Description: proteophosphoglycan, membrane-associated - Leishmania major (fragment) >gi|5420389|emb|CAB46680.1|
  misc_feature (35)..(273): Homolog of NCBI NO: 13592175 NR Description: ppg3 [Leishmania major]
  misc_feature (37)..(273): Homolog of NCBI NO: 5420387 NR Description: proteophosphoglycan [Leishmania major]
  misc_feature (37)..(273): Homolog of NCBI NO: 13592175 NR Description: ppg3 [Leishmania major]
  misc_feature (37)..(273): Homolog of NCBI NO: 13592175 NR Description: ppg3 [Leishmania major]
  misc_feature (37)..(273): Homolog of NCBI NO: 13592175 NR Description: ppg3 [Leishmania major]
  misc_feature (35)..(273): Homolog of NCBI NO: 13592175 NR Description: ppg3 [Leishmania major]
  misc_feature (54)..(273): Homolog of NCBI NO: 11359723 NR Description: proteophosphoglycan, membrane-associated - Leishmania major (fragment) >gi|5420389|emb|CAB46680.1|
  misc_feature (35)..(273): Homolog of NCBI NO: 13592175 NR Description: ppg3 [Leishmania major]
ANRPPNQPGRPTQAASRRRRWTWCRATSRRWARWSWSASRRRSRARLRAPSRCSPPASSSRSPSPCSRTPSSPTPSCSASGAPPTRGSRRGSASSRTSSCTSSSSSPSPSSPPPPPSSPSPPSTPGSPRPSPPRSARCAPSCPASSAPSSGSPSSCSPTTSPSRSPSSCSSSSSSSGSTSTSPRCGTSPASSPCSSRSAGSPPWPRAGSCSRAAPAPQPRLSSPTSRSAARPRCCSVPLSLRDAPRRGASAWPCLAGCLSAPCWCAFLSLSIC

SEQ ID NO: 10132 - DNA, 1728 bp, Zea mays subsp. mays
  misc_feature (1)..(1728): Ceres Seq. ID no. 12352730
  misc_feature: MA Experiment ID: 108535 Result: Down-regulated in Transcription
  misc_feature: MA Experiment 108535 PARAMETER Experiment Name: Zm_Meristem_P Parameter: Age (day) Value: 8
  misc_feature: MA Experiment 108535 PARAMETER Experiment Name: Zm_Meristem_P Parameter: Organism Value: Zea mays
  misc_feature: MA Experiment 108535 PARAMETER Experiment Name: Zm_Meristem_P Parameter: Plant Line Value: 35A19
  misc_feature: MA Experiment 108535 PARAMETER Experiment Name: Zm_Meristem_P Parameter: Tissue Value: Root Meristem vs. Above Root Meristem
  misc_feature: MA Experiment ID: 20000492 Result: Down-regulated in Transcription
  misc_feature: MA Experiment 20000492 PARAMETER Experiment Name: Zm_Hybrid_Seed_Dev_P Parameter: DAP Value: 12
  misc_feature: MA Experiment 20000492 PARAMETER Experiment Name: Zm_Hybrid_Seed_Dev_P Parameter: Organism Value: Zea mays
  misc_feature: MA Experiment 20000492 PARAMETER Experiment Name: Zm_Hybrid_Seed_Dev_P Parameter: Plant Line Value: 35A19
  misc_feature: MA Experiment 20000492 PARAMETER Experiment Name: Zm_Hybrid_Seed_Dev_P Parameter: Tissue Value: Fert Kernel vs. Unfert Floret
acatcacactcgcttcaatattgacaccaccaacgcacgcacgacccttcttcctcctcccggcggcggctaggctaccgctattgatttctccttgcatcgcctttattgcgctcacctgctctgccaagtgccaacgtcgtacacttccagcagtggagggagccggagcacgagctgcccgctggacgagccgtcgccgccacagaaatctacatataattgcagccccaaccacctcgttcctcttccccttccccctccccagccaaatccgctttcctagctctaatcgccgccgatctcgccggaggaactgctagctcgctgctcccttcacttctcagattaaaagttgcctcaagaagaagatccctctgcgccgctgcatgttgagcgagcctaccgtagcgacgagcgcggatatgaattggtgttgtgttcctaaggccaagagagaagagaacccttactccaacagcatcggcggcatctactccgagaagaacataaggctcttctcctatgccgagttaagatctgctaccgacaacttcaaccgcaccaacaaagtgggacgaggcggattcgggacagtctataagggaaccatccgaagcgggcgagaggtcgcggtgaaggtcctctccgccgagtccaggcagggcatcagggagttcctgacggagatcgacgtcatcagcaacgtcaagcaccccaacctcgtcgaactcatcggctgctgcgtcgagggaagcaaccggattctggtgtatgagtacctcaagaacagcagccttgaccgtgcgctgctggcttctaacagtgagcctgccgacttcacctggagcgtcaggtctgctatatgcctcggagtcgctcggggccttgcgtacctgcacgaagagatcgcggcgccgatcgtgcacagagacatcaaggccagcaacatactgctcgacaggaactacgtccccaagatcggggatttcggtctggccaagctgtttcctgacaatgtcacccacatcagcacccgcgtcgcgggaacaacaggctaccttgcgcctgagtacgcctggcatggccagctcaccaagaaagcggacatctacagctttggtgtccttgtcctggagatagtgagcggcactagtagctccaggagcatactcatggatgacaagattctcctagagaaggcatgggagctgtacgaagcgaagaggctcaaggaactggtggatccagcccttgtagactgccctgaggaagaagccatcaggtacatcatggtggccctcttctgcctacaggcggccgccgcgcgccggccgacgatgccccaggtcgtcaccatgctgtccaagcccgtccggatcaacgagagcgagctgacggcgccggggtacctccaggagtacagcaggcggagccccttgtccaaggccaccacttccaccgactccaggttcaagaacctggcgtcccaggaggactccaacatgttcagcacggtggtgccacccacggtgaccgagatgagccccaggtgaagcaaccgccatgtaattttgactgattccttccttgcgttttgtcaaccggcgactatatgatgtagtgccaagtgtgttttcctcctgcaaatgcggcaactagatcttgtacatatagattagtgaatccatgccagacccagagcaatgcaagattgctgtttgttgc

SEQ ID NO: 10133 - protein, 388 aa, Zea mays subsp. mays
  peptide (1)..(388): Ceres Seq. ID no. 12352731
  misc_feature (15)..(388): Homolog of NCBI NO: 38344039 NR Description: OSJNBb0017I01.6 [Oryza sativa (japonica
  misc_feature (40)..(388): Homolog of NCBI NO: 5923666 NR Description: putative receptor ser/thr protein kinase
  misc_feature (40)..(388): Homolog of NCBI NO: 18398327 NR Description: putative receptor ser/thr protein kinase; protein At3g09010.1, supported by cDNA: 124301. [Arabidopsis thaliana]
  misc_feature (40)..(376): Homolog of NCBI NO: 34901978 NR Description: putative receptor ser/thr protein [Oryza sativa
  misc_feature (40)..(388): Homolog of NCBI NO: 6403501 NR Description: putative protein kinase [Arabidopsis thaliana]
  misc_feature (16)..(385): Homolog of NCBI NO: 38344329 NR Description: OSJNBa0058K23.11 [Oryza sativa (japonica
  misc_feature (33)..(376): Homolog of NCBI NO: 18394385 NR Description: receptor-like serine/threonine kinase, putative; id: At1g16670.1, supported by cDNA: gi_16649102 [Arabidopsis >gi|16649103|gb|AAL24403.1| Unknown protein [Arabidopsis
  misc_feature (14)..(376): Homolog of NCBI NO: 25287648 NR Description: hypothetical protein F19K19.4 [imported] - thaliana >gi|9989053|gb|AAG10816.1|AC011808_4 Unknown protein
  misc_feature (44)..(388): Homolog of NCBI NO: 6056376 NR Description: Similar to serine/threonine kinases [Arabidopsis
  misc_feature (44)..(388): Homolog of NCBI NO: 18405700 NR Description: similar to receptor-like protein kinase,
MLSEPTVATSADMNWCCVPKAKREENPYSNSIGGIYSEKNIRLFSYAELRSATDNFNRTNKVGRGGFGTVYKGTIRSGREVAVKVLSAESRQGIREFLTEIDVISNVKHPNLVELIGCCVEGSNRILVYEYLKNSSLDRALLASNSEPADFTWSVRSAICLGVARGLAYLHEEIAAPIVHRDIKASNILLDRNYVPKIGDFGLAKLFPDNVTHISTRVAGTTGYLAPEYAWHGQLTKKADIYSFGVLVLEIVSGTSSSRSILMDDKILLEKAWELYEAKRLKELVDPALVDCPEEEAIRYIMVALFCLQAAAARRPTMPQVVTMLSKPVRINESELTAPGYLQEYSRRSPLSKATTSTDSRFKNLASQEDSNMFSTVVPPTVTEMSPR

SEQ ID NO: 10134 - protein, 376 aa, Zea mays subsp. mays
  peptide (1)..(376): Ceres Seq. ID no. 12352732
  misc_feature (3)..(376): Homolog of NCBI NO: 38344039 NR Description: OSJNBb0017I01.6 [Oryza sativa (japonica
  misc_feature (28)..(376): Homolog of NCBI NO: 5923666 NR Description: putative receptor ser/thr protein kinase
  misc_feature (28)..(376): Homolog of NCBI NO: 18398327 NR Description: putative receptor ser/thr protein kinase; protein At3g09010.1, supported by cDNA: 124301. [Arabidopsis thaliana]
  misc_feature (28)..(364): Homolog of NCBI NO: 34901978 NR Description: putative receptor ser/thr protein [Oryza sativa
  misc_feature (28)..(376): Homolog of NCBI NO: 6403501 NR Description: putative protein kinase [Arabidopsis thaliana]
  misc_feature (4)..(373): Homolog of NCBI NO: 38344329 NR Description: OSJNBa0058K23.11 [Oryza sativa (japonica
  misc_feature (21)..(364): Homolog of NCBI NO: 18394385 NR Description: receptor-like serine/threonine kinase, putative; id: At1g16670.1, supported by cDNA: gi_16649102 [Arabidopsis >gi|16649103|gb|AAL24403.1| Unknown protein [Arabidopsis
  misc_feature (2)..(364): Homolog of NCBI NO: 25287648 NR Description: hypothetical protein F19K19.4 [imported] - thaliana >gi|9989053|gb|AAG10816.1|AC011808_4 Unknown protein
  misc_feature (32)..(376): Homolog of NCBI NO: 6056376 NR Description: Similar to serine/threonine kinases [Arabidopsis
  misc_feature (32)..(376): Homolog of NCBI NO: 18405700 NR Description: similar to receptor-like protein kinase,
MNWCCVPKAKREENPYSNSIGGIYSEKNIRLFSYAELRSATDNFNRTNKVGRGGFGTVYKGTIRSGREVAVKVLSAESRQGIREFLTEIDVISNVKHPNLVELIGCCVEGSNRILVYEYLKNSSLDRALLASNSEPADFTWSVRSAICLGVARGLAYLHEEIAAPIVHRDIKASNILLDRNYVPKIGDFGLAKLFPDNVTHISTRVAGTTGYLAPEYAWHGQLTKKADIYSFGVLVLEIVSGTSSSRSILMDDKILLEKAWELYEAKRLKELVDPALVDCPEEEAIRYIMVALFCLQAAAARRPTMPQVVTMLSKPVRINESELTAPGYLQEYSRRSPLSKATTSTDSRFKNLASQEDSNMFSTVVPPTVTEMSPR

SEQ ID NO: 10135 - DNA, 1118 bp, Zea mays subsp. mays
  misc_feature (1)..(1118): Ceres Seq. ID no. 12406447
  misc_feature: MA Experiment ID: 108515 Result: Up-regulated in Transcription
  misc_feature: MA Experiment 108515 PARAMETER Experiment Name: Zm_2mM_SA_P Parameter: Age (day) Value: 8
  misc_feature: MA Experiment 108515 PARAMETER Experiment Name: Zm_2mM_SA_P Parameter: Organism Value: Zea mays
  misc_feature: MA Experiment 108515 PARAMETER Experiment Name: Zm_2mM_SA_P Parameter: Plant Line Value: 35A19
  misc_feature: MA Experiment 108515 PARAMETER Experiment Name: Zm_2mM_SA_P Parameter: Timepoint (hr) Value: 12
  misc_feature: MA Experiment 108515 PARAMETER Experiment Name: Zm_2mM_SA_P Parameter: Tissue Value: Aerial
  misc_feature: MA Experiment 108515 PARAMETER Experiment Name: Zm_2mM_SA_P Parameter: Treatment Value: 2mM SA vs. No Treatment
  misc_feature: MA Experiment ID: 108527 Result: Up-regulated in Transcription
  misc_feature: MA Experiment 108527 PARAMETER Experiment Name: Zm_5mM_NO_P Parameter: Age (day) Value: 8
  misc_feature: MA Experiment 108527 PARAMETER Experiment Name: Zm_5mM_NO_P Parameter: Organism Value: Zea mays
  misc_feature: MA Experiment 108527 PARAMETER Experiment Name: Zm_5mM_NO_P Parameter: Plant Line Value: 35A19
  misc_feature: MA Experiment 108527 PARAMETER Experiment Name: Zm_5mM_NO_P Parameter: Timepoint (hr) Value: 6
  misc_feature: MA Experiment 108527 PARAMETER Experiment Name: Zm_5mM_NO_P Parameter: Tissue Value: Aerial
  misc_feature: MA Experiment 108527 PARAMETER Experiment Name: Zm_5mM_NO_P Parameter: Treatment Value: 5mM NO vs. No Treatment
  misc_feature: MA Experiment ID: 108528 Result: Down-regulated in Transcription
  misc_feature: MA Experiment 108528 PARAMETER Experiment Name: Zm_Imbibed_Seeds_P Parameter: Age (day) Value: 5 vs. 2
  misc_feature: MA Experiment 108528 PARAMETER Experiment Name: Zm_Imbibed_Seeds_P Parameter: Organism Value: Zea mays
  misc_feature: MA Experiment 108528 PARAMETER Experiment Name: Zm_Imbibed_Seeds_P Parameter: Plant Line Value: 35A19
  misc_feature: MA Experiment 108528 PARAMETER Experiment Name: Zm_Imbibed_Seeds_P Parameter: Tissue Value: Aerial vs. Embryo
  misc_feature: MA Experiment ID: 108530 Result: Down-regulated in Transcription
  misc_feature: MA Experiment 108530 PARAMETER Experiment Name: Zm_Imbibed_Seeds_P Parameter: Age (day) Value: 6 vs. 2
  misc_feature: MA Experiment 108530 PARAMETER Experiment Name: Zm_Imbibed_Seeds_P Parameter: Organism Value: Zea mays
  misc_feature: MA Experiment 108530 PARAMETER Experiment Name: Zm_Imbibed_Seeds_P Parameter: Plant Line Value: 35A19
  misc_feature: MA Experiment 108530 PARAMETER Experiment Name: Zm_Imbibed_Seeds_P Parameter: Tissue Value: Aerial vs. Embryo
  misc_feature: MA Experiment ID: 108543 Result: Up-regulated in Transcription
  misc_feature: MA Experiment ID: 108544 Result: Down-regulated in Transcription
  misc_feature: MA Experiment ID: 108545 Result: Down-regulated in Transcription
  misc_feature: MA Experiment 108545 PARAMETER Experiment Name: Zm_Imbibed_Seeds_P Parameter: Age (day) Value: 3 vs. 2
  misc_feature: MA Experiment 108545 PARAMETER Experiment Name: Zm_Imbibed_Seeds_P Parameter: Organism Value: Zea mays
  misc_feature: MA Experiment 108545 PARAMETER Experiment Name: Zm_Imbibed_Seeds_P Parameter: Plant Line Value: 35A19
  misc_feature: MA Experiment 108545 PARAMETER Experiment Name: Zm_Imbibed_Seeds_P Parameter: Tissue Value: Aerial vs. Embryo
  misc_feature: MA Experiment ID: 108547 Result: Down-regulated in Transcription
  misc_feature: MA Experiment 108547 PARAMETER Experiment Name: Zm_Imbibed_Seeds_P Parameter: Age (day) Value: 4 vs. 2
  misc_feature: MA Experiment 108547 PARAMETER Experiment Name: Zm_Imbibed_Seeds_P Parameter: Organism Value: Zea mays
  misc_feature: MA Experiment 108547 PARAMETER Experiment Name: Zm_Imbibed_Seeds_P Parameter: Plant Line Value: 35A19
  misc_feature: MA Experiment 108547 PARAMETER Experiment Name: Zm_Imbibed_Seeds_P Parameter: Tissue Value: Aerial vs. Embryo
  misc_feature: MA Experiment ID: 108559 Result: Up-regulated in Transcription
  misc_feature: MA Experiment 108559 PARAMETER Experiment Name: Zm_5mM_NO_P Parameter: Age (day) Value: 8
  misc_feature: MA Experiment 108559 PARAMETER Experiment Name: Zm_5mM_NO_P Parameter: Organism Value: Zea mays
  misc_feature: MA Experiment 108559 PARAMETER Experiment Name: Zm_5mM_NO_P Parameter: Plant Line Value: 35A19
  misc_feature: MA Experiment 108559 PARAMETER Experiment Name: Zm_5mM_NO_P Parameter: Timepoint (hr) Value: 12
  misc_feature: MA Experiment 108559 PARAMETER Experiment Name: Zm_5mM_NO_P Parameter: Tissue Value: Aerial
  misc_feature: MA Experiment 108559 PARAMETER Experiment Name: Zm_5mM_NO_P Parameter: Treatment Value: 5mM NO vs. No Treatment
  misc_feature: MA Experiment ID: 20000480 Result: Down-regulated in Transcription
  misc_feature: MA Experiment 20000480 PARAMETER Experiment Name: Zm_Drought_P Parameter: Age (day) Value: 11
  misc_feature: MA Experiment 20000480 PARAMETER Experiment Name: Zm_Drought_P Parameter: Organism Value: Zea mays
  misc_feature: MA Experiment 20000480 PARAMETER Experiment Name: Zm_Drought_P Parameter: Plant Line Value: 35A19
  misc_feature: MA Experiment 20000480 PARAMETER Experiment Name: Zm_Drought_P Parameter: Timepoint (hr) Value: 72
  misc_feature: MA Experiment 20000480 PARAMETER Experiment Name: Zm_Drought_P Parameter: Tissue Value: Aerial
  misc_feature: MA Experiment 20000480 PARAMETER Experiment Name: Zm_Drought_P Parameter: Treatment Value: Drought vs. No Drought
  misc_feature: MA Experiment ID: 20000492 Result: Down-regulated in Transcription
  misc_feature: MA Experiment 20000492 PARAMETER Experiment Name: Zm_Hybrid_Seed_Dev_P Parameter: DAP Value: 12
  misc_feature: MA Experiment 20000492 PARAMETER Experiment Name: Zm_Hybrid_Seed_Dev_P Parameter: Organism Value: Zea mays
  misc_feature: MA Experiment 20000492 PARAMETER Experiment Name: Zm_Hybrid_Seed_Dev_P Parameter: Plant Line Value: 35A19
  misc_feature: MA Experiment 20000492 PARAMETER Experiment Name: Zm_Hybrid_Seed_Dev_P Parameter: Tissue Value: Fert Kernel vs. Unfert Floret
atccgaccagcgtttactcctaactagtttgccgatcgagcccgggcgacgtgagatacgagcggcgtcgaccggcgccggcgagcctccgcagccgcagccgcccgatctgggttttctttcgtagcggtagcggaagatgagccaggaccaggagaacggaggcaccaacgggcagcacgccgccgacgtgatggaggtggagccgaagcgccgggcgccgcggctgaacgagcgcatcctgtcgtcgctgtcgcggaggtccgtcgccgcgcacccctggcacgacctcgagatcggtcctgaagctccggccgtcttcaacgtcgtcgtggagatcaccaaggggagcaaggtgaagtacgagctggacaagaagacggggctcatcaaggtggaccggatcctctactcgtccgtcgtctaccctcacaactacggcttcgtgccccggacgctctgcgaggacaacgaccccatggacgtcctcgtgctcatgcaggaacccgtccttcccggcgccttcctccgcgccagggccatcggcctcatgcctatgatagatcagggagagaaggacgacaagatcatcgccgtctgcgccgacgaccccgagtaccgccactacaacgacatcagcgagctctcccctcaccgcctccaggagatccgccgcttctttgaagactacaagaagaacgagaacaaggaggtggccgtcaacgacttcctgcccgccgccgctgcccgcgaagccatccagtactccatggacctgtacggccagtacatcatgcagaccctgcggcggtagagcgttcctaccagatcccatgccagctgagctgacgcaagagcacagatcgacagaatccttgtggtctcgtctcatgcatggatagccaggtcacatggcttgtcgacgacgaccatgcatctcttcttcccagcgatatatattttagcctgtatcttcccttatttattatagtcttttgggtttggtggaatctgtccacagtgtggtttgatctatgtattcctcttctacatttctcccagaacgaatcgatgagattaataataatgttactacaaccctgttgttttgtcgaccg

SEQ ID NO: 10136 - protein, 224 aa, Zea mays subsp. mays
  peptide (1)..(224): Ceres Seq. ID no. 12406448
  misc_feature (62)..(216): Pfam Name: Inorganic pyrophosphatase Pfam Description: Inorganic pyrophosphatase
  misc_feature (22)..(224): Homolog of NCBI NO: 4033424 NR Description: Soluble inorganic pyrophosphatase (Pyrophosphate hydrolase) (PPase) >gi|7436036|pir||T01370 inorganic
  misc_feature (25)..(224): Homolog of NCBI NO: 38345829 NR Description: OSJNBa0070M12.12 [Oryza sativa (japonica
  misc_feature (20)..(224): Homolog of NCBI NO: 5669924 NR Description: soluble inorganic pyrophosphatase [Populus
  misc_feature (25)..(224): Homolog of NCBI NO: 15226453 NR Description: putative inorganic pyrophosphatase; protein id: [Arabidopsis thaliana] >gi|7436034|pir||T02201 probable inorganic
  misc_feature (24)..(224): Homolog of NCBI NO: 15223288 NR Description: soluble inorganic pyrophosphatase, putative; id: At1g01050.1, supported by cDNA: 124537., supported by cDNA: supported by cDNA: gi_16323128, supported by cDNA:
  misc_feature (20)..(224): Homolog of NCBI NO: 2500047 NR Description: Soluble inorganic pyrophosphatase (Pyrophosphate hydrolase) (PPase) >gi|7436030|pir||T07594 probable inorganic
  misc_feature (25)..(224): Homolog of NCBI NO: 26451240 NR Description: putative inorganic pyrophosphatase [Arabidopsis
  misc_feature (24)..(183): Homolog of NCBI NO: 25290346 NR Description: protein T25K16.5 [imported] - Arabidopsis >gi|6715648|gb|AAF26475.1|AC007323_16 T25K16.5 [Arabidopsis
  misc_feature (185)..(224): Homolog of NCBI NO: 25290346 NR Description: protein T25K16.5 [imported] - Arabidopsis >gi|6715648|gb|AAF26475.1|AC007323_16 T25K16.5 [Arabidopsis
  misc_feature (4)..(224): Homolog of NCBI NO: 40642617 NR Description: soluble pyrophosphatase [Beta vulgaris]
MSQDQENGGTNGQHAADVMEVEPKRRAPRLNERILSSLSRRSVAAHPWHDLEIGPEAPAVFNVVVEITKGSKVKYELDKKTGLIKVDRILYSSVVYPHNYGFVPRTLCEDNDPMDVLVLMQEPVLPGAFLRARAIGLMPMIDQGEKDDKIIAVCADDPEYRHYNDISELSPHRLQEIRRFFEDYKKNENKEVAVNDFLPAAAAREAIQYSMDLYGQYIMQTLRR

SEQ ID NO: 10137 - protein, 206 aa, Zea mays subsp. mays
  peptide (1)..(206): Ceres Seq. ID no. 12406449
  misc_feature (44)..(198): Pfam Name: Inorganic pyrophosphatase Pfam Description: Inorganic pyrophosphatase
  misc_feature (4)..(206): Homolog of NCBI NO: 4033424 NR Description: Soluble inorganic pyrophosphatase (Pyrophosphate hydrolase) (PPase) >gi|7436036|pir||T01370 inorganic
  misc_feature (7)..(206): Homolog of NCBI NO: 38345829 NR Description: OSJNBa0070M12.12 [Oryza sativa (japonica
  misc_feature (2)..(206): Homolog of NCBI NO: 5669924 NR Description: soluble inorganic pyrophosphatase [Populus
  misc_feature (7)..(206): Homolog of NCBI NO: 15226453 NR Description: putative inorganic pyrophosphatase; protein id: [Arabidopsis thaliana] >gi|7436034|pir||T02201 probable inorganic
  misc_feature (6)..(206): Homolog of NCBI NO: 15223288 NR Description: soluble inorganic pyrophosphatase, putative; id: At1g01050.1, supported by cDNA: 124537., supported by cDNA: supported by cDNA: gi_16323128, supported by cDNA:
  misc_feature (2)..(206): Homolog of NCBI NO: 2500047 NR Description: Soluble inorganic pyrophosphatase (Pyrophosphate hydrolase) (PPase) >gi|7436030|pir||T07594 probable inorganic
  misc_feature (7)..(206): Homolog of NCBI NO: 26451240 NR Description: putative inorganic pyrophosphatase [Arabidopsis
  misc_feature (6)..(165): Homolog of NCBI NO: 25290346 NR Description: protein T25K16.5 [imported] - Arabidopsis >gi|6715648|gb|AAF26475.1|AC007323_16 T25K16.5 [Arabidopsis
  misc_feature (167)..(206): Homolog of NCBI NO: 25290346 NR Description: protein T25K16.5 [imported] - Arabidopsis >gi|6715648|gb|AAF26475.1|AC007323_16 T25K16.5 [Arabidopsis
  misc_feature (1)..(206): Homolog of NCBI NO: 40642617 NR Description: soluble pyrophosphatase [Beta vulgaris]
MEVEPKRRAPRLNERILSSLSRRSVAAHPWHDLEIGPEAPAVFNVVVEITKGSKVKYELDKKTGLIKVDRILYSSVVYPHNYGFVPRTLCEDNDPMDVLVLMQEPVLPGAFLRARAIGLMPMIDQGEKDDKIIAVCADDPEYRHYNDISELSPHRLQEIRRFFEDYKKNENKEVAVNDFLPAAAAREAIQYSMDLYGQYIMQTLRR

SEQ ID NO: 10138 - DNA, 933 bp, Zea mays subsp. mays
  misc_feature (1)..(933): Ceres Seq. ID no. 12373437
  misc_feature: MA Experiment ID: 108523 Result: Down-regulated in Transcription
  misc_feature: MA Experiment 108523 PARAMETER Experiment Name: Zm_42deg_Heat_P Parameter: Age (day) Value: 8
  misc_feature: MA Experiment 108523 PARAMETER Experiment Name: Zm_42deg_Heat_P Parameter: Organism Value: Zea mays
  misc_feature: MA Experiment 108523 PARAMETER Experiment Name: Zm_42deg_Heat_P Parameter: Plant Line Value: 35A19
  misc_feature: MA Experiment 108523 PARAMETER Experiment Name: Zm_42deg_Heat_P Parameter: Temperature (deg C) Value: 42 vs. 22
  misc_feature: MA Experiment 108523 PARAMETER Experiment Name: Zm_42deg_Heat_P Parameter: Timepoint (hr) Value: 6
  misc_feature: MA Experiment 108523 PARAMETER Experiment Name: Zm_42deg_Heat_P Parameter: Tissue Value: Aerial
  misc_feature: MA Experiment ID: 108529 Result: Down-regulated in Transcription
  misc_feature: MA Experiment 108529 PARAMETER Experiment Name: Zm_Imbibed_Seeds_P Parameter: Age (day) Value: 5 vs. 2
  misc_feature: MA Experiment 108529 PARAMETER Experiment Name: Zm_Imbibed_Seeds_P Parameter: Organism Value: Zea mays
  misc_feature: MA Experiment 108529 PARAMETER Experiment Name: Zm_Imbibed_Seeds_P Parameter: Plant Line Value: 35A19
  misc_feature: MA Experiment 108529 PARAMETER Experiment Name: Zm_Imbibed_Seeds_P Parameter: Tissue Value: Roots vs. Embryo
  misc_feature: MA Experiment ID: 108543 Result: Up-regulated in Transcription
  misc_feature: MA Experiment ID: 108545 Result: Up-regulated in Transcription
  misc_feature: MA Experiment 108545 PARAMETER Experiment Name: Zm_Imbibed_Seeds_P Parameter: Age (day) Value: 3 vs. 2
  misc_feature: MA Experiment 108545 PARAMETER Experiment Name: Zm_Imbibed_Seeds_P Parameter: Organism Value: Zea mays
  misc_feature: MA Experiment 108545 PARAMETER Experiment Name: Zm_Imbibed_Seeds_P Parameter: Plant Line Value: 35A19
  misc_feature: MA Experiment 108545 PARAMETER Experiment Name: Zm_Imbibed_Seeds_P Parameter: Tissue Value: Aerial vs. Embryo
  misc_feature: MA Experiment ID: 20000477 Result: Down-regulated in Transcription
  misc_feature: MA Experiment 20000477 PARAMETER Experiment Name: Zm_5mM_SA_P Parameter: Age (day) Value: 10
  misc_feature: MA Experiment 20000477 PARAMETER Experiment Name: Zm_5mM_SA_P Parameter: Organism Value: Zea mays
  misc_feature: MA Experiment 20000477 PARAMETER Experiment Name: Zm_5mM_SA_P Parameter: Plant Line Value: 35A19
  misc_feature: MA Experiment 20000477 PARAMETER Experiment Name: Zm_5mM_SA_P Parameter: Timepoint (hr) Value: 48
  misc_feature: MA Experiment 20000477 PARAMETER Experiment Name: Zm_5mM_SA_P Parameter: Tissue Value: Aerial
  misc_feature: MA Experiment 20000477 PARAMETER Experiment Name: Zm_5mM_SA_P Parameter: Treatment Value: 5mM SA vs. No Treatment
  misc_feature: MA Experiment ID: 20000478 Result: Down-regulated in Transcription
  misc_feature: MA Experiment 20000478 PARAMETER Experiment Name: Zm_5mM_SA_P Parameter: Age (day) Value: 11
  misc_feature: MA Experiment 20000478 PARAMETER Experiment Name: Zm_5mM_SA_P Parameter: Organism Value: Zea mays
  misc_feature: MA Experiment 20000478 PARAMETER Experiment Name: Zm_5mM_SA_P Parameter: Plant Line Value: 35A19
  misc_feature: MA Experiment 20000478 PARAMETER Experiment Name: Zm_5mM_SA_P Parameter: Timepoint (hr) Value: 72
  misc_feature: MA Experiment 20000478 PARAMETER Experiment Name: Zm_5mM_SA_P Parameter: Tissue Value: Aerial
  misc_feature: MA Experiment 20000478 PARAMETER Experiment Name: Zm_5mM_SA_P Parameter: Treatment Value: 5mM SA vs. No Treatment
  misc_feature: MA Experiment ID: 20000479 Result: Down-regulated in Transcription
  misc_feature: MA Experiment 20000479 PARAMETER Experiment Name: Zm_Drought_P Parameter: Age (day) Value: 10
  misc_feature: MA Experiment 20000479 PARAMETER Experiment Name: Zm_Drought_P Parameter: Organism Value: Zea mays
  misc_feature: MA Experiment 20000479 PARAMETER Experiment Name: Zm_Drought_P Parameter: Plant Line Value: 35A19
  misc_feature: MA Experiment 20000479 PARAMETER Experiment Name: Zm_Drought_P Parameter: Timepoint (hr) Value: 48
  misc_feature: MA Experiment 20000479 PARAMETER Experiment Name: Zm_Drought_P Parameter: Tissue Value: Aerial
  misc_feature: MA Experiment 20000479 PARAMETER Experiment Name: Zm_Drought_P Parameter: Treatment Value: Drought vs. No Drought
atcactcaccaagactccaagcactcacctcctcagctcattgccagccttttggttccttccagctagcaaccggacggccagccagccagcagactagtagtagctcttctcacacctactgtgtctgtgtctgtgtgtgctcgcctttagcggcaagcgacccacccccccttcggtagcgagcgacaatgcagtacgcggcggcggagcaggcgtggtacatgccggcgaccacgacgatgatggcggagagcgcggtggcgcgcgtggagcggctggcgtcggagagcgcggtggtggtgttcagcgtgagcagctgctgcatgtgccacgccgtgaagcggctcttctgcggcatgggcgtgcacccgacggtgcacgagctggacctggacccgcgcggacgagagctggagcacgccctcgcccgcctcatcggctacggccccgccggcgcgcccgtcgtccccgtcgtcttcatcggcgggaagctggtcggcgccatggaccgggtcatggccgcgcatatcaacggctccctcgtcccacttctcaaggaggccggcgcgctctggctctgaactgtaggcaggccggccggcaggccgcgcgccattgctggtgactcgtgtgccaacaggctacgcagcttcttccgttgtctaagttagttccttgttgctgtagaacctgatgtcacttgctgcaagctaatcaaactacgtactaagctacggtgataggaggatacatccatggacagggccggatggtggtagatcagtgatgcatcggattgggcttaatatgtgtgtgcgtgcatgtggtgtttgacgcatgcgctggatttgctttgcttggggtgctacactgttaccaccactgttgtttaatttgatatcctttaattttaataccttggttcctctc

SEQ ID NO: 10139 - protein, 130 aa, Zea mays subsp. mays
  peptide (1)..(130): Ceres Seq. ID no. 12373438
  misc_feature (35)..(122): Pfam Name: Glutaredoxin Pfam Description: Glutaredoxin
  misc_feature (1)..(130): Homolog of NCBI NO: 21740746 NR Description: OSJNBa0072K14.11 [Oryza sativa (japonica
  misc_feature (18)..(130): Homolog of NCBI NO: 15232836 NR Description: putative glutaredoxin; protein id: At3g02000.1 thaliana] >gi|6091738|gb|AAF03450.1|AC010797_26 putative [Arabidopsis thaliana] >gi|6513931|gb|AAF14835.1|AC011664_17
  misc_feature (24)..(130): Homolog of NCBI NO: 15241297 NR Description: glutaredoxin-like protein; protein id: supported by cDNA: 123496., supported by cDNA: gi_13605642,
  misc_feature (30)..(128): Homolog of NCBI NO: 1532163 NR Description: similar to glutaredoxin encoded by GenBank Number Z49699; localized according to blastn similarity to EST therefore, the coding span corresponds only to an area of
  misc_feature (30)..(130): Homolog of NCBI NO: 21537203 NR Description: glutaredoxin-like protein [Arabidopsis thaliana]
  misc_feature (26)..(130): Homolog of NCBI NO: 34914726 NR Description: P0560B06.28 [Oryza sativa (japonica >gi|14091834|gb|AAK53837.1| Putative glutaredoxin [Oryza sativa]
  misc_feature (1)..(130): Homolog of NCBI NO: 33146704 NR Description: glutaredoxin-like protein [Oryza sativa (japonica
  misc_feature (26)..(130): Homolog of NCBI NO: 34907208 NR Description: putative glutaredoxin [Oryza sativa (japonica group)] >gi|15408806|dbj|BAB64202.1| putative glutaredoxin [Oryza
  misc_feature (27)..(130): Homolog of NCBI NO: 15234680 NR Description: glutaredoxin homolog; protein id: At4g15700.1
  misc_feature (26)..(130): Homolog of NCBI NO: 15234671 NR Description: glutaredoxin; protein id: At4g15660.1
MQYAAAEQAWYMPATTTMMAESAVARVERLASESAVVVFSVSSCCMCHAVKRLFCGMGVHPTVHELDLDPRGRELEHALARLIGYGPAGAPVVPVVFIGGKLVGAMDRVMAAHINGSLVPLLKEAGALWL

SEQ ID NO: 10140 - protein, 119 aa, Zea mays subsp. mays
  peptide (1)..(119): Ceres Seq. ID no. 12373439
  misc_feature (24)..(111): Pfam Name: Glutaredoxin Pfam Description: Glutaredoxin
  misc_feature (19)..(119): Homolog of NCBI NO: 21537203 NR Description: glutaredoxin-like protein [Arabidopsis thaliana]
  misc_feature (15)..(119): Homolog of NCBI NO: 34914726 NR Description: P0560B06.28 [Oryza sativa (japonica >gi|14091834|gb|AAK53837.1| Putative glutaredoxin [Oryza sativa]
  misc_feature (1)..(119): Homolog of NCBI NO: 33146704 NR Description: glutaredoxin-like protein [Oryza sativa (japonica
  misc_feature (1)..(119): Homolog of NCBI NO: 21740746 NR Description: OSJNBa0072K14.11 [Oryza sativa (japonica
  misc_feature (13)..(119): Homolog of NCBI NO: 15241297 NR Description: glutaredoxin-like protein; protein id: supported by cDNA: 123496., supported by cDNA: gi_13605642,
  misc_feature (19)..(117): Homolog of NCBI NO: 1532163 NR Description: similar to glutaredoxin encoded by GenBank Number Z49699; localized according to blastn similarity to EST therefore, the coding span corresponds only to an area of
  misc_feature (7)..(119): Homolog of NCBI NO: 15232836 NR Description: putative glutaredoxin; protein id: At3g02000.1 thaliana] >gi|6091738|gb|AAF03450.1|AC010797_26 putative [Arabidopsis thaliana] >gi|6513931|gb|AAF14835.1|AC011664_17
  misc_feature (15)..(119): Homolog of NCBI NO: 34907208 NR Description: putative glutaredoxin [Oryza sativa (japonica group)] >gi|15408806|dbj|BAB64202.1| putative glutaredoxin [Oryza
  misc_feature (16)..(119): Homolog of NCBI NO: 15234680 NR Description: glutaredoxin homolog; protein id: At4g15700.1
  misc_feature (15)..(119): Homolog of NCBI NO: 15234671 NR Description: glutaredoxin; protein id: At4g15660.1
MPATTTMMAESAVARVERLASESAVVVFSVSSCCMCHAVKRLFCGMGVHPTVHELDLDPRGRELEHALARLIGYGPAGAPVVPVVFIGGKLVGAMDRVMAAHINGSLVPLLKEAGALWL

SEQ ID NO: 10141 - protein, 113 aa, Zea mays subsp. mays
  peptide (1)..(113): Ceres Seq. ID no. 12373440
  misc_feature (18)..(105): Pfam Name: Glutaredoxin Pfam Description: Glutaredoxin
  misc_feature (1)..(113): Homolog of NCBI NO: 21740746 NR Description: OSJNBa0072K14.11 [Oryza sativa (japonica
  misc_feature (1)..(113): Homolog of NCBI NO: 15232836 NR Description: putative glutaredoxin; protein id: At3g02000.1 thaliana] >gi|6091738|gb|AAF03450.1|AC010797_26 putative [Arabidopsis thaliana] >gi|6513931|gb|AAF14835.1|AC011664_17
  misc_feature (7)..(113): Homolog of NCBI NO: 15241297 NR Description: glutaredoxin-like protein; protein id: supported by cDNA: 123496., supported by cDNA: gi_13605642,
  misc_feature (13)..(111): Homolog of NCBI NO: 1532163 NR Description: similar to glutaredoxin encoded by GenBank Number Z49699; localized according to blastn similarity to EST therefore, the coding span corresponds only to an area of
  misc_feature (13)..(113): Homolog of NCBI NO: 21537203 NR Description: glutaredoxin-like protein [Arabidopsis thaliana]
  misc_feature (9)..(113): Homolog of NCBI NO: 34914726 NR Description: P0560B06.28 [Oryza sativa (japonica >gi|14091834|gb|AAK53837.1| Putative glutaredoxin [Oryza sativa]
  misc_feature (1)..(113): Homolog of NCBI NO: 33146704 NR Description: glutaredoxin-like protein [Oryza sativa (japonica
  misc_feature (9)..(113): Homolog of NCBI NO: 34907208 NR Description: putative glutaredoxin [Oryza sativa (japonica group)] >gi|15408806|dbj|BAB64202.1| putative glutaredoxin [Oryza
  misc_feature (10)..(113): Homolog of NCBI NO: 15234680 NR Description: glutaredoxin homolog; protein id: At4g15700.1
  misc_feature (9)..(113): Homolog of NCBI NO: 15234671 NR Description: glutaredoxin; protein id: At4g15660.1
MMAESAVARVERLASESAVVVFSVSSCCMCHAVKRLFCGMGVHPTVHELDLDPRGRELEHALARLIGYGPAGAPVVPVVFIGGKLVGAMDRVMAAHINGSLVPLLKEAGALWL

SEQ ID NO: 10142 - DNA, 1764 bp, Zea mays subsp. mays
  misc_feature (1)..(1764): Ceres Seq. ID no. 12350277
  misc_feature: MA Experiment ID: 108535 Result: Down-regulated in Transcription
  misc_feature: MA Experiment 108535 PARAMETER Experiment Name: Zm_Meristem_P Parameter: Age (day) Value: 8
  misc_feature: MA Experiment 108535 PARAMETER Experiment Name: Zm_Meristem_P Parameter: Organism Value: Zea mays
  misc_feature: MA Experiment 108535 PARAMETER Experiment Name: Zm_Meristem_P Parameter: Plant Line Value: 35A19
  misc_feature: MA Experiment 108535 PARAMETER Experiment Name: Zm_Meristem_P Parameter: Tissue Value: Root Meristem vs. Above Root Meristem
agtctctttaaaaggccctcgagaaaaatctccgcgtcaccaccaagcacgtccccgttccattacaacaaaagatcgtgctagtaagcaatacgctcaatttgagtttgaggtcgatttctggagcattcgagttcttttccagtaaacttttcaggtttaagcgcggattgatggcagagctgctgtagatttggagcattttggggttggttttttgcgatttgaggatcgaatcgggctggtacaaccgcgctcacgtgcatatataaggcgaattggcggtttgttggctacaattgttcggttcttatcttgaagggtggtgcgaattggaggattcttcccgaatcgagaaggtgtaggccaaattcgcaaggaagctgcagctatccgcgtgagaaggctgcctctcacaaattctcggtcggtgccatcccggcggtggactgcttttgggcttcttcgaaggttcgtatcttttggctcaggagaaagtggttctgaaggcctcgggcttctcatccccaattcgatccgttcccgagacggtgattgggtcatagatggggacggggtcgagcatcctgggcgcggatggagagtggggggagacgtccctcggcgacatgccggagagctgcgtggcggcggtactcctctacctcgacccgccggagatctgccaggtggcccgtctcaacagcgccttccgcggcgccgcctcggcggactgcgtctgggccgccaagcttcccgccaactaccgttaccttgcggccctagccgcggccgccgatgacgagggctgtggcgatggagatgccagcggcaagcgcttgaccaagaaggagatttacgctcgtctgtgccgatccactttctttgatgccggcagaaagtaattctggattctgaagaacaagggagccctttgcatgagtatatcatcaaaggcaatgactattaccgggatagatgatcggaggtactggagccacctcgctacagaggaatcaagattccatactgttgcctatctccagcagatttggtggctcgaggtagatggggagcttgagttctgctttcctgctggtgcctacagcctttttttcatcttcacctgggtcgaccctataggcgcatgggtcgttggctttgtggaactgagcatgttcatggttgggatgtcacgcccacacggttccagctcacgacctctgatgagcagcaggcgacatccgaatattatctgcatctacatgaacaagggggctggaagctttaccatgttggtgattttgtcatatcaaattccgatgagcccatgaaactcaagttctcaatgatgcagatcgattgcacacatatgaaaggcggcttgtgcgttgactccgtgtttatatatcctaaagggtacaagcctgagaaggcgaacatagtctgcacctagttcggcaaagttggccttgtacctctcctgcatgatgaaacaagaggcaattcaaatgtggatggctagcctttttcctggcgatccttacctgaaagcccattgtacattctttttgttttttcccttcattctggtagttttgcatgaatgtaaggtctttcttgtttttttttgggtagtgttagttaaacaggtggagaatagggaatttagaaacaggtcaagtgaagtaagtcttgagtcattgaggcggtagattgccatacagcaataataatgttcggcgagctggattgatttttttg

SEQ ID NO: 10143 - protein, 131 aa, Zea mays subsp. mays
  peptide (1)..(131): Ceres Seq. ID no. 12350278
  misc_feature (1)..(60): Homolog of NCBI NO: 38567911 NR Description: OSJNBa0088I22.7 [Oryza sativa (japonica
  misc_feature (1)..(60): Homolog of NCBI NO: 37536186 NR Description: unknown protein [Oryza sativa (japonica
  misc_feature (1)..(60): Homolog of NCBI NO: 30695337 NR Description: F-box protein (lectin-related) [Arabidopsis
  misc_feature (1)..(60): Homolog of NCBI NO: 23397334 NR Description: unknown protein [Arabidopsis thaliana]
  misc_feature (1)..(68): Homolog of NCBI NO: 15242282 NR Description: putative protein; protein id: At5g52120.1, by cDNA: gi_18175687, supported by cDNA: gi_20465820 [Arabidopsis >gi|18175688|gb|AAL59911.1| unknown protein [Arabidopsis
  misc_feature (1)..(60): Homolog of NCBI NO: 15222051 NR Description: hypothetical protein; protein id: At1g12710.1 thaliana] >gi|9502385|gb|AAF88092.1|AC025417_20 T12C24.23 thaliana] >gi|26450401|dbj|BAC42315.1| unknown protein
  misc_feature (1)..(60): Homolog of NCBI NO: 15231726 NR Description: putative protein; protein id: At3g53000.1
  misc_feature (1)..(60): Homolog of NCBI NO: 15221677 NR Description: unknown protein; protein id: At1g63090.1
  misc_feature (1)..(60): Homolog of NCBI NO: 27754673 NR Description: unknown protein [Arabidopsis thaliana]
  misc_feature (1)..(62): Homolog of NCBI NO: 28812128 NR Description: P0443G08.20 [Oryza sativa (japonica
MSISSKAMTITGIDDRRYWSHLATEESRFHTVAYLQQIWWLEVDGELEFCFPAGAYSLFFIFTWVDPIGAWVVGFVELSMFMVGMSRPHGSSSRPLMSSRRHPNIICIYMNKGAGSFTMLVILSYQIPMSP

SEQ ID NO: 10144 - protein, 124 aa, Zea mays subsp. mays
  peptide (1)..(124): Ceres Seq. ID no. 12350279
  misc_feature (1)..(53): Homolog of NCBI NO: 38567911 NR Description: OSJNBa0088I22.7 [Oryza sativa (japonica
  misc_feature (1)..(53): Homolog of NCBI NO: 37536186 NR Description: unknown protein [Oryza sativa (japonica
  misc_feature (1)..(53): Homolog of NCBI NO: 30695337 NR Description: F-box protein (lectin-related) [Arabidopsis
  misc_feature (1)..(53): Homolog of NCBI NO: 23397334 NR Description: unknown protein [Arabidopsis thaliana]
  misc_feature (1)..(61): Homolog of NCBI NO: 15242282 NR Description: putative protein; protein id: At5g52120.1, by cDNA: gi_18175687, supported by cDNA: gi_20465820 [Arabidopsis >gi|18175688|gb|AAL59911.1| unknown protein [Arabidopsis
  misc_feature (1)..(53): Homolog of NCBI NO: 15222051 NR Description: hypothetical protein; protein id: At1g12710.1 thaliana] >gi|9502385|gb|AAF88092.1|AC025417_20 T12C24.23 thaliana] >gi|26450401|dbj|BAC42315.1| unknown protein
  misc_feature (1)..(53): Homolog of NCBI NO: 15231726 NR Description: putative protein; protein id: At3g53000.1
  misc_feature (1)..(53): Homolog of NCBI NO: 15221677 NR Description: unknown protein; protein id: At1g63090.1
  misc_feature (1)..(53): Homolog of NCBI NO: 27754673 NR Description: unknown protein [Arabidopsis thaliana]
  misc_feature (1)..(55): Homolog of NCBI NO: 28812128 NR Description: P0443G08.20 [Oryza sativa (japonica
MTITGIDDRRYWSHLATEESRFHTVAYLQQIWWLEVDGELEFCFPAGAYSLFFIFTWVDPIGAWVVGFVELSMFMVGMSRPHGSSSRPLMSSRRHPNIICIYMNKGAGSFTMLVILSYQIPMSP

SEQ ID NO: 10145 - protein, 112 aa, Zea mays subsp. mays
  peptide (1)..(112): Ceres Seq. ID no. 12350280
  misc_feature (22)..(112): Homolog of NCBI NO: 38567911 NR Description: OSJNBa0088I22.7 [Oryza sativa (japonica
  misc_feature (1)..(112): Homolog of NCBI NO: 37536186 NR Description: unknown protein [Oryza sativa (japonica
  misc_feature (19)..(112): Homolog of NCBI NO: 30695337 NR Description: F-box protein (lectin-related) [Arabidopsis
  misc_feature (19)..(112): Homolog of NCBI NO: 23397334 NR Description: unknown protein [Arabidopsis thaliana]
  misc_feature (1)..(112): Homolog of NCBI NO: 15242282 NR Description: putative protein; protein id: At5g52120.1, by cDNA: gi_18175687, supported by cDNA: gi_20465820 [Arabidopsis >gi|18175688|gb|AAL59911.1| unknown protein [Arabidopsis
  misc_feature (3)..(112): Homolog of NCBI NO: 15222051 NR Description: hypothetical protein; protein id: At1g12710.1 thaliana] >gi|9502385|gb|AAF88092.1|AC025417_20 T12C24.23 thaliana] >gi|26450401|dbj|BAC42315.1| unknown protein
  misc_feature (1)..(112): Homolog of NCBI NO: 15231726 NR Description: putative protein; protein id: At3g53000.1
  misc_feature (5)..(112): Homolog of NCBI NO: 15221677 NR Description: unknown protein; protein id: At1g63090.1
  misc_feature (1)..(112): Homolog of NCBI NO: 28812128 NR Description: P0443G08.20 [Oryza sativa (japonica
  misc_feature (21)..(112): Homolog of NCBI NO: 15238574 NR Description: phloem-specific lectin-like protein; protein id:
MGTGSSILGADGEWGETSLGDMPESCVAAVLLYLDPPEICQVARLNSAFRGAASADCVWAAKLPANYRYLAALAAAADDEGCGDGDASGKRLTKKEIYARLCRSTFFDAGRK

SEQ ID NO: 10146 - DNA, 1280 bp, Zea mays subsp. mays
  misc_feature (1)..(1280): Ceres Seq. ID no. 12354459
  misc_feature: MA Experiment ID: 108522 Result: Down-regulated in Transcription
  misc_feature: MA Experiment 108522 PARAMETER Experiment Name: Zm_42deg_Heat_P Parameter: Age (day) Value: 8
  misc_feature: MA Experiment 108522 PARAMETER Experiment Name: Zm_42deg_Heat_P Parameter: Organism Value: Zea mays
  misc_feature: MA Experiment 108522 PARAMETER Experiment Name: Zm_42deg_Heat_P Parameter: Plant Line Value: 35A19
  misc_feature: MA Experiment 108522 PARAMETER Experiment Name: Zm_42deg_Heat_P Parameter: Temperature (deg C) Value: 42 vs. 22
  misc_feature: MA Experiment 108522 PARAMETER Experiment Name: Zm_42deg_Heat_P Parameter: Timepoint (hr) Value: 1
  misc_feature: MA Experiment 108522 PARAMETER Experiment Name: Zm_42deg_Heat_P Parameter: Tissue Value: Aerial
  misc_feature: MA Experiment ID: 108530 Result: Down-regulated in Transcription
  misc_feature: MA Experiment 108530 PARAMETER Experiment Name: Zm_Imbibed_Seeds_P Parameter: Age (day) Value: 6 vs. 2
  misc_feature: MA Experiment 108530 PARAMETER Experiment Name: Zm_Imbibed_Seeds_P Parameter: Organism Value: Zea mays
  misc_feature: MA Experiment 108530 PARAMETER Experiment Name: Zm_Imbibed_Seeds_P Parameter: Plant Line Value: 35A19
  misc_feature: MA Experiment 108530 PARAMETER Experiment Name: Zm_Imbibed_Seeds_P Parameter: Tissue Value: Aerial vs. Embryo
  misc_feature: MA Experiment ID: 108533 Result: Down-regulated in Transcription
  misc_feature: MA Experiment 108533 PARAMETER Experiment Name: Zm_4deg_Cold_P Parameter: Age (hr) Value: 8
  misc_feature: MA Experiment 108533 PARAMETER Experiment Name: Zm_4deg_Cold_P Parameter: Organism Value: Zea mays
  misc_feature: MA Experiment 108533 PARAMETER Experiment Name: Zm_4deg_Cold_P Parameter: Plant Line Value: 35A19
  misc_feature: MA Experiment 108533 PARAMETER Experiment Name: Zm_4deg_Cold_P Parameter: Temperature (deg C) Value: 4 vs. 22
  misc_feature: MA Experiment 108533 PARAMETER Experiment Name: Zm_4deg_Cold_P Parameter: Timepoint (hr) Value: 1
  misc_feature: MA Experiment 108533 PARAMETER Experiment Name: Zm_4deg_Cold_P Parameter: Tissue Value: Aerial
  misc_feature: MA Experiment ID: 108534 Result: Down-regulated in Transcription
  misc_feature: MA Experiment 108534 PARAMETER Experiment Name: Zm_4deg_Cold_P Parameter: Age (hr) Value: 8
  misc_feature: MA Experiment 108534 PARAMETER Experiment Name: Zm_4deg_Cold_P Parameter: Organism Value: Zea mays
  misc_feature: MA Experiment 108534 PARAMETER Experiment Name: Zm_4deg_Cold_P Parameter: Plant Line Value: 35A19
  misc_feature: MA Experiment 108534 PARAMETER Experiment Name: Zm_4deg_Cold_P Parameter: Temperature (deg C) Value: 4 vs. 22
  misc_feature: MA Experiment 108534 PARAMETER Experiment Name: Zm_4deg_Cold_P Parameter: Timepoint (hr) Value: 6
  misc_feature: MA Experiment 108534 PARAMETER Experiment Name: Zm_4deg_Cold_P Parameter: Tissue Value: Aerial
  misc_feature: MA Experiment ID: 108545 Result: Down-regulated in Transcription
  misc_feature: MA Experiment 108545 PARAMETER Experiment Name: Zm_Imbibed_Seeds_P Parameter: Age (day) Value: 3 vs. 2
  misc_feature: MA Experiment 108545 PARAMETER Experiment Name: Zm_Imbibed_Seeds_P Parameter: Organism Value: Zea mays
  misc_feature: MA Experiment 108545 PARAMETER Experiment Name: Zm_Imbibed_Seeds_P Parameter: Plant Line Value: 35A19
  misc_feature: MA Experiment 108545 PARAMETER Experiment Name: Zm_Imbibed_Seeds_P Parameter: Tissue Value: Aerial vs. Embryo
  misc_feature: MA Experiment ID: 108687 Result: Down-regulated in Transcription
  misc_feature: MA Experiment 108687 PARAMETER Experiment Name: Zm_Embryos-Flowers__P Parameter: Tissue Value: Embryo vs. Aerial+
  misc_feature: MA Experiment ID: 20000535 Result: Down-regulated in Transcription
  misc_feature: MA Experiment 20000535 PARAMETER Experiment Name: Zm_Hybrid_Seed_Dev_P Parameter: DAP Value: 30 vs. 12
  misc_feature: MA Experiment 20000535 PARAMETER Experiment Name: Zm_Hybrid_Seed_Dev_P Parameter: Organism Value: Zea mays
  misc_feature: MA Experiment 20000535 PARAMETER Experiment Name: Zm_Hybrid_Seed_Dev_P Parameter: Plant Line Value: 35A19
  misc_feature: MA Experiment 20000535 PARAMETER Experiment Name: Zm_Hybrid_Seed_Dev_P Parameter: Tissue Value: Embryo vs. Unfert Floret
  misc_feature: MA Experiment ID: 20000626 Result: Up-regulated in Transcription
  misc_feature: MA Experiment 20000626 PARAMETER Experiment Name: Zm_Herbicide-Treatments_P Parameter: Timepoint (hr) Value: 12
  misc_feature: MA Experiment 20000626 PARAMETER Experiment Name: Zm_Herbicide-Treatments_P Parameter: Tissue Value: Aerial
  misc_feature: MA Experiment 20000626 PARAMETER Experiment Name: Zm_Herbicide-Treatments_P Parameter: Treatment Value: Roundup vs. No Treatment
gacgagcaagcaagcagttgcagttgcagcggcctcctcctctgcttcctccctcctcctcctcaccatggtgctggctgcgcacgatccccctccccttgtgttcgacgctgcccgcctgagcggcctctccgacatcccgcagcagttcatctggccggcggacgagagccccaccccggactccgccgaggagctggccgtgccgctcatcgacctctccggggacgccgccgaggtggtccggcaggtccggcgcgcctgcgacctgcacggcttcttccaggtggtggggcacggcatcgacgcggcgctgacggcggaggcccaccgctgcatggacgccttcttcacgctgccgctcccggacaagcagcgcgcgcagcgccgccagggggacagctgcggctacgccagcagcttcacgggccggttcgcgtccaagctgccctggaaggagacgctgtcgttccgctacaccgacgacgacgacggcgacaagtccaaggacgtcgtggcgtcctacttcgtggacaagctgggcgaggggtaccggcaccacggggaggtgtacgggcgctactgctctgagatgagccgtctgtcgctggagctcatggaggtgctaggcgagagcctgggcgtgggccggcgccacttccggcgcttcttccaggggaacgactccatcatgcgcctcaactactacccgccgtgccagcggccctacgacacgctgggcacggggccgcattgcgaccccacgtcgctcaccatcctgcaccaggacgacgtgggcggactccaggtgttcgacgccgccacgctcgcgtggcgctccatcaggcccccgcccgggcgccttcgtcgtcaacatcggcgacaccttcatggcgctctccaacgggcgctacaggagctgcctccaccgcgccgtcgtcaacagccgggtggcacgccgctcgctcgccttcttcctgtgcccggagatggacaaggtggtcaggccgcccaaggagctggtggacgacgccaacccgagggcgtacccggacttcacgtggaggacgctgctggacttcaccatgaggcactacaggtcggacatgaggacgctcgaggccttctccaactggctcagcaccagtagcaatggcggacagcacctgctggagaagaagtaggcatgctatttgggtatggaagatggtggatgtaagcaaacaaagccaaattaagcagagtaggttaattaaggttggctgatgatccatttaggg

SEQ ID NO: 10147 - protein, 382 aa, Zea mays subsp. mays
  peptide (1)..(382): Ceres Seq. ID no. 12354460
  misc_feature (227)..(288): Pfam Name: 2OG-Fe(II) oxygenase superfamily Pfam Description: 2OG-Fe(II) oxygenase superfamily
  misc_feature (34)..(283): Homolog of NCBI NO: 7433220 NR Description: gibberellin 20-dioxygenase (EC 1.14.11.-) (clone
  misc_feature (34)..(283): Homolog of NCBI NO: 7433219 NR Description: gibberellin 20-dioxygenase (EC 1.14.11.-) (clone
  misc_feature (34)..(283): Homolog of NCBI NO: 7433218 NR Description: gibberellin 20-dioxygenase (EC 1.14.11.-)
  misc_feature (34)..(283): Homolog of NCBI NO: 13625521 NR Description: gibberellin 20-oxidase [Lolium perenne]
  misc_feature (34)..(283): Homolog of NCBI NO: 13625523 NR Description: gibberellin 20-oxidase [Lolium perenne]
  misc_feature (34)..(283): Homolog of NCBI NO: 13625519 NR Description: gibberellin 20-oxidase [Lolium perenne]
  misc_feature (34)..(283): Homolog of NCBI NO: 13625525 NR Description: gibberellin 20-oxidase [Lolium perenne]
  misc_feature (33)..(288): Homolog of NCBI NO: 30102973 NR Description: putative gibberelin 20-oxidase [Oryza sativa
  misc_feature (23)..(288): Homolog of NCBI NO: 7433224 NR Description: probable gibberellin C-20 oxidase (EC 1.14.11.-)
  misc_feature (29)..(283): Homolog of NCBI NO: 30519873 NR Description: gibberellin 20-oxidase [Nicotiana tabacum]
TSKQAVAVAAASSSASSLLLLTMVLAAHDPPPLVFDAARLSGLSDIPQQFIWPADESPTPDSAEELAVPLIDLSGDAAEVVRQVRRACDLHGFFQVVGHGIDAALTAEAHRCMDAFFTLPLPDKQRAQRRQGDSCGYASSFTGRFASKLPWKETLSFRYTDDDDGDKSKDVVASYFVDKLGEGYRHHGEVYGRYCSEMSRLSLELMEVLGESLGVGRRHFRRFFQGNDSIMRLNYYPPCQRPYDTLGTGPHCDPTSLTILHQDDVGGLQVFDAATLAWRSIRPPPGRLRRQHRRHLHGALQRALQELPPPRRRQQPGGTPLARLLPVPGDGQGGQAAQGAGGRRQPEGVPGLHVEDAAGLHHEALQVGHEDARGLLQLAQHQ

SEQ ID NO: 10148 - protein, 360 aa, Zea mays subsp. mays
  peptide (1)..(360): Ceres Seq. ID no. 12354461
  misc_feature (205)..(266): Pfam Name: 2OG-Fe(II) oxygenase superfamily Pfam Description: 2OG-Fe(II) oxygenase superfamily
  misc_feature (12)..(261): Homolog of NCBI NO: 7433220 NR Description: gibberellin 20-dioxygenase (EC 1.14.11.-) (clone
  misc_feature (12)..(261): Homolog of NCBI NO: 7433219 NR Description: gibberellin 20-dioxygenase (EC 1.14.11.-) (clone
  misc_feature (12)..(261): Homolog of NCBI NO: 7433218 NR Description: gibberellin 20-dioxygenase (EC 1.14.11.-)
  misc_feature (12)..(261): Homolog of NCBI NO: 13625521 NR Description: gibberellin 20-oxidase [Lolium perenne]
  misc_feature (12)..(261): Homolog of NCBI NO: 13625523 NR Description: gibberellin 20-oxidase [Lolium perenne]
  misc_feature (12)..(261): Homolog of NCBI NO: 13625519 NR Description: gibberellin 20-oxidase [Lolium perenne]
  misc_feature (12)..(261): Homolog of NCBI NO: 13625525 NR Description: gibberellin 20-oxidase [Lolium perenne]
  misc_feature (11)..(266): Homolog of NCBI NO: 30102973 NR Description: putative gibberelin 20-oxidase [Oryza sativa
  misc_feature (1)..(266): Homolog of NCBI NO: 7433224 NR Description: probable gibberellin C-20 oxidase (EC 1.14.11.-)
  misc_feature (7)..(261): Homolog of NCBI NO: 30519873 NR Description: gibberellin 20-oxidase [Nicotiana tabacum]
MVLAAHDPPPLVFDAARLSGLSDIPQQFIWPADESPTPDSAEELAVPLIDLSGDAAEVVRQVRRACDLHGFFQVVGHGIDAALTAEAHRCMDAFFTLPLPDKQRAQRRQGDSCGYASSFTGRFASKLPWKETLSFRYTDDDDGDKSKDVVASYFVDKLGEGYRHHGEVYGRYCSEMSRLSLELMEVLGESLGVGRRHFRRFFQGNDSIMRLNYYPPCQRPYDTLGTGPHCDPTSLTILHQDDVGGLQVFDAATLAWRSIRPPPGRLRRQHRRHLHGALQRALQELPPPRRRQQPGGTPLARLLPVPGDGQGGQAAQGAGGRRQPEGVPGLHVEDAAGLHHEALQVGHEDARGLLQLAQHQ

SEQ ID NO: 10149 - protein, 270 aa, Zea mays subsp. mays
  peptide (1)..(270): Ceres Seq. ID no. 12354462
  misc_feature (115)..(176): Pfam Name: 2OG-Fe(II) oxygenase superfamily Pfam Description: 2OG-Fe(II) oxygenase superfamily
  misc_feature (1)..(171): Homolog of NCBI NO: 7433220 NR Description: gibberellin 20-dioxygenase (EC 1.14.11.-) (clone
  misc_feature (1)..(171): Homolog of NCBI NO: 7433219 NR Description: gibberellin 20-dioxygenase (EC 1.14.11.-) (clone
  misc_feature (1)..(171): Homolog of NCBI NO: 7433218 NR Description: gibberellin 20-dioxygenase (EC 1.14.11.-)
  misc_feature (1)..(171): Homolog of NCBI NO: 13625521 NR Description: gibberellin 20-oxidase [Lolium perenne]
  misc_feature (1)..(171): Homolog of NCBI NO: 13625523 NR Description: gibberellin 20-oxidase [Lolium perenne]
  misc_feature (1)..(171): Homolog of NCBI NO: 13625519 NR Description: gibberellin 20-oxidase [Lolium perenne]
  misc_feature (1)..(171): Homolog of NCBI NO: 13625525 NR Description: gibberellin 20-oxidase [Lolium perenne]
  misc_feature (1)..(176): Homolog of NCBI NO: 30102973 NR Description: putative gibberelin 20-oxidase [Oryza sativa
  misc_feature (1)..(176): Homolog of NCBI NO: 7433224 NR Description: probable gibberellin C-20 oxidase (EC 1.14.11.-)
  misc_feature (1)..(171): Homolog of NCBI NO: 30519873 NR Description: gibberellin 20-oxidase [Nicotiana tabacum]
MDAFFTLPLPDKQRAQRRQGDSCGYASSFTGRFASKLPWKETLSFRYTDDDDGDKSKDVVASYFVDKLGEGYRHHGEVYGRYCSEMSRLSLELMEVLGESLGVGRRHFRRFFQGNDSIMRLNYYPPCQRPYDTLGTGPHCDPTSLTILHQDDVGGLQVFDAATLAWRSIRPPPGRLRRQHRRHLHGALQRALQELPPPRRRQQPGGTPLARLLPVPGDGQGGQAAQGAGGRRQPEGVPGLHVEDAAGLHHEALQVGHEDARGLLQLAQHQ

SEQ ID NO: 10150 - DNA, 1616 bp, Zea mays subsp. mays
  misc_feature (1)..(1616): Ceres Seq. ID no. 12637795
  misc_feature: MA Experiment ID: 108530 Result: Down-regulated in Transcription
  misc_feature: MA Experiment 108530 PARAMETER Experiment Name: Zm_Imbibed_Seeds_P Parameter: Age (day) Value: 6 vs. 2
  misc_feature: MA Experiment 108530 PARAMETER Experiment Name: Zm_Imbibed_Seeds_P Parameter: Organism Value: Zea mays
  misc_feature: MA Experiment 108530 PARAMETER Experiment Name: Zm_Imbibed_Seeds_P Parameter: Plant Line Value: 35A19
  misc_feature: MA Experiment 108530 PARAMETER Experiment Name: Zm_Imbibed_Seeds_P Parameter: Tissue Value: Aerial vs. Embryo
  misc_feature: MA Experiment ID: 108535 Result: Up-regulated in Transcription
  misc_feature: MA Experiment 108535 PARAMETER Experiment Name: Zm_Meristem_P Parameter: Age (day) Value: 8
  misc_feature: MA Experiment 108535 PARAMETER Experiment Name: Zm_Meristem_P Parameter: Organism Value: Zea mays
  misc_feature: MA Experiment 108535 PARAMETER Experiment Name: Zm_Meristem_P Parameter: Plant Line Value: 35A19
  misc_feature: MA Experiment 108535 PARAMETER Experiment Name: Zm_Meristem_P Parameter: Tissue Value: Root Meristem vs. Above Root Meristem
  misc_feature: MA Experiment ID: 108544 Result: Down-regulated in Transcription
  misc_feature: MA Experiment ID: 108556 Result: Down-regulated in Transcription
  misc_feature: MA Experiment 108556 PARAMETER Experiment Name: Zm_Drought_P Parameter: Age (day) Value: 9
  misc_feature: MA Experiment 108556 PARAMETER Experiment Name: Zm_Drought_P Parameter: Organism Value: Zea mays
  misc_feature: MA Experiment 108556 PARAMETER Experiment Name: Zm_Drought_P Parameter: Plant Line Value: 35A19
  misc_feature: MA Experiment 108556 PARAMETER Experiment Name: Zm_Drought_P Parameter: Timepoint (hr) Value: 24
  misc_feature: MA Experiment 108556 PARAMETER Experiment Name: Zm_Drought_P Parameter: Tissue Value: Aerial
  misc_feature: MA Experiment 108556 PARAMETER Experiment Name: Zm_Drought_P Parameter: Treatment Value: Drought vs. No Drought
cttccttcctttccccgctcttctcccacacaaacgccaccgccgcatcgaatccgagacgccgatctcggattcgccgtcaccacacgctgccctcgtcgcgctctcccgccgccgccgctcgtctcgtcagccatggcaggattggcaccagaagggtcgcaatttgatgacaagcagtatgacaagaaaatgcaggagatattaactgaagacttcttcacttcatatgatgatgtttgtgaaagttttgacagcatgggactgcaagagaaccttctgagaggcatctatgcctatggttttgagaagccatcggctattcagcaaaggggaatagttcccttctgcaaggggcttgacgtgattcagcaagctcagtctggaactggaaaaacagctaccttctgttctggaatcttgcagcaacttgattatggattggttgaatgccaggcattggttcttgctccaacccgtgagcttgctcagcaaattgagaaggttatgcgtgctcttggggactatttgggtgtcaaagtgcatgcctgtgttggtggaacatctgttcgtgaggaccaaaggattcttgccagtggtgtgcatgttgttgtgggcacaccaggacgtgtgtttgatatgttgcgcaggcagtctctccgtcccgacaacatcaagatgtttgtgttggatgaggctgatgagatgctctcccgtggattcaaggatcagatctatgatatcttccagcttcttccatccaagattcaggtcggtgtcttctcagctaccatgccccctgaggcccttgagatcacgcgcaagttcatgaacaaacctgtgaggattctcgtcaagagagatgagctcacccttgagggtatcaagcaattctatgtcaatatcgacaaggaagattggaagctcgacactctgtgtgacctgtatgagaccctggcaatcacccagagtgtcatctttgtgaacacacgccgcaaggtggactggctcacggacaagatgaggagcagggaccacaccgtgtcagctacacacggtgatatggaccagaacaccagggacatcatcatgagggagttcaggtccgggtcctctcgtgtgctcatcaccaccgacctgctcgcccgtggtatcgacgtccagcaggtctcacttgtcatcaactacgacctgccgacccagccagagaactacctccaccgcatcggccgtagtggtcggtttggaaggaagggtgttgccatcaacttcgtcacccgcgacgacgagcgaatgctgtttgacatccagaggttctacaacgtgaccgttgaggagctgccggccaatgtcgccgaccttctctagatagtatggctgctaaggtttctggataaaggagtttgtttttgttaaaatacgccaacttttctctgctttggatgagtggtaaggtccggggtctgttcgtattgtggcgaaggatgggttttaagtttattttgtcgtatgcaacgtttcggaatttttgtagcgagtaggctacgtgccgctcctgggctagctgggtgctgagacactactgaagtatttttaccttagctgttgggcttatg

SEQ ID NO: 10151 - protein, 455 aa, Zea mays subsp. mays
  peptide (1)..(455): Ceres Seq. ID no. 12637796
  misc_feature (95)..(298): Pfam Name: DEAD/DEAH box helicase Pfam Description: DEAD/DEAH box helicase
  misc_feature (46)..(455): Homolog of NCBI NO: 2500522 NR Description: Eukaryotic initiation factor 4A (eIF-4A) (eIF4A)
  misc_feature (46)..(455): Homolog of NCBI NO: 2341061 NR Description: translational initiation factor eIF-4A [Zea mays]
  misc_feature (46)..(455): Homolog of NCBI NO: 2286151 NR Description: translation initiation factor [Zea mays]
  misc_feature (46)..(455): Homolog of NCBI NO: 1170509 NR Description: EUKARYOTIC INITIATION FACTOR 4A (EIF-4A) (EIF4A)
  misc_feature (46)..(455): Homolog of NCBI NO: 547712 NR Description: Eukaryotic initiation factor 4A (eIF-4A) (eIF4A)
  misc_feature (46)..(455): Homolog of NCBI NO: 2500518 NR Description: Eukaryotic initiation factor 4A-11 (eIF-4A-11)
  misc_feature (46)..(455): Homolog of NCBI NO: 2119933 NR Description: translation initiation factor eIF-4A.11 - common
  misc_feature (46)..(455): Homolog of NCBI NO: 2119938 NR Description: translation initiation factor eIF-4A.14 - common
  misc_feature (46)..(455): Homolog of NCBI NO: 2500520 NR Description: Eukaryotic initiation factor 4A-14 (eIF-4A-14)
  misc_feature (46)..(455): Homolog of NCBI NO: 1170511 NR Description: Eukaryotic initiation factor 4A-10 (eIF-4A-10)
LPSFPRSSPTQTPPPHRIRDADLGFAVTTRCPRRALPPPPLVSSAMAGLAPEGSQFDDKQYDKKMQEILTEDFFTSYDDVCESFDSMGLQENLLRGIYAYGFEKPSAIQQRGIVPFCKGLDVIQQAQSGTGKTATFCSGILQQLDYGLVECQALVLAPTRELAQQIEKVMRALGDYLGVKVHACVGGTSVREDQRILASGVHVVVGTPGRVFDMLRRQSLRPDNIKMFVLDEADEMLSRGFKDQIYDIFQLLPSKIQVGVFSATMPPEALEITRKFMNKPVRILVKRDELTLEGIKQFYVNIDKEDWKLDTLCDLYETLAITQSVIFVNTRRKVDWLTDKMRSRDHTVSATHGDMDQNTRDIIMREFRSGSSRVLITTDLLARGIDVQQVSLVINYDLPTQPENYLHRIGRSGRFGRKGVAINFVTRDDERMLFDIQRFYNVTVEELPANVADLL

SEQ ID NO: 10152 - protein, 410 aa, Zea mays subsp. mays
  peptide (1)..(410): Ceres Seq. ID no. 12637797
  misc_feature (50)..(253): Pfam Name: DEAD/DEAH box helicase Pfam Description: DEAD/DEAH box helicase
  misc_feature (1)..(410): Homolog of NCBI NO: 2500522 NR Description: Eukaryotic initiation factor 4A (eIF-4A) (eIF4A)
  misc_feature (1)..(410): Homolog of NCBI NO: 2341061 NR Description: translational initiation factor eIF-4A [Zea mays]
  misc_feature (1)..(410): Homolog of NCBI NO: 2286151 NR Description: translation initiation factor [Zea mays]
  misc_feature (1)..(410): Homolog of NCBI NO: 1170509 NR Description: EUKARYOTIC INITIATION FACTOR 4A (EIF-4A) (EIF4A)
  misc_feature (1)..(410): Homolog of NCBI NO: 547712 NR Description: Eukaryotic initiation factor 4A (eIF-4A) (eIF4A)
  misc_feature (1)..(410): Homolog of NCBI NO: 2500518 NR Description: Eukaryotic initiation factor 4A-11 (eIF-4A-11)
  misc_feature (1)..(410): Homolog of NCBI NO: 2119933 NR Description: translation initiation factor eIF-4A.11 - common
  misc_feature (1)..(410): Homolog of NCBI NO: 2119938 NR Description: translation initiation factor eIF-4A.14 - common
  misc_feature (1)..(410): Homolog of NCBI NO: 2500520 NR Description: Eukaryotic initiation factor 4A-14 (eIF-4A-14)
  misc_feature (1)..(410): Homolog of NCBI NO: 1170511 NR Description: Eukaryotic initiation factor 4A-10 (eIF-4A-10)
MAGLAPEGSQFDDKQYDKKMQEILTEDFFTSYDDVCESFDSMGLQENLLRGIYAYGFEKPSAIQQRGIVPFCKGLDVIQQAQSGTGKTATFCSGILQQLDYGLVECQALVLAPTRELAQQIEKVMRALGDYLGVKVHACVGGTSVREDQRILASGVHVVVGTPGRVFDMLRRQSLRPDNIKMFVLDEADEMLSRGFKDQIYDIFQLLPSKIQVGVFSATMPPEALEITRKFMNKPVRILVKRDELTLEGIKQFYVNIDKEDWKLDTLCDLYETLAITQSVIFVNTRRKVDWLTDKMRSRDHTVSATHGDMDQNTRDIIMREFRSGSSRVLITTDLLARGIDVQQVSLVINYDLPTQPENYLHRIGRSGRFGRKGVAINFVTRDDERMLFDIQRFYNVTVEELPANVADLL

SEQ ID NO: 10153 - protein, 391 aa, Zea mays subsp. mays
  peptide (1)..(391): Ceres Seq. ID no. 12637798
  misc_feature (31)..(234): Pfam Name: DEAD/DEAH box helicase Pfam Description: DEAD/DEAH box helicase
  misc_feature (1)..(391): Homolog of NCBI NO: 2500522 NR Description: Eukaryotic initiation factor 4A (eIF-4A) (eIF4A)
  misc_feature (1)..(391): Homolog of NCBI NO: 2341061 NR Description: translational initiation factor eIF-4A [Zea mays]
  misc_feature (1)..(391): Homolog of NCBI NO: 2286151 NR Description: translation initiation factor [Zea mays]
  misc_feature (1)..(391): Homolog of NCBI NO: 1170509 NR Description: EUKARYOTIC INITIATION FACTOR 4A (EIF-4A) (EIF4A)
  misc_feature (1)..(391): Homolog of NCBI NO: 547712 NR Description: Eukaryotic initiation factor 4A (eIF-4A) (eIF4A)
  misc_feature (1)..(391): Homolog of NCBI NO: 2500518 NR Description: Eukaryotic initiation factor 4A-11 (eIF-4A-11)
  misc_feature (1)..(391): Homolog of NCBI NO: 2119933 NR Description: translation initiation factor eIF-4A.11 - common
  misc_feature (1)..(391): Homolog of NCBI NO: 2119938 NR Description: translation initiation factor eIF-4A.14 - common
  misc_feature (1)..(391): Homolog of NCBI NO: 2500520 NR Description: Eukaryotic initiation factor 4A-14 (eIF-4A-14)
  misc_feature (1)..(391): Homolog of NCBI NO: 1170511 NR Description: Eukaryotic initiation factor 4A-10 (eIF-4A-10)
MQEILTEDFFTSYDDVCESFDSMGLQENLLRGIYAYGFEKPSAIQQRGIVPFCKGLDVIQQAQSGTGKTATFCSGILQQLDYGLVECQALVLAPTRELAQQIEKVMRALGDYLGVKVHACVGGTSVREDQRILASGVHVVVGTPGRVFDMLRRQSLRPDNIKMFVLDEADEMLSRGFKDQIYDIFQLLPSKIQVGVFSATMPPEALEITRKFMNKPVRILVKRDELTLEGIKQFYVNIDKEDWKLDTLCDLYETLAITQSVIFVNTRRKVDWLTDKMRSRDHTVSATHGDMDQNTRDIIMREFRSGSSRVLITTDLLARGIDVQQVSLVINYDLPTQPENYLHRIGRSGRFGRKGVAINFVTRDDERMLFDIQRFYNVTVEELPANVADLL

SEQ ID NO: 10154 - DNA, 1051 bp, Zea mays subsp. mays
  misc_feature (1)..(1051): Ceres Seq. ID no. 12544505
  misc_feature: MA Experiment ID: 108523 Result: Up-regulated in Transcription
  misc_feature: MA Experiment 108523 PARAMETER Experiment Name: Zm_42deg_Heat_P Parameter: Age (day) Value: 8
  misc_feature: MA Experiment 108523 PARAMETER Experiment Name: Zm_42deg_Heat_P Parameter: Organism Value: Zea mays
  misc_feature: MA Experiment 108523 PARAMETER Experiment Name: Zm_42deg_Heat_P Parameter: Plant Line Value: 35A19
  misc_feature: MA Experiment 108523 PARAMETER Experiment Name: Zm_42deg_Heat_P Parameter: Temperature (deg C) Value: 42 vs. 22
  misc_feature: MA Experiment 108523 PARAMETER Experiment Name: Zm_42deg_Heat_P Parameter: Timepoint (hr) Value: 6
  misc_feature: MA Experiment 108523 PARAMETER Experiment Name: Zm_42deg_Heat_P Parameter: Tissue Value: Aerial
  misc_feature: MA Experiment ID: 108533 Result: Down-regulated in Transcription
  misc_feature: MA Experiment 108533 PARAMETER Experiment Name: Zm_4deg_Cold_P Parameter: Age (hr) Value: 8
  misc_feature: MA Experiment 108533 PARAMETER Experiment Name: Zm_4deg_Cold_P Parameter: Organism Value: Zea mays
  misc_feature: MA Experiment 108533 PARAMETER Experiment Name: Zm_4deg_Cold_P Parameter: Plant Line Value: 35A19
  misc_feature: MA Experiment 108533 PARAMETER Experiment Name: Zm_4deg_Cold_P Parameter: Temperature (deg C) Value: 4 vs. 22
  misc_feature: MA Experiment 108533 PARAMETER Experiment Name: Zm_4deg_Cold_P Parameter: Timepoint (hr) Value: 1
  misc_feature: MA Experiment 108533 PARAMETER Experiment Name: Zm_4deg_Cold_P Parameter: Tissue Value: Aerial
  misc_feature: MA Experiment ID: 108543 Result: Up-regulated in Transcription
  misc_feature: MA Experiment ID: 20000477 Result: Down-regulated in Transcription
  misc_feature: MA Experiment 20000477 PARAMETER Experiment Name: Zm_5mM_SA_P Parameter: Age (day) Value: 10
  misc_feature: MA Experiment 20000477 PARAMETER Experiment Name: Zm_5mM_SA_P Parameter: Organism Value: Zea mays
  misc_feature: MA Experiment 20000477 PARAMETER Experiment Name: Zm_5mM_SA_P Parameter: Plant Line Value: 35A19
  misc_feature: MA Experiment 20000477 PARAMETER Experiment Name: Zm_5mM_SA_P Parameter: Timepoint (hr) Value: 48
  misc_feature: MA Experiment 20000477 PARAMETER Experiment Name: Zm_5mM_SA_P Parameter: Tissue Value: Aerial
  misc_feature: MA Experiment 20000477 PARAMETER Experiment Name: Zm_5mM_SA_P Parameter: Treatment Value: 5mM SA vs. No Treatment
  misc_feature: MA Experiment ID: 20000534 Result: Down-regulated in Transcription
  misc_feature: MA Experiment 20000534 PARAMETER Experiment Name: Zm_Hybrid_Pollen_P Parameter: Age (day) Value: 8
  misc_feature: MA Experiment 20000534 PARAMETER Experiment Name: Zm_Hybrid_Pollen_P Parameter: Organism Value: Zea mays
  misc_feature: MA Experiment 20000534 PARAMETER Experiment Name: Zm_Hybrid_Pollen_P Parameter: Plant Line Value: 35A19
  misc_feature: MA Experiment 20000534 PARAMETER Experiment Name: Zm_Hybrid_Pollen_P Parameter: Tissue Value: Pollen vs. Aerial
caatagccattcaatcattcaagcgaagcagccaccactctctccactgtgactccgtgacctgcctgccctgctgcacaagcacagcacacacaccccgcacaccgcaccagctcagctcagctcaccaagacaatcaatcatggctcgtccgcgcagtgtcgctgccgctgcccccctcctcctgctgctcgccgccgccgcagcggggctcgtgtccgccgcgtcgccggcagccagcgacttcgtccgcaagtcgtgccgcacgacgcagtacccttcggtgtgcgagcagagcctggcgtcgtacggcgggtcgccgccgccacggagcccgcgggagctggcgcgcgccgcgctgtcggtgagcgcggaccgcgcgcgcgccgcgtcgacgtacgtgggccgcctgtgcggcgccagcaacggcaaaggcgcgaagaaggggtcgggatcggcgtcggcgtcggcaggtcccgtgcgcgactgcctggacaatctggcggacagcgtgggccacctccgcgacgcggcgcaggagatgggcggcgccgggatgggccgcgcggggacgccggcgttcaggtggcacctcagcaacgtgcagacctggtgcagcgccgcgctcaccgacgaggacacctgcctcgacggcctctcgtcccgcgccgtcgacgccggcacgcgcgccgccatccggggcaaggtcgtcgaggtcgcgcaggtcaccagcaacgcgctcgcgctcgtcaataaggtcgggcctgggtactaacacgggaaggggacccaagatccaggcccaggcccaggcccaggcccagcccagataccacacccgctactagtatagtactaggcgcctccacctccacggcgttgggtgtttctcgtccgttaatagctcggtttgctttgcttgtgtttgtgtaagatatacattagttaagggcaataagcttgtactattatgagtggcggccgaggagtacagtacgttctcctctgtccgatcatgccaccatattaatgtgggagatatcttttgtcc

SEQ ID NO: 10155 - protein, 210 aa, Zea mays subsp. mays
  peptide (1)..(210): Ceres Seq. ID no. 12544506
  misc_feature (12)..(208): Homolog of NCBI NO: 32489696 NR Description: OSJNBb0004G23.9 [Oryza sativa (japonica
  misc_feature (1)..(205): Homolog of NCBI NO: 7406663 NR Description: putative ripening-related protein [Vitis vinifera]
  misc_feature (1)..(210): Homolog of NCBI NO: 112717 NR Description: 21 KD PROTEIN PRECURSOR (1.2 PROTEIN)
  misc_feature (13)..(210): Homolog of NCBI NO: 15241799 NR Description: ripening-related protein - like; protein id: supported by cDNA: 9669., supported by cDNA: gi_14423453,
  misc_feature (13)..(210): Homolog of NCBI NO: 21618088 NR Description: ripening-related protein-like [Arabidopsis
  misc_feature (14)..(205): Homolog of NCBI NO: 18407657 NR Description: expressed protein; protein id: At1g62770.1, by cDNA: 93927. [Arabidopsis thaliana]
  misc_feature (14)..(205): Homolog of NCBI NO: 21618013 NR Description: putative ripening-related protein [Arabidopsis
  misc_feature (34)..(204): Homolog of NCBI NO: 18394174 NR Description: expressed protein; protein id: At1g14890.1, by cDNA: 33355., supported by cDNA: gi_17529115 [Arabidopsis
  misc_feature (13)..(205): Homolog of NCBI NO: 15234547 NR Description: putative protein; protein id: At4g12390.1, by cDNA: 27615., supported by cDNA: gi_15450853, supported by
  misc_feature (24)..(205): Homolog of NCBI NO: 7488727 NR Description: 21K protein precursor - alfalfa
  misc_feature (12)..(208): Homolog of NCBI NO: 32489696 NR Description: OSJNBb0004G23.9 [Oryza sativa (japonica
  misc_feature (1)..(205): Homolog of NCBI NO: 7406663 NR Description: putative ripening-related protein [Vitis vinifera]
  misc_feature (1)..(210): Homolog of NCBI NO: 112717 NR Description: 21 KD PROTEIN PRECURSOR (1.2 PROTEIN)
  misc_feature (13)..(210): Homolog of NCBI NO: 15241799 NR Description: ripening-related protein - like; protein id: supported by cDNA: 9669., supported by cDNA: gi_14423453,
  misc_feature (13)..(210): Homolog of NCBI NO: 21618088 NR Description: ripening-related protein-like [Arabidopsis
  misc_feature (14)..(205): Homolog of NCBI NO: 18407657 NR Description: expressed protein; protein id: At1g62770.1, by cDNA: 93927. [Arabidopsis thaliana]
  misc_feature (14)..(205): Homolog of NCBI NO: 21618013 NR Description: putative ripening-related protein [Arabidopsis
  misc_feature (34)..(204): Homolog of NCBI NO: 18394174 NR Description: expressed protein; protein id: At1g14890.1, by cDNA: 33355., supported by cDNA: gi_17529115 [Arabidopsis
  misc_feature (13)..(205): Homolog of NCBI NO: 15234547 NR Description: putative protein; protein id: At4g12390.1, by cDNA: 27615., supported by cDNA: gi_15450853, supported by
  misc_feature (24)..(205): Homolog of NCBI NO: 7488727 NR Description: 21K protein precursor - alfalfa
MARPRSVAAAAPLLLLLAAAAAGLVSAASPAASDFVRKSCRTTQYPSVCEQSLASYGGSPPPRSPRELARAALSVSADRARAASTYVGRLCGASNGKGAKKGSGSASASAGPVRDCLDNLADSVGHLRDAAQEMGGAGMGRAGTPAFRWHLSNVQTWCSAALTDEDTCLDGLSSRAVDAGTRAAIRGKVVEVAQVTSNALALVNKVGPGY

SEQ ID NO: 10156 - protein, 121 aa, Zea mays subsp. mays
  peptide (1)..(121): Ceres Seq. ID no. 12544507
  misc_feature (75)..(121): Homolog of NCBI NO: 5821145 NR Description: RNA binding protein [Homo sapiens]
  misc_feature (75)..(121): Homolog of NCBI NO: 5821143 NR Description: RNA binding protein [Homo sapiens]
  misc_feature (75)..(121): Homolog of NCBI NO: 6649242 NR Description: splicing coactivator subunit SRm300 [Homo sapiens]
  misc_feature (75)..(121): Homolog of NCBI NO: 19923466 NR Description: splicing coactivator subunit SRm300; RNA binding
  misc_feature (26)..(121): Homolog of NCBI NO: 5821151 NR Description: RNA binding protein [Homo sapiens]
  misc_feature (26)..(121): Homolog of NCBI NO: 6634015 NR Description: KIAA0324 protein [Homo sapiens]
  misc_feature (26)..(121): Homolog of NCBI NO: 7512967 NR Description: hypothetical protein KIAA0324 - human (fragment)
  misc_feature (26)..(121): Homolog of NCBI NO: 6649242 NR Description: splicing coactivator subunit SRm300 [Homo sapiens]
  misc_feature (26)..(121): Homolog of NCBI NO: 19923466 NR Description: splicing coactivator subunit SRm300; RNA binding
  misc_feature (75)..(121): Homolog of NCBI NO: 5821145 NR Description: RNA binding protein [Homo sapiens]
  misc_feature (75)..(121): Homolog of NCBI NO: 5821143 NR Description: RNA binding protein [Homo sapiens]
  misc_feature (75)..(121): Homolog of NCBI NO: 6649242 NR Description: splicing coactivator subunit SRm300 [Homo sapiens]
  misc_feature (75)..(121): Homolog of NCBI NO: 19923466 NR Description: splicing coactivator subunit SRm300; RNA binding
  misc_feature (26)..(121): Homolog of NCBI NO: 5821151 NR Description: RNA binding protein [Homo sapiens]
  misc_feature (26)..(121): Homolog of NCBI NO: 6634015 NR Description: KIAA0324 protein [Homo sapiens]
  misc_feature (26)..(121): Homolog of NCBI NO: 7512967 NR Description: hypothetical protein KIAA0324 - human (fragment)
  misc_feature (26)..(121): Homolog of NCBI NO: 6649242 NR Description: splicing coactivator subunit SRm300 [Homo sapiens]
  misc_feature (26)..(121): Homolog of NCBI NO: 19923466 NR Description: splicing coactivator subunit SRm300; RNA binding
IAIQSFKRSSHHSLHCDSVTCLPCCTSTAHTPRTPHQLSSAHQDNQSWLVRAVSLPLPPSSCCSPPPQRGSCPPRRRQPATSSASRAARRSTLRCASRAWRRTAGRRRHGARGSWRAPRCR

SEQ ID NO: 10157 - DNA, 735 bp, Zea mays subsp. mays
  misc_feature (1)..(735): Ceres Seq. ID no. 12400721
  misc_feature: MA Experiment ID: 108530 Result: Down-regulated in Transcription
  misc_feature: MA Experiment 108530 PARAMETER Experiment Name: Zm_Imbibed_Seeds_P Parameter: Age (day) Value: 6 vs. 2
  misc_feature: MA Experiment 108530 PARAMETER Experiment Name: Zm_Imbibed_Seeds_P Parameter: Organism Value: Zea mays
  misc_feature: MA Experiment 108530 PARAMETER Experiment Name: Zm_Imbibed_Seeds_P Parameter: Plant Line Value: 35A19
  misc_feature: MA Experiment 108530 PARAMETER Experiment Name: Zm_Imbibed_Seeds_P Parameter: Tissue Value: Aerial vs. Embryo
  misc_feature: MA Experiment ID: 108544 Result: Down-regulated in Transcription
  misc_feature: MA Experiment ID: 20000478 Result: Down-regulated in Transcription
  misc_feature: MA Experiment 20000478 PARAMETER Experiment Name: Zm_5mM_SA_P Parameter: Age (day) Value: 11
  misc_feature: MA Experiment 20000478 PARAMETER Experiment Name: Zm_5mM_SA_P Parameter: Organism Value: Zea mays
  misc_feature: MA Experiment 20000478 PARAMETER Experiment Name: Zm_5mM_SA_P Parameter: Plant Line Value: 35A19
  misc_feature: MA Experiment 20000478 PARAMETER Experiment Name: Zm_5mM_SA_P Parameter: Timepoint (hr) Value: 72
  misc_feature: MA Experiment 20000478 PARAMETER Experiment Name: Zm_5mM_SA_P Parameter: Tissue Value: Aerial
  misc_feature: MA Experiment 20000478 PARAMETER Experiment Name: Zm_5mM_SA_P Parameter: Treatment Value: 5mM SA vs. No Treatment
  misc_feature: MA Experiment ID: 20000487 Result: Up-regulated in Transcription
  misc_feature: MA Experiment 20000487 PARAMETER Experiment Name: Zm_50mM_NH4NO3_L_to_H_P Parameter: Organism Value: Zea mays
  misc_feature: MA Experiment 20000487 PARAMETER Experiment Name: Zm_50mM_NH4NO3_L_to_H_P Parameter: Timepoint (hr) Value: 4
  misc_feature: MA Experiment 20000487 PARAMETER Experiment Name: Zm_50mM_NH4NO3_L_to_H_P Parameter: Tissue Value: Leaves
  misc_feature: MA Experiment 20000487 PARAMETER Experiment Name: Zm_50mM_NH4NO3_L_to_H_P Parameter: Treatment Value: 50mM NH4NO3 vs. 100mM Mannitol
  misc_feature: MA Experiment ID: 20000488 Result: Up-regulated in Transcription
  misc_feature: MA Experiment 20000488 PARAMETER Experiment Name: Zm_50mM_NH4NO3_L_to_H_P Parameter: Organism Value: Zea mays
  misc_feature: MA Experiment 20000488 PARAMETER Experiment Name: Zm_50mM_NH4NO3_L_to_H_P Parameter: Timepoint (hr) Value: 8
  misc_feature: MA Experiment 20000488 PARAMETER Experiment Name: Zm_50mM_NH4NO3_L_to_H_P Parameter: Tissue Value: Leaves
  misc_feature: MA Experiment 20000488 PARAMETER Experiment Name: Zm_50mM_NH4NO3_L_to_H_P Parameter: Treatment Value: 50mM NH4NO3 vs. 100mM Mannitol
  misc_feature: MA Experiment ID: 20001606 Result: Up-regulated in Transcription
  misc_feature: MA Experiment 20001606 PARAMETER Experiment Name: Zm_50ppm_KNO3_L-to-H_P Parameter: Age (day) Value: 19
  misc_feature: MA Experiment 20001606 PARAMETER Experiment Name: Zm_50ppm_KNO3_L-to-H_P Parameter: Organism Value: Zea mays
  misc_feature: MA Experiment 20001606 PARAMETER Experiment Name: Zm_50ppm_KNO3_L-to-H_P Parameter: Plant Line Value: 35A19
  misc_feature: MA Experiment 20001606 PARAMETER Experiment Name: Zm_50ppm_KNO3_L-to-H_P Parameter: Timepoint (hr) Value: 8
  misc_feature: MA Experiment 20001606 PARAMETER Experiment Name: Zm_50ppm_KNO3_L-to-H_P Parameter: Tissue Value: Shoots
  misc_feature: MA Experiment 20001606 PARAMETER Experiment Name: Zm_50ppm_KNO3_L-to-H_P Parameter: Treatment Value: 50ppm KNO3 vs. 50ppm KCl
  misc_feature: MA Experiment ID: 20001612 Result: Up-regulated in Transcription
  misc_feature: MA Experiment 20001612 PARAMETER Experiment Name: Zm_50ppm_KNO3_L-to-H_P Parameter: Age (day) Value: 19
  misc_feature: MA Experiment 20001612 PARAMETER Experiment Name: Zm_50ppm_KNO3_L-to-H_P Parameter: Organism Value: Zea mays
  misc_feature: MA Experiment 20001612 PARAMETER Experiment Name: Zm_50ppm_KNO3_L-to-H_P Parameter: Plant Line Value: 35A19
  misc_feature: MA Experiment 20001612 PARAMETER Experiment Name: Zm_50ppm_KNO3_L-to-H_P Parameter: Timepoint (hr) Value: 8
  misc_feature: MA Experiment 20001612 PARAMETER Experiment Name: Zm_50ppm_KNO3_L-to-H_P Parameter: Tissue Value: Roots
  misc_feature: MA Experiment 20001612 PARAMETER Experiment Name: Zm_50ppm_KNO3_L-to-H_P Parameter: Treatment Value: 50ppm KNO3 vs. 50ppm KCl
aattccacccatcgccgccgaaatcccgttgcgtctctcgcgcgttaccaagctctcaagttttctcgcgccgacggcaatggatgaggtcaccgaggccgtgaacaacctcaacatctcgggcgtaggggccgcgggcgttgccggggcggaagggcacaagaagaatcgcatccaggtctccaacactaagaagcccctcttcttctatgtcaacctcgccaagaggtacatgcagctgcacaacgaagtagagctgtcggccctcggcatggccattgcgacggtggtgacagtagcagaaattctgaaaaataacgggcttgctgtcgcgaagagtatcatgacatctactgttgatatcaaggacgagactaggacccggcctatccagaaggccaagattgaaatattgcttggcaagacggagaagtttgatgagctgatggcagcggctgccgaggagagggaggctaatggggccgaggaacaaagctgagtacctgcaaggaaggaccttgttgtagcttatttactgttttctgctgctagatttgtcttcttcatagtttgtcgagtgggctagagacgattacttgtataatcaattaaaggtgcggcttatttagtgtgcttttacttgattcatttatgttggaatgatacaagttgtgttcaatatggtatactctagattcatcactatcttcaatttagaagatagtgcgttgctcc

SEQ ID NO: 10158 - protein, 165 aa, Zea mays subsp. mays
  peptide (1)..(165): Ceres Seq. ID no. 12400722
  misc_feature (58)..(165): Homolog of NCBI NO: 8745040 NR Description: conserved hypothetical protein L6293.01 major] >gi|13751124|emb|CAC37138.1| conserved hypothetical
  misc_feature (26)..(165): Homolog of NCBI NO: 34910240 NR Description: OSJNBa0089K24.4 [Oryza sativa (japonica
  misc_feature (27)..(165): Homolog of NCBI NO: 18397011 NR Description: expressed protein; protein id: At1g29250.1, by cDNA: 18194., supported by cDNA: gi_15529269, supported by
  misc_feature (27)..(165): Homolog of NCBI NO: 18403464 NR Description: expressed protein; protein id: At2g34160.1, by cDNA: 107643. [Arabidopsis thaliana] >gi|25370772|pir||B84753
  misc_feature (36)..(165): Homolog of NCBI NO: 15229322 NR Description: unknown protein; protein id: At3g04620.1 thaliana] >gi|6175166|gb|AAF04892.1|AC011437_7 unknown protein
  misc_feature (58)..(165): Homolog of NCBI NO: 15029401 NR Description: unknown [Leishmania infantum]
IPPIAAEIPLRLSRVTKLSSFLAPTAMDEVTEAVNNLNISGVGAAGVAGAEGHKKNRIQVSNTKKPLFFYVNLAKRYMQLHNEVELSALGMAIATVVTVAEILKNNGLAVAKSIMTSTVDIKDETRTRPIQKAKIEILLGKTEKFDELMAAAAEEREANGAEEQS

SEQ ID NO: 10159 - protein, 139 aa, Zea mays subsp. mays
  peptide (1)..(139): Ceres Seq. ID no. 12400723
  misc_feature (1)..(139): Homolog of NCBI NO: 34910240 NR Description: OSJNBa0089K24.4 [Oryza sativa (japonica
  misc_feature (1)..(139): Homolog of NCBI NO: 18397011 NR Description: expressed protein; protein id: At1g29250.1, by cDNA: 18194., supported by cDNA: gi_15529269, supported by
  misc_feature (1)..(139): Homolog of NCBI NO: 18403464 NR Description: expressed protein; protein id: At2g34160.1, by cDNA: 107643. [Arabidopsis thaliana] >gi|25370772|pir||B84753
  misc_feature (10)..(139): Homolog of NCBI NO: 15229322 NR Description: unknown protein; protein id: At3g04620.1 thaliana] >gi|6175166|gb|AAF04892.1|AC011437_7 unknown protein
  misc_feature (32)..(139): Homolog of NCBI NO: 15029401 NR Description: unknown [Leishmania infantum]
  misc_feature (32)..(139): Homolog of NCBI NO: 8745040 NR Description: conserved hypothetical protein L6293.01 major] >gi|13751124|emb|CAC37138.1| conserved hypothetical
MDEVTEAVNNLNISGVGAAGVAGAEGHKKNRIQVSNTKKPLFFYVNLAKRYMQLHNEVELSALGMAIATVVTVAEILKNNGLAVAKSIMTSTVDIKDETRTRPIQKAKIEILLGKTEKFDELMAAAAEEREANGAEEQS

SEQ ID NO: 10160 - protein, 88 aa, Zea mays subsp. mays
  peptide (1)..(88): Ceres Seq. ID no. 12400724
  misc_feature (1)..(88): Homolog of NCBI NO: 34910240 NR Description: OSJNBa0089K24.4 [Oryza sativa (japonica
  misc_feature (1)..(88): Homolog of NCBI NO: 18397011 NR Description: expressed protein; protein id: At1g29250.1, by cDNA: 18194., supported by cDNA: gi_15529269, supported by
  misc_feature (1)..(88): Homolog of NCBI NO: 18403464 NR Description: expressed protein; protein id: At2g34160.1, by cDNA: 107643. [Arabidopsis thaliana] >gi|25370772|pir||B84753
  misc_feature (1)..(88): Homolog of NCBI NO: 15229322 NR Description: unknown protein; protein id: At3g04620.1 thaliana] >gi|6175166|gb|AAF04892.1|AC011437_7 unknown protein
  misc_feature (1)..(88): Homolog of NCBI NO: 15029401 NR Description: unknown [Leishmania infantum]
  misc_feature (1)..(88): Homolog of NCBI NO: 8745040 NR Description: conserved hypothetical protein L6293.01 major] >gi|13751124|emb|CAC37138.1| conserved hypothetical
MQLHNEVELSALGMAIATVVTVAEILKNNGLAVAKSIMTSTVDIKDETRTRPIQKAKIEILLGKTEKFDELMAAAAEEREANGAEEQS

SEQ ID NO: 10161 - DNA, 1037 bp, Zea mays subsp. mays
  misc_feature (1)..(1037): Ceres Seq. ID no. 12355548
  misc_feature: MA Experiment ID: 108523 Result: Up-regulated in Transcription
  misc_feature: MA Experiment 108523 PARAMETER Experiment Name: Zm_42deg_Heat_P Parameter: Age (day) Value: 8
  misc_feature: MA Experiment 108523 PARAMETER Experiment Name: Zm_42deg_Heat_P Parameter: Organism Value: Zea mays
  misc_feature: MA Experiment 108523 PARAMETER Experiment Name: Zm_42deg_Heat_P Parameter: Plant Line Value: 35A19
  misc_feature: MA Experiment 108523 PARAMETER Experiment Name: Zm_42deg_Heat_P Parameter: Temperature (deg C) Value: 42 vs. 22
  misc_feature: MA Experiment 108523 PARAMETER Experiment Name: Zm_42deg_Heat_P Parameter: Timepoint (hr) Value: 6
  misc_feature: MA Experiment 108523 PARAMETER Experiment Name: Zm_42deg_Heat_P Parameter: Tissue Value: Aerial
  misc_feature: MA Experiment ID: 108547 Result: Up-regulated in Transcription
  misc_feature: MA Experiment 108547 PARAMETER Experiment Name: Zm_Imbibed_Seeds_P Parameter: Age (day) Value: 4 vs. 2
  misc_feature: MA Experiment 108547 PARAMETER Experiment Name: Zm_Imbibed_Seeds_P Parameter: Organism Value: Zea mays
  misc_feature: MA Experiment 108547 PARAMETER Experiment Name: Zm_Imbibed_Seeds_P Parameter: Plant Line Value: 35A19
  misc_feature: MA Experiment 108547 PARAMETER Experiment Name: Zm_Imbibed_Seeds_P Parameter: Tissue Value: Aerial vs. Embryo
  misc_feature: MA Experiment ID: 108559 Result: Up-regulated in Transcription
  misc_feature: MA Experiment 108559 PARAMETER Experiment Name: Zm_5mM_NO_P Parameter: Age (day) Value: 8
  misc_feature: MA Experiment 108559 PARAMETER Experiment Name: Zm_5mM_NO_P Parameter: Organism Value: Zea mays
  misc_feature: MA Experiment 108559 PARAMETER Experiment Name: Zm_5mM_NO_P Parameter: Plant Line Value: 35A19
  misc_feature: MA Experiment 108559 PARAMETER Experiment Name: Zm_5mM_NO_P Parameter: Timepoint (hr) Value: 12
  misc_feature: MA Experiment 108559 PARAMETER Experiment Name: Zm_5mM_NO_P Parameter: Tissue Value: Aerial
  misc_feature: MA Experiment 108559 PARAMETER Experiment Name: Zm_5mM_NO_P Parameter: Treatment Value: 5mM NO vs. No Treatment
  misc_feature: MA Experiment ID: 20000488 Result: Up-regulated in Transcription
  misc_feature: MA Experiment 20000488 PARAMETER Experiment Name: Zm_50mM_NH4NO3_L_to_H_P Parameter: Organism Value: Zea mays
  misc_feature: MA Experiment 20000488 PARAMETER Experiment Name: Zm_50mM_NH4NO3_L_to_H_P Parameter: Timepoint (hr) Value: 8
  misc_feature: MA Experiment 20000488 PARAMETER Experiment Name: Zm_50mM_NH4NO3_L_to_H_P Parameter: Tissue Value: Leaves
  misc_feature: MA Experiment 20000488 PARAMETER Experiment Name: Zm_50mM_NH4NO3_L_to_H_P Parameter: Treatment Value: 50mM NH4NO3 vs. 100mM Mannitol
  misc_feature: MA Experiment ID: 20000492 Result: Up-regulated in Transcription
  misc_feature: MA Experiment 20000492 PARAMETER Experiment Name: Zm_Hybrid_Seed_Dev_P Parameter: DAP Value: 12
  misc_feature: MA Experiment 20000492 PARAMETER Experiment Name: Zm_Hybrid_Seed_Dev_P Parameter: Organism Value: Zea mays
  misc_feature: MA Experiment 20000492 PARAMETER Experiment Name: Zm_Hybrid_Seed_Dev_P Parameter: Plant Line Value: 35A19
  misc_feature: MA Experiment 20000492 PARAMETER Experiment Name: Zm_Hybrid_Seed_Dev_P Parameter: Tissue Value: Fert Kernel vs. Unfert Floret
  misc_feature: MA Experiment ID: 20000533 Result: Up-regulated in Transcription
  misc_feature: MA Experiment 20000533 PARAMETER Experiment Name: Zm_0.001percent_MeJA_P Parameter: Age (day) Value: 11
  misc_feature: MA Experiment 20000533 PARAMETER Experiment Name: Zm_0.001percent_MeJA_P Parameter: Organism Value: Zea mays
  misc_feature: MA Experiment 20000533 PARAMETER Experiment Name: Zm_0.001percent_MeJA_P Parameter: Plant Line Value: 35A19
  misc_feature: MA Experiment 20000533 PARAMETER Experiment Name: Zm_0.001percent_MeJA_P Parameter: Timepoint (hr) Value: 72
  misc_feature: MA Experiment 20000533 PARAMETER Experiment Name: Zm_0.001percent_MeJA_P Parameter: Tissue Value: Aerial
  misc_feature: MA Experiment 20000533 PARAMETER Experiment Name: Zm_0.001percent_MeJA_P Parameter: Treatment Value: 0.001percent MeJA vs. No Treatment
  misc_feature: MA Experiment ID: 20000626 Result: Up-regulated in Transcription
  misc_feature: MA Experiment 20000626 PARAMETER Experiment Name: Zm_Herbicide-Treatments_P Parameter: Timepoint (hr) Value: 12
  misc_feature: MA Experiment 20000626 PARAMETER Experiment Name: Zm_Herbicide-Treatments_P Parameter: Tissue Value: Aerial
  misc_feature: MA Experiment 20000626 PARAMETER Experiment Name: Zm_Herbicide-Treatments_P Parameter: Treatment Value: Roundup vs. No Treatment
  misc_feature: MA Experiment ID: 20001612 Result: Up-regulated in Transcription
  misc_feature: MA Experiment 20001612 PARAMETER Experiment Name: Zm_50ppm_KNO3_L-to-H_P Parameter: Age (day) Value: 19
  misc_feature: MA Experiment 20001612 PARAMETER Experiment Name: Zm_50ppm_KNO3_L-to-H_P Parameter: Organism Value: Zea mays
  misc_feature: MA Experiment 20001612 PARAMETER Experiment Name: Zm_50ppm_KNO3_L-to-H_P Parameter: Plant Line Value: 35A19
  misc_feature: MA Experiment 20001612 PARAMETER Experiment Name: Zm_50ppm_KNO3_L-to-H_P Parameter: Timepoint (hr) Value: 8
  misc_feature: MA Experiment 20001612 PARAMETER Experiment Name: Zm_50ppm_KNO3_L-to-H_P Parameter: Tissue Value: Roots
  misc_feature: MA Experiment 20001612 PARAMETER Experiment Name: Zm_50ppm_KNO3_L-to-H_P Parameter: Treatment Value: 50ppm KNO3 vs. 50ppm KCl
attcgatccgttcccttgccctaagacccacccctgatttcatttccccaatcatggcggcggctctgtcggggacggcggtgtccacggctgcgcttctagccccaatccgagctccaaccagcgcgtttatccggcgctcccagctcacctgtcatcgcctccactcactaaaatgccgccgcgctgggcccatcgtccccgcggccgctgctgccgcggcgggcagcagctcgccgtcgtcagccgttttccacggcgagtgcttcgtggtgggcgacaatatcgacactgaccagatcatccccgccgagcacctcactctggtgccctccaagccggacgagtaccgcaagctcggttccttcgccttcgcggggctcccatccgcagcctacccgacgccgttcgtcgctccgggtgaggagtcctcccgctacgccatcattgtcggcggagccaacttcgggtgcggttcctctcgcgagcacgcgcccgtcgcgcttggggccgctggcgcacgcgccattgttgcggagggctacgcgcgcatcttttttcgcaactccgtggccactggagaggtgtaccctctggagctcacggacgttggtgcctggaaggagtgcaagacaggggatgtggtcaccgtggaccttgctaactccgtttttattaaccacacctctggcaaggagtacaagctgaaaccaattggtgatgctggccctgtaattgaggcgggagggatctttgcctacgcccggaagacaggaatgattgcgtcgaaagctgctgcatgagggaaagcttaggcagccgagcctctgcggagatgaagtaagctggagttaggaccaagagttgctgcacctacttgatgtcgacggtgtctcgaaataagttgcggcctaccggaattatgatgaatcaatcaatttggcctgtcacagatcgttttttttgttactagtacttgtacaattgtactcctgcctgctactgtccttatctgtttgaataactgctctgttgtc

SEQ ID NO: 10162 - protein, 266 aa, Zea mays subsp. mays
  peptide (1)..(266): Ceres Seq. ID no. 12355549
  misc_feature (18)..(265): Homolog of NCBI NO: 14140144 NR Description: putative protein [Oryza sativa]
  misc_feature (18)..(265): Homolog of NCBI NO: 15224221 NR Description: 3-isopropylmalate dehydratase, small subunit; id: At2g43090.1, supported by cDNA: 31507., supported by cDNA:
  misc_feature (13)..(262): Homolog of NCBI NO: 15231608 NR Description: 3-isopropylmalate dehydratase-like protein (small protein id: At3g58990.1, supported by cDNA: gi_17529161
  misc_feature (16)..(264): Homolog of NCBI NO: 15224222 NR Description: 3-isopropylmalate dehydratase, small subunit; id: At2g43100.1, supported by cDNA: gi_16974632, supported by
  misc_feature (86)..(263): Homolog of NCBI NO: 23041579 NR Description: hypothetical protein [Trichodesmium erythraeum
  misc_feature (83)..(265): Homolog of NCBI NO: 21673448 NR Description: 3-isopropylmalate dehydratase, small subunit,
  misc_feature (86)..(256): Homolog of NCBI NO: 15643321 NR Description: 3-isopropylmalate dehydratase, small subunit
  misc_feature (86)..(256): Homolog of NCBI NO: 23051508 NR Description: hypothetical protein [Methanosarcina barkeri]
  misc_feature (82)..(256): Homolog of NCBI NO: 15669463 NR Description: 3-isopropylmalate dehydratase (leuD)
  misc_feature (84)..(263): Homolog of NCBI NO: 7994624 NR Description: 3-ISOPROPYLMALATE DEHYDRATASE SMALL SUBUNIT
SIRSLALRPTPDFISPIMAAALSGTAVSTAALLAPIRAPTSAFIRRSQLTCHRLHSLKCRRAGPIVPAAAAAAAGSSSPSSAVFHGECFVVGDNIDTDQIIPAEHLTLVPSKPDEYRKLGSFAFAGLPSAAYPTPFVAPGEESSRYAIIVGGANFGCGSSREHAPVALGAAGARAIVAEGYARIFFRNSVATGEVYPLELTDVGAWKECKTGDVVTVDLANSVFINHTSGKEYKLKPIGDAGPVIEAGGIFAYARKTGMIASKAAA

SEQ ID NO: 10163 - protein, 249 aa, Zea mays subsp. mays
  peptide (1)..(249): Ceres Seq. ID no. 12355550
  misc_feature (1)..(248): Homolog of NCBI NO: 14140144 NR Description: putative protein [Oryza sativa]
  misc_feature (1)..(248): Homolog of NCBI NO: 15224221 NR Description: 3-isopropylmalate dehydratase, small subunit; id: At2g43090.1, supported by cDNA: 31507., supported by cDNA:
  misc_feature (1)..(245): Homolog of NCBI NO: 15231608 NR Description: 3-isopropylmalate dehydratase-like protein (small protein id: At3g58990.1, supported by cDNA: gi_17529161
  misc_feature (1)..(247): Homolog of NCBI NO: 15224222 NR Description: 3-isopropylmalate dehydratase, small subunit; id: At2g43100.1, supported by cDNA: gi_16974632, supported by
  misc_feature (69)..(246): Homolog of NCBI NO: 23041579 NR Description: hypothetical protein [Trichodesmium erythraeum
  misc_feature (66)..(248): Homolog of NCBI NO: 21673448 NR Description: 3-isopropylmalate dehydratase, small subunit,
  misc_feature (69)..(239): Homolog of NCBI NO: 15643321 NR Description: 3-isopropylmalate dehydratase, small subunit
  misc_feature (69)..(239): Homolog of NCBI NO: 23051508 NR Description: hypothetical protein [Methanosarcina barkeri]
  misc_feature (65)..(239): Homolog of NCBI NO: 15669463 NR Description: 3-isopropylmalate dehydratase (leuD)
  misc_feature (67)..(246): Homolog of NCBI NO: 7994624 NR Description: 3-ISOPROPYLMALATE DEHYDRATASE SMALL SUBUNIT
MAAALSGTAVSTAALLAPIRAPTSAFIRRSQLTCHRLHSLKCRRAGPIVPAAAAAAAGSSSPSSAVFHGECFVVGDNIDTDQIIPAEHLTLVPSKPDEYRKLGSFAFAGLPSAAYPTPFVAPGEESSRYAIIVGGANFGCGSSREHAPVALGAAGARAIVAEGYARIFFRNSVATGEVYPLELTDVGAWKECKTGDVVTVDLANSVFINHTSGKEYKLKPIGDAGPVIEAGGIFAYARKTGMIASKAAA

SEQ ID NO: 10164 - DNA, 2064 bp, Zea mays subsp. mays; identical to SEQ ID NO: 9505
  misc_feature (1)..(2064): Ceres Seq. ID no. 13622175
  misc_feature: MA Experiment ID: 108527 Result: Down-regulated in Transcription
  misc_feature: MA Experiment 108527 PARAMETER Experiment Name: Zm_5mM_NO_P Parameter: Age (day) Value: 8
  misc_feature: MA Experiment 108527 PARAMETER Experiment Name: Zm_5mM_NO_P Parameter: Organism Value: Zea mays
  misc_feature: MA Experiment 108527 PARAMETER Experiment Name: Zm_5mM_NO_P Parameter: Plant Line Value: 35A19
  misc_feature: MA Experiment 108527 PARAMETER Experiment Name: Zm_5mM_NO_P Parameter: Timepoint (hr) Value: 6
  misc_feature: MA Experiment 108527 PARAMETER Experiment Name: Zm_5mM_NO_P Parameter: Tissue Value: Aerial
  misc_feature: MA Experiment 108527 PARAMETER Experiment Name: Zm_5mM_NO_P Parameter: Treatment Value: 5mM NO vs. No Treatment
  misc_feature: MA Experiment ID: 108528 Result: Up-regulated in Transcription
  misc_feature: MA Experiment 108528 PARAMETER Experiment Name: Zm_Imbibed_Seeds_P Parameter: Age (day) Value: 5 vs. 2
  misc_feature: MA Experiment 108528 PARAMETER Experiment Name: Zm_Imbibed_Seeds_P Parameter: Organism Value: Zea mays
  misc_feature: MA Experiment 108528 PARAMETER Experiment Name: Zm_Imbibed_Seeds_P Parameter: Plant Line Value: 35A19
  misc_feature: MA Experiment 108528 PARAMETER Experiment Name: Zm_Imbibed_Seeds_P Parameter: Tissue Value: Aerial vs. Embryo
  misc_feature: MA Experiment ID: 108530 Result: Up-regulated in Transcription
  misc_feature: MA Experiment 108530 PARAMETER Experiment Name: Zm_Imbibed_Seeds_P Parameter: Age (day) Value: 6 vs. 2
  misc_feature: MA Experiment 108530 PARAMETER Experiment Name: Zm_Imbibed_Seeds_P Parameter: Organism Value: Zea mays
  misc_feature: MA Experiment 108530 PARAMETER Experiment Name: Zm_Imbibed_Seeds_P Parameter: Plant Line Value: 35A19
  misc_feature: MA Experiment 108530 PARAMETER Experiment Name: Zm_Imbibed_Seeds_P Parameter: Tissue Value: Aerial vs. Embryo
  misc_feature: MA Experiment ID: 108547 Result: Up-regulated in Transcription
  misc_feature: MA Experiment 108547 PARAMETER Experiment Name: Zm_Imbibed_Seeds_P Parameter: Age (day) Value: 4 vs. 2
  misc_feature: MA Experiment 108547 PARAMETER Experiment Name: Zm_Imbibed_Seeds_P Parameter: Organism Value: Zea mays
  misc_feature: MA Experiment 108547 PARAMETER Experiment Name: Zm_Imbibed_Seeds_P Parameter: Plant Line Value: 35A19
  misc_feature: MA Experiment 108547 PARAMETER Experiment Name: Zm_Imbibed_Seeds_P Parameter: Tissue Value: Aerial vs. Embryo
  misc_feature: MA Experiment ID: 20000487 Result: Up-regulated in Transcription
  misc_feature: MA Experiment 20000487 PARAMETER Experiment Name: Zm_50mM_NH4NO3_L_to_H_P Parameter: Organism Value: Zea mays
  misc_feature: MA Experiment 20000487 PARAMETER Experiment Name: Zm_50mM_NH4NO3_L_to_H_P Parameter: Timepoint (hr) Value: 4
  misc_feature: MA Experiment 20000487 PARAMETER Experiment Name: Zm_50mM_NH4NO3_L_to_H_P Parameter: Tissue Value: Leaves
  misc_feature: MA Experiment 20000487 PARAMETER Experiment Name: Zm_50mM_NH4NO3_L_to_H_P Parameter: Treatment Value: 50mM NH4NO3 vs. 100mM Mannitol
  misc_feature: MA Experiment ID: 20000535 Result: Up-regulated in Transcription
  misc_feature: MA Experiment 20000535 PARAMETER Experiment Name: Zm_Hybrid_Seed_Dev_P Parameter: DAP Value: 30 vs. 12
  misc_feature: MA Experiment 20000535 PARAMETER Experiment Name: Zm_Hybrid_Seed_Dev_P Parameter: Organism Value: Zea mays
  misc_feature: MA Experiment 20000535 PARAMETER Experiment Name: Zm_Hybrid_Seed_Dev_P Parameter: Plant Line Value: 35A19
  misc_feature: MA Experiment 20000535 PARAMETER Experiment Name: Zm_Hybrid_Seed_Dev_P Parameter: Tissue Value: Embryo vs. Unfert Floret

SEQ ID NO: 10165 - protein, 562 aa, Zea mays subsp. mays; identical to SEQ ID NO: 9506
  peptide (1)..(562): Ceres Seq. ID no. 13622176
  misc_feature (133)..(408): Pfam Name: Nucleotidyl transferase Pfam Description: Nucleotidyl transferase
  misc_feature (133)..(408): Pfam Name: Nucleotidyl transferase Pfam Description: Nucleotidyl transferase
  misc_feature (133)..(408): Pfam Name: Nucleotidyl transferase Pfam Description: Nucleotidyl transferase
  misc_feature (53)..(562): Homolog of NCBI NO: 13892040 NR Description: ADP-glucose pyrophosphorylase small subunit [Zea
  misc_feature (56)..(562): Homolog of NCBI NO: 13508485 NR Description: ADP-glucose pyrophosphorylase small subunit
  misc_feature (53)..(562): Homolog of NCBI NO: 27464770 NR Description: ADP-glucose pyrophosphorylase small subunit
  misc_feature (56)..(562): Homolog of NCBI NO: 14582768 NR Description: ADP-glucose pyrophosphorylase small subunit [Zea
  misc_feature (53)..(562): Homolog of NCBI NO: 38423972 NR Description: putative glucose-1-phosphate adenylyltransferase
  misc_feature (56)..(562): Homolog of NCBI NO: 13508485 NR Description: ADP-glucose pyrophosphorylase small subunit
  misc_feature (56)..(562): Homolog of NCBI NO: 14582768 NR Description: ADP-glucose pyrophosphorylase small subunit [Zea
  misc_feature (53)..(562): Homolog of NCBI NO: 27464770 NR Description: ADP-glucose pyrophosphorylase small subunit
  misc_feature (56)..(562): Homolog of NCBI NO: 13508485 NR Description: ADP-glucose pyrophosphorylase small subunit
  misc_feature (53)..(562): Homolog of NCBI NO: 13892040 NR Description: ADP-glucose pyrophosphorylase small subunit [Zea
  misc_feature (104)..(562): Homolog of NCBI NO: 17865468 NR Description: Glucose-1-phosphate adenylyltransferase small
  misc_feature (51)..(562): Homolog of NCBI NO: 1237080 NR Description: ADP-glucose pyrophosphorylase [Pisum sativum]
  misc_feature (96)..(562): Homolog of NCBI NO: 15238933 NR Description: glucose-1-phosphate adenylyltransferase, small
  misc_feature (104)..(562): Homolog of NCBI NO: 21666502 NR Description: ADP-glucose pyrophosphorylase small subunit
  misc_feature (56)..(562): Homolog of NCBI NO: 1707940 NR Description: Glucose-1-phosphate adenylyltransferase small
  misc_feature (53)..(562): Homolog of NCBI NO: 38423972 NR Description: putative glucose-1-phosphate adenylyltransferase
  misc_feature (104)..(562): Homolog of NCBI NO: 17865468 NR Description: Glucose-1-phosphate adenylyltransferase small
  misc_feature (51)..(562): Homolog of NCBI NO: 1237080 NR Description: ADP-glucose pyrophosphorylase [Pisum sativum]
  misc_feature (96)..(562): Homolog of NCBI NO: 15238933 NR Description: glucose-1-phosphate adenylyltransferase, small
  misc_feature (104)..(562): Homolog of NCBI NO: 21666502 NR Description: ADP-glucose pyrophosphorylase small subunit
  misc_feature (56)..(562): Homolog of NCBI NO: 1707940 NR Description: Glucose-1-phosphate adenylyltransferase small
  misc_feature (53)..(562): Homolog of NCBI NO: 38423972 NR Description: putative glucose-1-phosphate adenylyltransferase
  misc_feature (56)..(562): Homolog of NCBI NO: 14582768 NR Description: ADP-glucose pyrophosphorylase small subunit [Zea
  misc_feature (53)..(562): Homolog of NCBI NO: 27464770 NR Description: ADP-glucose pyrophosphorylase small subunit
  misc_feature (53)..(562): Homolog of NCBI NO: 13892040 NR Description: ADP-glucose pyrophosphorylase small subunit [Zea
  misc_feature (56)..(562): Homolog of NCBI NO: 1707940 NR Description: Glucose-1-phosphate adenylyltransferase small
  misc_feature (104)..(562): Homolog of NCBI NO: 21666502 NR Description: ADP-glucose pyrophosphorylase small subunit
  misc_feature (96)..(562): Homolog of NCBI NO: 15238933 NR Description: glucose-1-phosphate adenylyltransferase, small
  misc_feature (51)..(562): Homolog of NCBI NO: 1237080 NR Description: ADP-glucose pyrophosphorylase [Pisum sativum]
  misc_feature (104)..(562): Homolog of NCBI NO: 17865468 NR Description: Glucose-1-phosphate adenylyltransferase small

SEQ ID NO: 10166 - protein, 510 aa, Zea mays subsp. mays; identical to SEQ ID NO: 9507
  peptide (1)..(510): Ceres Seq. ID no. 13622177
  misc_feature (81)..(356): Pfam Name: Nucleotidyl transferase Pfam Description: Nucleotidyl transferase
  misc_feature (81)..(356): Pfam Name: Nucleotidyl transferase Pfam Description: Nucleotidyl transferase
  misc_feature (81)..(356): Pfam Name: Nucleotidyl transferase Pfam Description: Nucleotidyl transferase
  misc_feature (1)..(510): Homolog of NCBI NO: 13892040 NR Description: ADP-glucose pyrophosphorylase small subunit [Zea
  misc_feature (4)..(510): Homolog of NCBI NO: 13508485 NR Description: ADP-glucose pyrophosphorylase small subunit
  misc_feature (1)..(510): Homolog of NCBI NO: 27464770 NR Description: ADP-glucose pyrophosphorylase small subunit
  misc_feature (4)..(510): Homolog of NCBI NO: 14582768 NR Description: ADP-glucose pyrophosphorylase small subunit [Zea
  misc_feature (1)..(510): Homolog of NCBI NO: 38423972 NR Description: putative glucose-1-phosphate adenylyltransferase
  misc_feature (4)..(510): Homolog of NCBI NO: 13508485 NR Description: ADP-glucose pyrophosphorylase small subunit
  misc_feature (4)..(510): Homolog of NCBI NO: 14582768 NR Description: ADP-glucose pyrophosphorylase small subunit [Zea
  misc_feature (1)..(510): Homolog of NCBI NO: 27464770 NR Description: ADP-glucose pyrophosphorylase small subunit
  misc_feature (4)..(510): Homolog of NCBI NO: 13508485 NR Description: ADP-glucose pyrophosphorylase small subunit
  misc_feature (1)..(510): Homolog of NCBI NO: 13892040 NR Description: ADP-glucose pyrophosphorylase small subunit [Zea
  misc_feature (52)..(510): Homolog of NCBI NO: 17865468 NR Description: Glucose-1-phosphate adenylyltransferase small
  misc_feature (1)..(510): Homolog of NCBI NO: 1237080 NR Description: ADP-glucose pyrophosphorylase [Pisum sativum]
  misc_feature (44)..(510): Homolog of NCBI NO: 15238933 NR Description: glucose-1-phosphate adenylyltransferase, small
  misc_feature (52)..(510): Homolog of NCBI NO: 21666502 NR Description: ADP-glucose pyrophosphorylase small subunit
  misc_feature (4)..(510): Homolog of NCBI NO: 1707940 NR Description: Glucose-1-phosphate adenylyltransferase small
  misc_feature (1)..(510): Homolog of NCBI NO: 38423972 NR Description: putative glucose-1-phosphate adenylyltransferase
  misc_feature (52)..(510): Homolog of NCBI NO: 17865468 NR Description: Glucose-1-phosphate adenylyltransferase small
  misc_feature (1)..(510): Homolog of NCBI NO: 1237080 NR Description: ADP-glucose pyrophosphorylase [Pisum sativum]
  misc_feature (44)..(510): Homolog of NCBI NO: 15238933 NR Description: glucose-1-phosphate adenylyltransferase, small
  misc_feature (52)..(510): Homolog of NCBI NO: 21666502 NR Description: ADP-glucose pyrophosphorylase small subunit
  misc_feature (4)..(510): Homolog of NCBI NO: 1707940 NR Description: Glucose-1-phosphate adenylyltransferase small
  misc_feature (1)..(510): Homolog of NCBI NO: 38423972 NR Description: putative glucose-1-phosphate adenylyltransferase
  misc_feature (4)..(510): Homolog of NCBI NO: 14582768 NR Description: ADP-glucose pyrophosphorylase small subunit [Zea
  misc_feature (1)..(510): Homolog of NCBI NO: 27464770 NR Description: ADP-glucose pyrophosphorylase small subunit
  misc_feature (1)..(510): Homolog of NCBI NO: 13892040 NR Description: ADP-glucose pyrophosphorylase small subunit [Zea
  misc_feature (4)..(510): Homolog of NCBI NO: 1707940 NR Description: Glucose-1-phosphate adenylyltransferase small
  misc_feature (52)..(510): Homolog of NCBI NO: 21666502 NR Description: ADP-glucose pyrophosphorylase small subunit
  misc_feature (44)..(510): Homolog of NCBI NO: 15238933 NR Description: glucose-1-phosphate adenylyltransferase, small
  misc_feature (1)..(510): Homolog of NCBI NO: 1237080 NR Description: ADP-glucose pyrophosphorylase [Pisum sativum]
  misc_feature (52)..(510): Homolog of NCBI NO: 17865468 NR Description: Glucose-1-phosphate adenylyltransferase small

SEQ ID NO: 10167 - protein, 506 aa, Zea mays subsp. mays; identical to SEQ ID NO: 9508
  peptide (1)..(506): Ceres Seq. ID no. 13622178
  misc_feature (77)..(352): Pfam Name: Nucleotidyl transferase Pfam Description: Nucleotidyl transferase
  misc_feature (77)..(352): Pfam Name: Nucleotidyl transferase Pfam Description: Nucleotidyl transferase
  misc_feature (77)..(352): Pfam Name: Nucleotidyl transferase Pfam Description: Nucleotidyl transferase
  misc_feature (1)..(506): Homolog of NCBI NO: 13892040 NR Description: ADP-glucose pyrophosphorylase small subunit [Zea
  misc_feature (1)..(506): Homolog of NCBI NO: 13508485 NR Description: ADP-glucose pyrophosphorylase small subunit
  misc_feature (1)..(506): Homolog of NCBI NO: 27464770 NR Description: ADP-glucose pyrophosphorylase small subunit
  misc_feature (1)..(506): Homolog of NCBI NO: 14582768 NR Description: ADP-glucose pyrophosphorylase small subunit [Zea
  misc_feature (1)..(506): Homolog of NCBI NO: 38423972 NR Description: putative glucose-1-phosphate adenylyltransferase
  misc_feature (1)..(506): Homolog of NCBI NO: 13508485 NR Description: ADP-glucose pyrophosphorylase small subunit
  misc_feature (1)..(506): Homolog of NCBI NO: 14582768 NR Description: ADP-glucose pyrophosphorylase small subunit [Zea
  misc_feature (1)..(506): Homolog of NCBI NO: 27464770 NR Description: ADP-glucose pyrophosphorylase small subunit
  misc_feature (1)..(506): Homolog of NCBI NO: 13508485 NR Description: ADP-glucose pyrophosphorylase small subunit
  misc_feature (1)..(506): Homolog of NCBI NO: 13892040 NR Description: ADP-glucose pyrophosphorylase small subunit [Zea
  misc_feature (48)..(506): Homolog of NCBI NO: 17865468 NR Description: Glucose-1-phosphate adenylyltransferase small
  misc_feature (1)..(506): Homolog of NCBI NO: 1237080 NR Description: ADP-glucose pyrophosphorylase [Pisum sativum]
  misc_feature (40)..(506): Homolog of NCBI NO: 15238933 NR Description: glucose-1-phosphate adenylyltransferase, small
  misc_feature (48)..(506): Homolog of NCBI NO: 21666502 NR Description: ADP-glucose pyrophosphorylase small subunit
  misc_feature (1)..(506): Homolog of NCBI NO: 1707940 NR Description: Glucose-1-phosphate adenylyltransferase small
  misc_feature (1)..(506): Homolog of NCBI NO: 38423972 NR Description: putative glucose-1-phosphate adenylyltransferase
  misc_feature (48)..(506): Homolog of NCBI NO: 17865468 NR Description: Glucose-1-phosphate adenylyltransferase small
  misc_feature (1)..(506): Homolog of NCBI NO: 1237080 NR Description: ADP-glucose pyrophosphorylase [Pisum sativum]
  misc_feature (40)..(506): Homolog of NCBI NO: 15238933 NR Description: glucose-1-phosphate adenylyltransferase, small
  misc_feature (48)..(506): Homolog of NCBI NO: 21666502 NR Description: ADP-glucose pyrophosphorylase small subunit
  misc_feature (1)..(506): Homolog of NCBI NO: 1707940 NR Description: Glucose-1-phosphate adenylyltransferase small
  misc_feature (1)..(506): Homolog of NCBI NO: 38423972 NR Description: putative glucose-1-phosphate adenylyltransferase
  misc_feature (1)..(506): Homolog of NCBI NO: 14582768 NR Description: ADP-glucose pyrophosphorylase small subunit [Zea
  misc_feature (1)..(506): Homolog of NCBI NO: 27464770 NR Description: ADP-glucose pyrophosphorylase small subunit
  misc_feature (1)..(506): Homolog of NCBI NO: 13892040 NR Description: ADP-glucose pyrophosphorylase small subunit [Zea
  misc_feature (1)..(506): Homolog of NCBI NO: 1707940 NR Description: Glucose-1-phosphate adenylyltransferase small
  misc_feature (48)..(506): Homolog of NCBI NO: 21666502 NR Description: ADP-glucose pyrophosphorylase small subunit
  misc_feature (40)..(506): Homolog of NCBI NO: 15238933 NR Description: glucose-1-phosphate adenylyltransferase, small
  misc_feature (1)..(506): Homolog of NCBI NO: 1237080 NR Description: ADP-glucose pyrophosphorylase [Pisum sativum]
  misc_feature (48)..(506): Homolog of NCBI NO: 17865468 NR Description: Glucose-1-phosphate adenylyltransferase small

SEQ ID NO: 10168 - DNA, 1173 bp, Zea mays subsp. mays
  misc_feature (1)..(1173): Ceres Seq. ID no. 12355551
  misc_feature: MA Experiment ID: 108528 Result: Up-regulated in Transcription
  misc_feature: MA Experiment 108528 PARAMETER Experiment Name: Zm_Imbibed_Seeds_P Parameter: Age (day) Value: 5 vs. 2
  misc_feature: MA Experiment 108528 PARAMETER Experiment Name: Zm_Imbibed_Seeds_P Parameter: Organism Value: Zea mays
  misc_feature: MA Experiment 108528 PARAMETER Experiment Name: Zm_Imbibed_Seeds_P Parameter: Plant Line Value: 35A19
  misc_feature: MA Experiment 108528 PARAMETER Experiment Name: Zm_Imbibed_Seeds_P Parameter: Tissue Value: Aerial vs. Embryo
  misc_feature: MA Experiment ID: 108545 Result: Up-regulated in Transcription
  misc_feature: MA Experiment 108545 PARAMETER Experiment Name: Zm_Imbibed_Seeds_P Parameter: Age (day) Value: 3 vs. 2
  misc_feature: MA Experiment 108545 PARAMETER Experiment Name: Zm_Imbibed_Seeds_P Parameter: Organism Value: Zea mays
  misc_feature: MA Experiment 108545 PARAMETER Experiment Name: Zm_Imbibed_Seeds_P Parameter: Plant Line Value: 35A19
  misc_feature: MA Experiment 108545 PARAMETER Experiment Name: Zm_Imbibed_Seeds_P Parameter: Tissue Value: Aerial vs. Embryo
acactacaccgtaaccgtcgccggaatcgatcgacccaaagctccccttagagcccgagctctatccaacccacgaacgggatcccgatgcccatggcggcctcggttcttgtcgccgcaccggcggtctcgcccccgctgacgtggcggagatgggctcctcttctcgccgcgtcacatccacgggcgaacccgcctcccgcactgcgcctgcgggcgcccgctcctcctctccgggcctcctccgttccccgcgattcctgcgccggagccgccgtccggaggacgccgtgtgcggcggcggcggcattaggtggaggtgtgaaggcggagtccacggagcgggaggcgcccgatcgggatgctctgaagcgggtggcgctgctcgcgcttggctgctgcgctgcagccgccgcgctcggctgcggcgcggcgcgggcagcggcggaggactccatcaaggcgtcaggattcgggctacgggtggcggagtcgctgcggaggctcggatggcccgacgacaccgtcgtgttcgcgctcgcgacgctgccggtgatcgagctgcggggggcgatccccgttgggtattggctgcggctccatccagtccgcctcaccatcctatccgttcttgggaacatggtgcctgtaccattcatcatcctctacctgaagaaactcgcaacatttttgtctcagaaaagttcgtccgcgactcgaattatggacctcctctttgagcgggcacggcgcaaggctgctcctgttgaggaattccagtggctcggcttgatgctgtttgttgctgttccattcccaggcacgggagcgtggacaggggccttcattgcatctgtactaggcatgccgttctggtcaggttttacagcaaatttcgtgggagtcgtccttgcagggctgctggtgaacttgctcatgaatcttggcctaaaatacgccattgtcactggagtagttttgttctttgtttcaaccgtcatgtggagtgttcttcgttcccttaagaagtccgttaatgtcaagtgatctagtagtctttatcaaactgttcctaatcccttcagagttcagccttgcgtaggaagcttagttgtgtaattttaagtggagctttcagcttccaggtggatctacaagagagaataacactcc

SEQ ID NO: 10169 - protein, 319 aa, Zea mays subsp. mays
  peptide (1)..(319): Ceres Seq. ID no. 12355552
  misc_feature (4)..(319): Homolog of NCBI NO: 34897152 NR Description: unknown protein [Oryza sativa (japonica
  misc_feature (114)..(316): Homolog of NCBI NO: 15227004 NR Description: putative transport protein; protein id: supported by cDNA: 26825. [Arabidopsis thaliana]
  misc_feature (154)..(288): Homolog of NCBI NO: 11499286 NR Description: small multidrug export protein (qacE) fulgidus] >gi|7483962|pir||G69461 small multidrug export protein
  misc_feature (143)..(295): Homolog of NCBI NO: 21227925 NR Description: putative small multi-drug export protein
  misc_feature (148)..(280): Homolog of NCBI NO: 28212098 NR Description: putative small multi-drug export protein
  misc_feature (154)..(282): Homolog of NCBI NO: 15613797 NR Description: small multidrug export related protein [Bacillus >gi|25494717|pir||B83804 small multidrug export related protein
  misc_feature (143)..(295): Homolog of NCBI NO: 23052254 NR Description: hypothetical protein [Methanosarcina barkeri]
  misc_feature (147)..(287): Homolog of NCBI NO: 22537969 NR Description: conserved hypothetical protein [Streptococcus NEM316] >gi|22534870|gb|AAN00693.1|AE014275_1 conserved
  misc_feature (148)..(288): Homolog of NCBI NO: 18978147 NR Description: putative small multidrug export protein; (qacE) furiosus DSM 3638] >gi|18893950|gb|AAL81899.1| putative small
  misc_feature (148)..(279): Homolog of NCBI NO: 14591427 NR Description: hypothetical protein [Pyrococcus horikoshii]
MPMAASVLVAAPAVSPPLTWRRWAPLLAASHPRANPPPALRLRAPAPPLRASSVPRDSCAGAAVRRTPCAAAAALGGGVKAESTEREAPDRDALKRVALLALGCCAAAAALGCGAARAAAEDSIKASGFGLRVAESLRRLGWPDDTVVFALATLPVIELRGAIPVGYWLRLHPVRLTILSVLGNMVPVPFIILYLKKLATFLSQKSSSATRIMDLLFERARRKAAPVEEFQWLGLMLFVAVPFPGTGAWTGAFIASVLGMPFWSGFTANFVGVVLAGLLVNLLMNLGLKYAIVTGVVLFFVSTVMWSVLRSLKKSVNVK

SEQ ID NO: 10170 - protein, 317 aa, Zea mays subsp. mays
  peptide (1)..(317): Ceres Seq. ID no. 12355553
  misc_feature (2)..(317): Homolog of NCBI NO: 34897152 NR Description: unknown protein [Oryza sativa (japonica
  misc_feature (112)..(314): Homolog of NCBI NO: 15227004 NR Description: putative transport protein; protein id: supported by cDNA: 26825. [Arabidopsis thaliana]
  misc_feature (152)..(286): Homolog of NCBI NO: 11499286 NR Description: small multidrug export protein (qacE) fulgidus] >gi|7483962|pir||G69461 small multidrug export protein
  misc_feature (141)..(293): Homolog of NCBI NO: 21227925 NR Description: putative small multi-drug export protein
  misc_feature (146)..(278): Homolog of NCBI NO: 28212098 NR Description: putative small multi-drug export protein
  misc_feature (152)..(280): Homolog of NCBI NO: 15613797 NR Description: small multidrug export related protein [Bacillus >gi|25494717|pir||B83804 small multidrug export related protein
  misc_feature (141)..(293): Homolog of NCBI NO: 23052254 NR Description: hypothetical protein [Methanosarcina barkeri]
  misc_feature (145)..(285): Homolog of NCBI NO: 22537969 NR Description: conserved hypothetical protein [Streptococcus NEM316] >gi|22534870|gb|AAN00693.1|AE014275_1 conserved
  misc_feature (146)..(286): Homolog of NCBI NO: 18978147 NR Description: putative small multidrug export protein; (qacE) furiosus DSM 3638] >gi|18893950|gb|AAL81899.1| putative small
  misc_feature (146)..(277): Homolog of NCBI NO: 14591427 NR Description: hypothetical protein [Pyrococcus horikoshii]
MAASVLVAAPAVSPPLTWRRWAPLLAASHPRANPPPALRLRAPAPPLRASSVPRDSCAGAAVRRTPCAAAAALGGGVKAESTEREAPDRDALKRVALLALGCCAAAAALGCGAARAAAEDSIKASGFGLRVAESLRRLGWPDDTVVFALATLPVIELRGAIPVGYWLRLHPVRLTILSVLGNMVPVPFIILYLKKLATFLSQKSSSATRIMDLLFERARRKAAPVEEFQWLGLMLFVAVPFPGTGAWTGAFIASVLGMPFWSGFTANFVGVVLAGLLVNLLMNLGLKYAIVTGVVLFFVSTVMWSVLRSLKKSVNVK

SEQ ID NO: 10171 - protein, 195 aa, Zea mays subsp. mays
  peptide (1)..(195): Ceres Seq. ID no. 12355554
MGSSSRRVTSTGEPASRTAPAGARSSSPGLLRSPRFLRRSRRPEDAVCGGGGIRWRCEGGVHGAGGARSGCSEAGGAARAWLLRCSRRARLRRGAGSGGGLHQGVRIRATGGGVAAEARMARRHRRVRARDAAGDRAAGGDPRWVLAAAPSSPPHHPIRSWEHGACTIHHPLPEETRNIFVSEKFVRDSNYGPPL

SEQ ID NO: 10172 - DNA, 789 bp, Zea mays subsp. mays; identical to SEQ ID NO: 1699
  misc_feature (1)..(789): Ceres Seq. ID no. 12355957
  misc_feature: MA Experiment ID: 108528 Result: Down-regulated in Transcription
  misc_feature: MA Experiment 108528 PARAMETER Experiment Name: Zm_Imbibed_Seeds_P Parameter: Age (day) Value: 5 vs. 2
  misc_feature: MA Experiment 108528 PARAMETER Experiment Name: Zm_Imbibed_Seeds_P Parameter: Organism Value: Zea mays
  misc_feature: MA Experiment 108528 PARAMETER Experiment Name: Zm_Imbibed_Seeds_P Parameter: Plant Line Value: 35A19
  misc_feature: MA Experiment 108528 PARAMETER Experiment Name: Zm_Imbibed_Seeds_P Parameter: Tissue Value: Aerial vs. Embryo
  misc_feature: MA Experiment ID: 108530 Result: Down-regulated in Transcription
  misc_feature: MA Experiment 108530 PARAMETER Experiment Name: Zm_Imbibed_Seeds_P Parameter: Age (day) Value: 6 vs. 2
  misc_feature: MA Experiment 108530 PARAMETER Experiment Name: Zm_Imbibed_Seeds_P Parameter: Organism Value: Zea mays
  misc_feature: MA Experiment 108530 PARAMETER Experiment Name: Zm_Imbibed_Seeds_P Parameter: Plant Line Value: 35A19
  misc_feature: MA Experiment 108530 PARAMETER Experiment Name: Zm_Imbibed_Seeds_P Parameter: Tissue Value: Aerial vs. Embryo
  misc_feature: MA Experiment ID: 108535 Result: Up-regulated in Transcription
  misc_feature: MA Experiment 108535 PARAMETER Experiment Name: Zm_Meristem_P Parameter: Age (day) Value: 8
  misc_feature: MA Experiment 108535 PARAMETER Experiment Name: Zm_Meristem_P Parameter: Organism Value: Zea mays
  misc_feature: MA Experiment 108535 PARAMETER Experiment Name: Zm_Meristem_P Parameter: Plant Line Value: 35A19
  misc_feature: MA Experiment 108535 PARAMETER Experiment Name: Zm_Meristem_P Parameter: Tissue Value: Root Meristem vs. Above Root Meristem
  misc_feature: MA Experiment ID: 20000488 Result: Up-regulated in Transcription
  misc_feature: MA Experiment 20000488 PARAMETER Experiment Name: Zm_50mM_NH4NO3_L_to_H_P Parameter: Organism Value: Zea mays
  misc_feature: MA Experiment 20000488 PARAMETER Experiment Name: Zm_50mM_NH4NO3_L_to_H_P Parameter: Timepoint (hr) Value: 8
  misc_feature: MA Experiment 20000488 PARAMETER Experiment Name: Zm_50mM_NH4NO3_L_to_H_P Parameter: Tissue Value: Leaves
  misc_feature: MA Experiment 20000488 PARAMETER Experiment Name: Zm_50mM_NH4NO3_L_to_H_P Parameter: Treatment Value: 50mM NH4NO3 vs. 100mM Mannitol
  misc_feature: MA Experiment ID: 20001606 Result: Up-regulated in Transcription
  misc_feature: MA Experiment 20001606 PARAMETER Experiment Name: Zm_50ppm_KNO3_L-to-H_P Parameter: Age (day) Value: 19
  misc_feature: MA Experiment 20001606 PARAMETER Experiment Name: Zm_50ppm_KNO3_L-to-H_P Parameter: Organism Value: Zea mays
  misc_feature: MA Experiment 20001606 PARAMETER Experiment Name: Zm_50ppm_KNO3_L-to-H_P Parameter: Plant Line Value: 35A19
  misc_feature: MA Experiment 20001606 PARAMETER Experiment Name: Zm_50ppm_KNO3_L-to-H_P Parameter: Timepoint (hr) Value: 8
  misc_feature: MA Experiment 20001606 PARAMETER Experiment Name: Zm_50ppm_KNO3_L-to-H_P Parameter: Tissue Value: Shoots
  misc_feature: MA Experiment 20001606 PARAMETER Experiment Name: Zm_50ppm_KNO3_L-to-H_P Parameter: Treatment Value: 50ppm KNO3 vs. 50ppm KCl
  misc_feature: MA Experiment ID: 20001612 Result: Up-regulated in Transcription
  misc_feature: MA Experiment 20001612 PARAMETER Experiment Name: Zm_50ppm_KNO3_L-to-H_P Parameter: Age (day) Value: 19
  misc_feature: MA Experiment 20001612 PARAMETER Experiment Name: Zm_50ppm_KNO3_L-to-H_P Parameter: Organism Value: Zea mays
  misc_feature: MA Experiment 20001612 PARAMETER Experiment Name: Zm_50ppm_KNO3_L-to-H_P Parameter: Plant Line Value: 35A19
  misc_feature: MA Experiment 20001612 PARAMETER Experiment Name: Zm_50ppm_KNO3_L-to-H_P Parameter: Timepoint (hr) Value: 8
  misc_feature: MA Experiment 20001612 PARAMETER Experiment Name: Zm_50ppm_KNO3_L-to-H_P Parameter: Tissue Value: Roots
  misc_feature: MA Experiment 20001612 PARAMETER Experiment Name: Zm_50ppm_KNO3_L-to-H_P Parameter: Treatment Value: 50ppm KNO3 vs. 50ppm KCl

SEQ ID NO: 10173 - protein, 161 aa, Zea mays subsp. mays; identical to SEQ ID NO: 1700
  peptide (1)..(161): Ceres Seq. ID no. 12355958
  misc_feature (3)..(73): Pfam Name: Ribosomal protein L24e Pfam Description: Ribosomal protein L24e
  misc_feature (3)..(73): Pfam Name: Ribosomal protein L24e Pfam Description: Ribosomal protein L24e
  misc_feature (3)..(73): Pfam Name: Ribosomal protein L24e Pfam Description: Ribosomal protein L24e
  misc_feature (1)..(161): Homolog of NCBI NO: 1710521 NR Description: 60S RIBOSOMAL PROTEIN L24 >gi|7440778|pir||T06178
  misc_feature (4)..(161): Homolog of NCBI NO: 34900364 NR Description: putative 60S ribosomal protein L24 [Oryza sativa
  misc_feature (1)..(160): Homolog of NCBI NO: 6094040 NR Description: 60S ribosomal protein L24
  misc_feature (1)..(156): Homolog of NCBI NO: 10180025 NR Description: 60S ribosomal protein L24 [Prunus avium]
  misc_feature (1)..(161): Homolog of NCBI NO: 18404176 NR Description: 60S ribosomal protein L24; protein id: supported by cDNA: 14564., supported by cDNA: gi_16604375, by cDNA: gi_18252830 [Arabidopsis thaliana]
  misc_feature (4)..(161): Homolog of NCBI NO: 34900364 NR Description: putative 60S ribosomal protein L24 [Oryza sativa
  misc_feature (1)..(156): Homolog of NCBI NO: 10180025 NR Description: 60S ribosomal protein L24 [Prunus avium]
  misc_feature (1)..(160): Homolog of NCBI NO: 6094040 NR Description: 60S ribosomal protein L24
  misc_feature (4)..(161): Homolog of NCBI NO: 34900364 NR Description: putative 60S ribosomal protein L24 [Oryza sativa
  misc_feature (1)..(161): Homolog of NCBI NO: 1710521 NR Description: 60S RIBOSOMAL PROTEIN L24 >gi|7440778|pir||T06178
  misc_feature (10)..(154): Homolog of NCBI NO: 40741063 NR Description: conserved hypothetical protein [Aspergillus
  misc_feature (3)..(150): Homolog of NCBI NO: 19115030 NR Description: 60S ribosomal protein L24 [Schizosaccharomyces
  misc_feature (3)..(150): Homolog of NCBI NO: 19075214 NR Description: 60s ribosomal protein L24 [Schizosaccharomyces
  misc_feature (5)..(161): Homolog of NCBI NO: 25295112 NR Description: 60S ribosomal protein L24 [imported] -
  misc_feature (1)..(161): Homolog of NCBI NO: 15231730 NR Description: 60S ribosomal protein - like; protein id: supported by cDNA: gi_16648705, supported by cDNA: gi_20260561 thaliana] >gi|26454659|sp|P38666|RL24_ARATH 60S ribosomal protein
  misc_feature (1)..(161): Homolog of NCBI NO: 18404176 NR Description: 60S ribosomal protein L24; protein id: supported by cDNA: 14564., supported by cDNA: gi_16604375, by cDNA: gi_18252830 [Arabidopsis thaliana]
  misc_feature (10)..(154): Homolog of NCBI NO: 40741063 NR Description: conserved hypothetical protein [Aspergillus
  misc_feature (3)..(150): Homolog of NCBI NO: 19115030 NR Description: 60S ribosomal protein L24 [Schizosaccharomyces
  misc_feature (3)..(150): Homolog of NCBI NO: 19075214 NR Description: 60s ribosomal protein L24 [Schizosaccharomyces
  misc_feature (5)..(161): Homolog of NCBI NO: 25295112 NR Description: 60S ribosomal protein L24 [imported] -
  misc_feature (1)..(161): Homolog of NCBI NO: 15231730 NR Description: 60S ribosomal protein - like; protein id: supported by cDNA: gi_16648705, supported by cDNA: gi_20260561 thaliana] >gi|26454659|sp|P38666|RL24_ARATH 60S ribosomal protein
  misc_feature (1)..(161): Homolog of NCBI NO: 18404176 NR Description: 60S ribosomal protein L24; protein id: supported by cDNA: 14564., supported by cDNA: gi_16604375, by cDNA: gi_18252830 [Arabidopsis thaliana]
  misc_feature (1)..(156): Homolog of NCBI NO: 10180025 NR Description: 60S ribosomal protein L24 [Prunus avium]
  misc_feature (1)..(160): Homolog of NCBI NO: 6094040 NR Description: 60S ribosomal protein L24
  misc_feature (1)..(161): Homolog of NCBI NO: 1710521 NR Description: 60S RIBOSOMAL PROTEIN L24 >gi|7440778|pir||T06178
  misc_feature (1)..(161): Homolog of NCBI NO: 15231730 NR Description: 60S ribosomal protein - like; protein id: supported by cDNA: gi_16648705, supported by cDNA: gi_20260561 thaliana] >gi|26454659|sp|P38666|RL24_ARATH 60S ribosomal protein
  misc_feature (5)..(161): Homolog of NCBI NO: 25295112 NR Description: 60S ribosomal protein L24 [imported] -
  misc_feature (3)..(150): Homolog of NCBI NO: 19075214 NR Description: 60s ribosomal protein L24 [Schizosaccharomyces
  misc_feature (3)..(150): Homolog of NCBI NO: 19115030 NR Description: 60S ribosomal protein L24 [Schizosaccharomyces
  misc_feature (10)..(154): Homolog of NCBI NO: 40741063 NR Description: conserved hypothetical protein [Aspergillus

SEQ ID NO: 10174 - protein, 106 aa, Zea mays subsp. mays; identical to SEQ ID NO: 1701
  peptide (1)..(106): Ceres Seq. ID no. 12355959
  misc_feature (1)..(99): Homolog of NCBI NO: 40741063 NR Description: conserved hypothetical protein [Aspergillus
  misc_feature (1)..(106): Homolog of NCBI NO: 1710521 NR Description: 60S RIBOSOMAL PROTEIN L24 >gi|7440778|pir||T06178
  misc_feature (1)..(106): Homolog of NCBI NO: 34900364 NR Description: putative 60S ribosomal protein L24 [Oryza sativa
  misc_feature (1)..(105): Homolog of NCBI NO: 6094040 NR Description: 60S ribosomal protein L24
  misc_feature (1)..(101): Homolog of NCBI NO: 10180025 NR Description: 60S ribosomal protein L24 [Prunus avium]
  misc_feature (1)..(106): Homolog of NCBI NO: 18404176 NR Description: 60S ribosomal protein L24; protein id: supported by cDNA: 14564., supported by cDNA: gi_16604375, by cDNA: gi_18252830 [Arabidopsis thaliana]
  misc_feature (1)..(106): Homolog of NCBI NO: 15231730 NR Description: 60S ribosomal protein - like; protein id: supported by cDNA: gi_16648705, supported by cDNA: gi_20260561 thaliana] >gi|26454659|sp|P38666|RL24_ARATH 60S ribosomal protein
  misc_feature (1)..(106): Homolog of NCBI NO: 25295112 NR Description: 60S ribosomal protein L24 [imported] -
  misc_feature (1)..(95): Homolog of NCBI NO: 19075214 NR Description: 60s ribosomal protein L24 [Schizosaccharomyces
  misc_feature (1)..(95): Homolog of NCBI NO: 19115030 NR Description: 60S ribosomal protein L24 [Schizosaccharomyces
  misc_feature (1)..(106): Homolog of NCBI NO: 1710521 NR Description: 60S RIBOSOMAL PROTEIN L24 >gi|7440778|pir||T06178
  misc_feature (1)..(106): Homolog of NCBI NO: 34900364 NR Description: putative 60S ribosomal protein L24 [Oryza sativa
  misc_feature (1)..(105): Homolog of NCBI NO: 6094040 NR Description: 60S ribosomal protein L24
  misc_feature (1)..(101): Homolog of NCBI NO: 10180025 NR Description: 60S ribosomal protein L24 [Prunus avium]
  misc_feature (1)..(106): Homolog of NCBI NO: 18404176 NR Description: 60S ribosomal protein L24; protein id: supported by cDNA: 14564., supported by cDNA: gi_16604375, by cDNA: gi_18252830 [Arabidopsis thaliana]
  misc_feature (1)..(106): Homolog of NCBI NO: 15231730 NR Description: 60S ribosomal protein - like; protein id: supported by cDNA: gi_16648705, supported by cDNA: gi_20260561 thaliana] >gi|26454659|sp|P38666|RL24_ARATH 60S ribosomal protein
  misc_feature (1)..(106): Homolog of NCBI NO: 25295112 NR Description: 60S ribosomal protein L24 [imported] -
  misc_feature (1)..(95): Homolog of NCBI NO: 19075214 NR Description: 60s ribosomal protein L24 [Schizosaccharomyces
  misc_feature (1)..(95): Homolog of NCBI NO: 19115030 NR Description: 60S ribosomal protein L24 [Schizosaccharomyces
  misc_feature (1)..(99): Homolog of NCBI NO: 40741063 NR Description: conserved hypothetical protein [Aspergillus
  misc_feature (1)..(106): Homolog of NCBI NO: 1710521 NR Description: 60S RIBOSOMAL PROTEIN L24 >gi|7440778|pir||T06178
  misc_feature (1)..(106): Homolog of NCBI NO: 34900364 NR Description: putative 60S ribosomal protein L24 [Oryza sativa
  misc_feature (1)..(105): Homolog of NCBI NO: 6094040 NR Description: 60S ribosomal protein L24
  misc_feature (1)..(101): Homolog of NCBI NO: 10180025 NR Description: 60S ribosomal protein L24 [Prunus avium]
  misc_feature (1)..(106): Homolog of NCBI NO: 18404176 NR Description: 60S ribosomal protein L24; protein id: supported by cDNA: 14564., supported by cDNA: gi_16604375, by cDNA: gi_18252830 [Arabidopsis thaliana]
  misc_feature (1)..(106): Homolog of NCBI NO: 15231730 NR Description: 60S ribosomal protein - like; protein id: supported by cDNA: gi_16648705, supported by cDNA: gi_20260561 thaliana] >gi|26454659|sp|P38666|RL24_ARATH 60S ribosomal protein
  misc_feature (1)..(106): Homolog of NCBI NO: 25295112 NR Description: 60S ribosomal protein L24 [imported] -
  misc_feature (1)..(95): Homolog of NCBI NO: 19075214 NR Description: 60s ribosomal protein L24 [Schizosaccharomyces
  misc_feature (1)..(95): Homolog of NCBI NO: 19115030 NR Description: 60S ribosomal protein L24 [Schizosaccharomyces
  misc_feature (1)..(99): Homolog of NCBI NO: 40741063 NR Description: conserved hypothetical protein [Aspergillus

SEQ ID NO: 10175 - DNA, 695 bp, Zea mays subsp. mays
  misc_feature (1)..(695): Ceres Seq. ID no. 12342067
  misc_feature: MA Experiment ID: 108528 Result: Up-regulated in Transcription
  misc_feature: MA Experiment 108528 PARAMETER Experiment Name: Zm_Imbibed_Seeds_P Parameter: Age (day) Value: 5 vs. 2
  misc_feature: MA Experiment 108528 PARAMETER Experiment Name: Zm_Imbibed_Seeds_P Parameter: Organism Value: Zea mays
  misc_feature: MA Experiment 108528 PARAMETER Experiment Name: Zm_Imbibed_Seeds_P Parameter: Plant Line Value: 35A19
  misc_feature: MA Experiment 108528 PARAMETER Experiment Name: Zm_Imbibed_Seeds_P Parameter: Tissue Value: Aerial vs. Embryo
  misc_feature: MA Experiment ID: 108529 Result: Up-regulated in Transcription
  misc_feature: MA Experiment 108529 PARAMETER Experiment Name: Zm_Imbibed_Seeds_P Parameter: Age (day) Value: 5 vs. 2
  misc_feature: MA Experiment 108529 PARAMETER Experiment Name: Zm_Imbibed_Seeds_P Parameter: Organism Value: Zea mays
  misc_feature: MA Experiment 108529 PARAMETER Experiment Name: Zm_Imbibed_Seeds_P Parameter: Plant Line Value: 35A19
  misc_feature: MA Experiment 108529 PARAMETER Experiment Name: Zm_Imbibed_Seeds_P Parameter: Tissue Value: Roots vs. Embryo
  misc_feature: MA Experiment ID: 108530 Result: Up-regulated in Transcription
  misc_feature: MA Experiment 108530 PARAMETER Experiment Name: Zm_Imbibed_Seeds_P Parameter: Age (day) Value: 6 vs. 2
  misc_feature: MA Experiment 108530 PARAMETER Experiment Name: Zm_Imbibed_Seeds_P Parameter: Organism Value: Zea mays
  misc_feature: MA Experiment 108530 PARAMETER Experiment Name: Zm_Imbibed_Seeds_P Parameter: Plant Line Value: 35A19
  misc_feature: MA Experiment 108530 PARAMETER Experiment Name: Zm_Imbibed_Seeds_P Parameter: Tissue Value: Aerial vs. Embryo
  misc_feature: MA Experiment ID: 108534 Result: Up-regulated in Transcription
  misc_feature: MA Experiment 108534 PARAMETER Experiment Name: Zm_4deg_Cold_P Parameter: Age (hr) Value: 8
  misc_feature: MA Experiment 108534 PARAMETER Experiment Name: Zm_4deg_Cold_P Parameter: Organism Value: Zea mays
  misc_feature: MA Experiment 108534 PARAMETER Experiment Name: Zm_4deg_Cold_P Parameter: Plant Line Value: 35A19
  misc_feature: MA Experiment 108534 PARAMETER Experiment Name: Zm_4deg_Cold_P Parameter: Temperature (deg C) Value: 4 vs. 22
  misc_feature: MA Experiment 108534 PARAMETER Experiment Name: Zm_4deg_Cold_P Parameter: Timepoint (hr) Value: 6
  misc_feature: MA Experiment 108534 PARAMETER Experiment Name: Zm_4deg_Cold_P Parameter: Tissue Value: Aerial
  misc_feature: MA Experiment ID: 108535 Result: Down-regulated in Transcription
  misc_feature: MA Experiment 108535 PARAMETER Experiment Name: Zm_Meristem_P Parameter: Age (day) Value: 8
  misc_feature: MA Experiment 108535 PARAMETER Experiment Name: Zm_Meristem_P Parameter: Organism Value: Zea mays
  misc_feature: MA Experiment 108535 PARAMETER Experiment Name: Zm_Meristem_P Parameter: Plant Line Value: 35A19
  misc_feature: MA Experiment 108535 PARAMETER Experiment Name: Zm_Meristem_P Parameter: Tissue Value: Root Meristem vs. Above Root Meristem
  misc_feature: MA Experiment ID: 108543 Result: Up-regulated in Transcription
  misc_feature: MA Experiment ID: 108546 Result: Up-regulated in Transcription
  misc_feature: MA Experiment 108546 PARAMETER Experiment Name: Zm_Imbibed_Seeds_P Parameter: Age (day) Value: 3 vs. 2
  misc_feature: MA Experiment 108546 PARAMETER Experiment Name: Zm_Imbibed_Seeds_P Parameter: Organism Value: Zea mays
  misc_feature: MA Experiment 108546 PARAMETER Experiment Name: Zm_Imbibed_Seeds_P Parameter: Plant Line Value: 35A19
  misc_feature: MA Experiment 108546 PARAMETER Experiment Name: Zm_Imbibed_Seeds_P Parameter: Tissue Value: Roots vs. Embryo
  misc_feature: MA Experiment ID: 20000477 Result: Down-regulated in Transcription
  misc_feature: MA Experiment 20000477 PARAMETER Experiment Name: Zm_5mM_SA_P Parameter: Age (day) Value: 10
  misc_feature: MA Experiment 20000477 PARAMETER Experiment Name: Zm_5mM_SA_P Parameter: Organism Value: Zea mays
  misc_feature: MA Experiment 20000477 PARAMETER Experiment Name: Zm_5mM_SA_P Parameter: Plant Line Value: 35A19
  misc_feature: MA Experiment 20000477 PARAMETER Experiment Name: Zm_5mM_SA_P Parameter: Timepoint (hr) Value: 48
  misc_feature: MA Experiment 20000477 PARAMETER Experiment Name: Zm_5mM_SA_P Parameter: Tissue Value: Aerial
  misc_feature: MA Experiment 20000477 PARAMETER Experiment Name: Zm_5mM_SA_P Parameter: Treatment Value: 5mM SA vs. No Treatment
  misc_feature: MA Experiment ID: 20000478 Result: Down-regulated in Transcription
  misc_feature: MA Experiment 20000478 PARAMETER Experiment Name: Zm_5mM_SA_P Parameter: Age (day) Value: 11
  misc_feature: MA Experiment 20000478 PARAMETER Experiment Name: Zm_5mM_SA_P Parameter: Organism Value: Zea mays
  misc_feature: MA Experiment 20000478 PARAMETER Experiment Name: Zm_5mM_SA_P Parameter: Plant Line Value: 35A19
  misc_feature: MA Experiment 20000478 PARAMETER Experiment Name: Zm_5mM_SA_P Parameter: Timepoint (hr) Value: 72
  misc_feature: MA Experiment 20000478 PARAMETER Experiment Name: Zm_5mM_SA_P Parameter: Tissue Value: Aerial
  misc_feature: MA Experiment 20000478 PARAMETER Experiment Name: Zm_5mM_SA_P Parameter: Treatment Value: 5mM SA vs. No Treatment
  misc_feature: MA Experiment ID: 20000479 Result: Down-regulated in Transcription
  misc_feature: MA Experiment 20000479 PARAMETER Experiment Name: Zm_Drought_P Parameter: Age (day) Value: 10
  misc_feature: MA Experiment 20000479 PARAMETER Experiment Name: Zm_Drought_P Parameter: Organism Value: Zea mays
  misc_feature: MA Experiment 20000479 PARAMETER Experiment Name: Zm_Drought_P Parameter: Plant Line Value: 35A19
  misc_feature: MA Experiment 20000479 PARAMETER Experiment Name: Zm_Drought_P Parameter: Timepoint (hr) Value: 48
  misc_feature: MA Experiment 20000479 PARAMETER Experiment Name: Zm_Drought_P Parameter: Tissue Value: Aerial
  misc_feature: MA Experiment 20000479 PARAMETER Experiment Name: Zm_Drought_P Parameter: Treatment Value: Drought vs. No Drought
  misc_feature: MA Experiment ID: 20000480 Result: Down-regulated in Transcription
  misc_feature: MA Experiment 20000480 PARAMETER Experiment Name: Zm_Drought_P Parameter: Age (day) Value: 11
  misc_feature: MA Experiment 20000480 PARAMETER Experiment Name: Zm_Drought_P Parameter: Organism Value: Zea mays
  misc_feature: MA Experiment 20000480 PARAMETER Experiment Name: Zm_Drought_P Parameter: Plant Line Value: 35A19
  misc_feature: MA Experiment 20000480 PARAMETER Experiment Name: Zm_Drought_P Parameter: Timepoint (hr) Value: 72
  misc_feature: MA Experiment 20000480 PARAMETER Experiment Name: Zm_Drought_P Parameter: Tissue Value: Aerial
  misc_feature: MA Experiment 20000480 PARAMETER Experiment Name: Zm_Drought_P Parameter: Treatment Value: Drought vs. No Drought
  misc_feature: MA Experiment ID: 20000492 Result: Down-regulated in Transcription
  misc_feature: MA Experiment 20000492 PARAMETER Experiment Name: Zm_Hybrid_Seed_Dev_P Parameter: DAP Value: 12
  misc_feature: MA Experiment 20000492 PARAMETER Experiment Name: Zm_Hybrid_Seed_Dev_P Parameter: Organism Value: Zea mays
  misc_feature: MA Experiment 20000492 PARAMETER Experiment Name: Zm_Hybrid_Seed_Dev_P Parameter: Plant Line Value: 35A19
  misc_feature: MA Experiment 20000492 PARAMETER Experiment Name: Zm_Hybrid_Seed_Dev_P Parameter: Tissue Value: Fert Kernel vs. Unfert Floret
  misc_feature: MA Experiment ID: 20000534 Result: Down-regulated in Transcription
  misc_feature: MA Experiment 20000534 PARAMETER Experiment Name: Zm_Hybrid_Pollen_P Parameter: Age (day) Value: 8
  misc_feature: MA Experiment 20000534 PARAMETER Experiment Name: Zm_Hybrid_Pollen_P Parameter: Organism Value: Zea mays
  misc_feature: MA Experiment 20000534 PARAMETER Experiment Name: Zm_Hybrid_Pollen_P Parameter: Plant Line Value: 35A19
  misc_feature: MA Experiment 20000534 PARAMETER Experiment Name: Zm_Hybrid_Pollen_P Parameter: Tissue Value: Pollen vs. Aerial
aaaaacctcccacgcacattcttggcagctactctactcaatggcgctgtcctcctccggccacccggcgacgacccgcctgctcttctcgcttctgctcgtgggctcggcggcgggcttgccggagcgggcggccatcgacagggtcaaccggcgaggcccttccctcggcctcgtcatgtcctacgtcgacgaggccaccgcgctgcaggcctccggctacttccagccttggcgtgccctccctttcgttgacctctacggacggcggtatcacatcggcagcattcggggcgtgaacgtgatatacgcactgacagggcaacgcaggctgaacgccgccgtcacagtacagacgctcatcgacgtcttcagcgtgtccggcattgttcactacggcacggcagggagctgcaacgactccatctccttcggcgacgtcagtgtccccaggctcgtcgcctacacgggtgcctggacatggaagaagttcagatcaccgagagagtcatcggcggaattgagcttcggcgaatacaacgtcccagacggaggaggaggggagaatctgctcggatccctcaagtacagaaacgaggagctttactcggccggcaagcccatggaagaggtcttctggctgcctgtgcattcggcatggttcagaactgcagaacagctcacggtggaacttg

SEQ ID NO: 10176 - protein, 231 aa, Zea mays subsp. mays
  peptide (1)..(231): Ceres Seq. ID no. 12342068
  misc_feature (56)..(227): Pfam Name: Phosphorylase family Pfam Description: Phosphorylase family
  misc_feature (56)..(227): Pfam Name: Phosphorylase family Pfam Description: Phosphorylase family
  misc_feature (111)..(230): Homolog of NCBI NO: 34897886 NR Description: ESTs AU032452(S10068),C23571(S10068) correspond a region of the predicted gene.~Similar to P.trichocarpa x P.
  misc_feature (56)..(230): Homolog of NCBI NO: 481815 NR Description: vegetative storage protein win4.5 - western poplar x cottonwood (fragment) >gi|309839|gb|AAA16342.1| storage protein [Populus balsamifera subsp. trichocarpa x Populus
  misc_feature (27)..(226): Homolog of NCBI NO: 99650 NR Description: major storage protein - Carolina poplar
  misc_feature (56)..(226): Homolog of NCBI NO: 4775662 NR Description: major storage protein [Populus x canadensis]
  misc_feature (40)..(229): Homolog of NCBI NO: 7487318 NR Description: hypothetical protein T22A6.180 - Arabidopsis >gi|5051777|emb|CAB45070.1| putative protein [Arabidopsis >gi|7269285|emb|CAB79345.1| putative protein [Arabidopsis
  misc_feature (56)..(230): Homolog of NCBI NO: 481815 NR Description: vegetative storage protein win4.5 - western poplar x cottonwood (fragment) >gi|309839|gb|AAA16342.1| storage protein [Populus balsamifera subsp. trichocarpa x Populus
  misc_feature (56)..(226): Homolog of NCBI NO: 4775662 NR Description: major storage protein [Populus x canadensis]
  misc_feature (56)..(226): Homolog of NCBI NO: 728987 NR Description: BARK STORAGE PROTEIN B PRECURSOR bark storage protein >gi|445117|prf||1908423A bark storage
  misc_feature (56)..(226): Homolog of NCBI NO: 728986 NR Description: BARK STORAGE PROTEIN A PRECURSOR
  misc_feature (40)..(227): Homolog of NCBI NO: 30686500 NR Description: expressed protein [Arabidopsis thaliana] unknown protein [Arabidopsis thaliana]
  misc_feature (40)..(227): Homolog of NCBI NO: 21593613 NR Description: unknown [Arabidopsis thaliana]
  misc_feature (27)..(226): Homolog of NCBI NO: 421813 NR Description: storage protein, bark - cottonwood
  misc_feature (40)..(229): Homolog of NCBI NO: 7487318 NR Description: hypothetical protein T22A6.180 - Arabidopsis >gi|5051777|emb|CAB45070.1| putative protein [Arabidopsis >gi|7269285|emb|CAB79345.1| putative protein [Arabidopsis
  misc_feature (27)..(226): Homolog of NCBI NO: 99650 NR Description: major storage protein - Carolina poplar
  misc_feature (111)..(230): Homolog of NCBI NO: 34897886 NR Description: ESTs AU032452(S10068),C23571(S10068) correspond a region of the predicted gene.~Similar to P.trichocarpa x P.
  misc_feature (27)..(226): Homolog of NCBI NO: 421813 NR Description: storage protein, bark - cottonwood
  misc_feature (40)..(227): Homolog of NCBI NO: 21593613 NR Description: unknown [Arabidopsis thaliana]
  misc_feature (40)..(227): Homolog of NCBI NO: 30686500 NR Description: expressed protein [Arabidopsis thaliana] unknown protein [Arabidopsis thaliana]
  misc_feature (56)..(226): Homolog of NCBI NO: 728986 NR Description: BARK STORAGE PROTEIN A PRECURSOR
  misc_feature (56)..(226): Homolog of NCBI NO: 728987 NR Description: BARK STORAGE PROTEIN B PRECURSOR bark storage protein >gi|445117|prf||1908423A bark storage
KTSHAHSWQLLYSMALSSSGHPATTRLLFSLLLVGSAAGLPERAAIDRVNRRGPSLGLVMSYVDEATALQASGYFQPWRALPFVDLYGRRYHIGSIRGVNVIYALTGQRRLNAAVTVQTLIDVFSVSGIVHYGTAGSCNDSISFGDVSVPRLVAYTGAWTWKKFRSPRESSAELSFGEYNVPDGGGGENLLGSLKYRNEELYSAGKPMEEVFWLPVHSAWFRTAEQLTVEL

SEQ ID NO: 10177 - protein, 218 aa, Zea mays subsp. mays
  peptide (1)..(218): Ceres Seq. ID no. 12342069
  misc_feature (43)..(214): Pfam Name: Phosphorylase family Pfam Description: Phosphorylase family
  misc_feature (43)..(214): Pfam Name: Phosphorylase family Pfam Description: Phosphorylase family
  misc_feature (98)..(217): Homolog of NCBI NO: 34897886 NR Description: ESTs AU032452(S10068),C23571(S10068) correspond a region of the predicted gene.~Similar to P.trichocarpa x P.
  misc_feature (43)..(217): Homolog of NCBI NO: 481815 NR Description: vegetative storage protein win4.5 - western poplar x cottonwood (fragment) >gi|309839|gb|AAA16342.1| storage protein [Populus balsamifera subsp. trichocarpa x Populus
  misc_feature (14)..(213): Homolog of NCBI NO: 99650 NR Description: major storage protein - Carolina poplar
  misc_feature (43)..(213): Homolog of NCBI NO: 4775662 NR Description: major storage protein [Populus x canadensis]
  misc_feature (27)..(216): Homolog of NCBI NO: 7487318 NR Description: hypothetical protein T22A6.180 - Arabidopsis >gi|5051777|emb|CAB45070.1| putative protein [Arabidopsis >gi|7269285|emb|CAB79345.1| putative protein [Arabidopsis
  misc_feature (14)..(213): Homolog of NCBI NO: 421813 NR Description: storage protein, bark - cottonwood
  misc_feature (27)..(214): Homolog of NCBI NO: 21593613 NR Description: unknown [Arabidopsis thaliana]
  misc_feature (27)..(214): Homolog of NCBI NO: 30686500 NR Description: expressed protein [Arabidopsis thaliana] unknown protein [Arabidopsis thaliana]
  misc_feature (43)..(213): Homolog of NCBI NO: 728986 NR Description: BARK STORAGE PROTEIN A PRECURSOR
  misc_feature (43)..(213): Homolog of NCBI NO: 728987 NR Description: BARK STORAGE PROTEIN B PRECURSOR bark storage protein >gi|445117|prf||1908423A bark storage
  misc_feature (98)..(217): Homolog of NCBI NO: 34897886 NR Description: ESTs AU032452(S10068),C23571(S10068) correspond a region of the predicted gene.~Similar to P.trichocarpa x P.
  misc_feature (43)..(217): Homolog of NCBI NO: 481815 NR Description: vegetative storage protein win4.5 - western poplar x cottonwood (fragment) >gi|309839|gb|AAA16342.1| storage protein [Populus balsamifera subsp. trichocarpa x Populus
  misc_feature (14)..(213): Homolog of NCBI NO: 99650 NR Description: major storage protein - Carolina poplar
  misc_feature (43)..(213): Homolog of NCBI NO: 4775662 NR Description: major storage protein [Populus x canadensis]
  misc_feature (27)..(216): Homolog of NCBI NO: 7487318 NR Description: hypothetical protein T22A6.180 - Arabidopsis >gi|5051777|emb|CAB45070.1| putative protein [Arabidopsis >gi|7269285|emb|CAB79345.1| putative protein [Arabidopsis
  misc_feature (14)..(213): Homolog of NCBI NO: 421813 NR Description: storage protein, bark - cottonwood
  misc_feature (27)..(214): Homolog of NCBI NO: 21593613 NR Description: unknown [Arabidopsis thaliana]
  misc_feature (27)..(214): Homolog of NCBI NO: 30686500 NR Description: expressed protein [Arabidopsis thaliana] unknown protein [Arabidopsis thaliana]
  misc_feature (43)..(213): Homolog of NCBI NO: 728986 NR Description: BARK STORAGE PROTEIN A PRECURSOR
  misc_feature (43)..(213): Homolog of NCBI NO: 728987 NR Description: BARK STORAGE PROTEIN B PRECURSOR bark storage protein >gi|445117|prf||1908423A bark storage
MALSSSGHPATTRLLFSLLLVGSAAGLPERAAIDRVNRRGPSLGLVMSYVDEATALQASGYFQPWRALPFVDLYGRRYHIGSIRGVNVIYALTGQRRLNAAVTVQTLIDVFSVSGIVHYGTAGSCNDSISFGDVSVPRLVAYTGAWTWKKFRSPRESSAELSFGEYNVPDGGGGENLLGSLKYRNEELYSAGKPMEEVFWLPVHSAWFRTAEQLTVEL

SEQ ID NO: 10178 - protein, 172 aa, Zea mays subsp. mays
  peptide (1)..(172): Ceres Seq. ID no. 12342070
  misc_feature (1)..(168): Pfam Name: Phosphorylase family Pfam Description: Phosphorylase family
  misc_feature (1)..(168): Pfam Name: Phosphorylase family Pfam Description: Phosphorylase family
  misc_feature (52)..(171): Homolog of NCBI NO: 34897886 NR Description: ESTs AU032452(S10068),C23571(S10068) correspond a region of the predicted gene.~Similar to P.trichocarpa x P.
  misc_feature (1)..(171): Homolog of NCBI NO: 481815 NR Description: vegetative storage protein win4.5 - western poplar x cottonwood (fragment) >gi|309839|gb|AAA16342.1| storage protein [Populus balsamifera subsp. trichocarpa x Populus
  misc_feature (1)..(167): Homolog of NCBI NO: 99650 NR Description: major storage protein - Carolina poplar
  misc_feature (1)..(167): Homolog of NCBI NO: 4775662 NR Description: major storage protein [Populus x canadensis]
  misc_feature (1)..(170): Homolog of NCBI NO: 7487318 NR Description: hypothetical protein T22A6.180 - Arabidopsis >gi|5051777|emb|CAB45070.1| putative protein [Arabidopsis >gi|7269285|emb|CAB79345.1| putative protein [Arabidopsis
  misc_feature (1)..(171): Homolog of NCBI NO: 481815 NR Description: vegetative storage protein win4.5 - western poplar x cottonwood (fragment) >gi|309839|gb|AAA16342.1| storage protein [Populus balsamifera subsp. trichocarpa x Populus
  misc_feature (1)..(167): Homolog of NCBI NO: 4775662 NR Description: major storage protein [Populus x canadensis]
  misc_feature (1)..(167): Homolog of NCBI NO: 728987 NR Description: BARK STORAGE PROTEIN B PRECURSOR bark storage protein >gi|445117|prf||1908423A bark storage
  misc_feature (1)..(167): Homolog of NCBI NO: 728986 NR Description: BARK STORAGE PROTEIN A PRECURSOR
  misc_feature (1)..(168): Homolog of NCBI NO: 30686500 NR Description: expressed protein [Arabidopsis thaliana] unknown protein [Arabidopsis thaliana]
  misc_feature (1)..(168): Homolog of NCBI NO: 21593613 NR Description: unknown [Arabidopsis thaliana]
  misc_feature (1)..(167): Homolog of NCBI NO: 421813 NR Description: storage protein, bark - cottonwood
  misc_feature (1)..(170): Homolog of NCBI NO: 7487318 NR Description: hypothetical protein T22A6.180 - Arabidopsis >gi|5051777|emb|CAB45070.1| putative protein [Arabidopsis >gi|7269285|emb|CAB79345.1| putative protein [Arabidopsis
  misc_feature (1)..(167): Homolog of NCBI NO: 99650 NR Description: major storage protein - Carolina poplar
  misc_feature (52)..(171): Homolog of NCBI NO: 34897886 NR Description: ESTs AU032452(S10068),C23571(S10068) correspond a region of the predicted gene.~Similar to P.trichocarpa x P.
  misc_feature (1)..(167): Homolog of NCBI NO: 421813 NR Description: storage protein, bark - cottonwood
  misc_feature (1)..(168): Homolog of NCBI NO: 21593613 NR Description: unknown [Arabidopsis thaliana]
  misc_feature (1)..(168): Homolog of NCBI NO: 30686500 NR Description: expressed protein [Arabidopsis thaliana] unknown protein [Arabidopsis thaliana]
  misc_feature (1)..(167): Homolog of NCBI NO: 728986 NR Description: BARK STORAGE PROTEIN A PRECURSOR
  misc_feature (1)..(167): Homolog of NCBI NO: 728987 NR Description: BARK STORAGE PROTEIN B PRECURSOR bark storage protein >gi|445117|prf||1908423A bark storage
MSYVDEATALQASGYFQPWRALPFVDLYGRRYHIGSIRGVNVIYALTGQRRLNAAVTVQTLIDVFSVSGIVHYGTAGSCNDSISFGDVSVPRLVAYTGAWTWKKFRSPRESSAELSFGEYNVPDGGGGENLLGSLKYRNEELYSAGKPMEEVFWLPVHSAWFRTAEQLTVEL

SEQ ID NO: 10179 - DNA, 916 bp, Zea mays subsp. mays
  misc_feature (1)..(916): Ceres Seq. ID no. 12372196
  misc_feature: MA Experiment ID: 108536 Result: Up-regulated in Transcription
  misc_feature: MA Experiment 108536 PARAMETER Experiment Name: Zm_Meristem_P Parameter: Age (day) Value: 8
  misc_feature: MA Experiment 108536 PARAMETER Experiment Name: Zm_Meristem_P Parameter: Organism Value: Zea mays
  misc_feature: MA Experiment 108536 PARAMETER Experiment Name: Zm_Meristem_P Parameter: Plant Line Value: 35A19
  misc_feature: MA Experiment 108536 PARAMETER Experiment Name: Zm_Meristem_P Parameter: Tissue Value: Shoot Meristem vs. Above Shoot Meristem
  misc_feature: MA Experiment ID: 108545 Result: Up-regulated in Transcription
  misc_feature: MA Experiment 108545 PARAMETER Experiment Name: Zm_Imbibed_Seeds_P Parameter: Age (day) Value: 3 vs. 2
  misc_feature: MA Experiment 108545 PARAMETER Experiment Name: Zm_Imbibed_Seeds_P Parameter: Organism Value: Zea mays
  misc_feature: MA Experiment 108545 PARAMETER Experiment Name: Zm_Imbibed_Seeds_P Parameter: Plant Line Value: 35A19
  misc_feature: MA Experiment 108545 PARAMETER Experiment Name: Zm_Imbibed_Seeds_P Parameter: Tissue Value: Aerial vs. Embryo
  misc_feature: MA Experiment ID: 108687 Result: Up-regulated in Transcription
  misc_feature: MA Experiment 108687 PARAMETER Experiment Name: Zm_Embryos-Flowers__P Parameter: Tissue Value: Embryo vs. Aerial+
  misc_feature: MA Experiment ID: 108689 Result: Down-regulated in Transcription
  misc_feature: MA Experiment 108689 PARAMETER Experiment Name: Zm_Drought_Roots_P Parameter: Age (day) Value: 9
  misc_feature: MA Experiment 108689 PARAMETER Experiment Name: Zm_Drought_Roots_P Parameter: Organism Value: Zea mays
  misc_feature: MA Experiment 108689 PARAMETER Experiment Name: Zm_Drought_Roots_P Parameter: Plant Line Value: 35A19
  misc_feature: MA Experiment 108689 PARAMETER Experiment Name: Zm_Drought_Roots_P Parameter: Timepoint (hr) Value: 24
  misc_feature: MA Experiment 108689 PARAMETER Experiment Name: Zm_Drought_Roots_P Parameter: Tissue Value: Roots
  misc_feature: MA Experiment 108689 PARAMETER Experiment Name: Zm_Drought_Roots_P Parameter: Treatment Value: Drought vs. No Drought
  misc_feature: MA Experiment ID: 20000535 Result: Down-regulated in Transcription
  misc_feature: MA Experiment 20000535 PARAMETER Experiment Name: Zm_Hybrid_Seed_Dev_P Parameter: DAP Value: 30 vs. 12
  misc_feature: MA Experiment 20000535 PARAMETER Experiment Name: Zm_Hybrid_Seed_Dev_P Parameter: Organism Value: Zea mays
  misc_feature: MA Experiment 20000535 PARAMETER Experiment Name: Zm_Hybrid_Seed_Dev_P Parameter: Plant Line Value: 35A19
  misc_feature: MA Experiment 20000535 PARAMETER Experiment Name: Zm_Hybrid_Seed_Dev_P Parameter: Tissue Value: Embryo vs. Unfert Floret
acctctctgccttcttctcggaggtcggagaagagctctctgcttcattcggccggtccaactccaccgaccgatccaatccaacccactgaccatggggttcccgccggtgtgctgctgcgcccccatccccaagccggtcgtcgccttctgcaacctgctcggcgccatcaaggacgccgtcctgctgacgctcgccgccgtgggcttcccgcacgacgccgcgcgcggctcggcggacgcccaccagcccgaggaggtgaagacccggctccccgccgtggagtacgcccagctcctggccgagcagcagccgtcgcccgccacccacgcggcctgcatcgtttgcctggacacgctggaggcggcggacgaggtgcggcggctgggcaactgcgcgcacgccttccaccgggcctgcatcgaccgttggatcgacctaggccggacgacgtgcccgctgtgccgctccgacctcctgccaagcccctggggccgggccgggctgctcgggctgggccggctcgccagccgtctcacgcgcgttcgcgtttggtgaggaccgtctcggaggccacttttaccttttcggtggccaggccgcggtcgcagcccatcccggtggtgccggaacggcgcggacacgttagcgacggcgaccgggccgccggatggtcttaaatctgctctgccacttgccaaccgctaatcaaccagcgggcttaattagcagcggattggcttggtgtctgacagtcgatattatgacagctaaataagcagttaaatgtttctataggattgagtatacacggcagctaaatgtttcgtatagtagtgctcctaacagccatcttcattgtacatgaatgtcctctatccgatcctttcatatagtataacagttaaattattc

SEQ ID NO: 10180 - protein, 226 aa, Zea mays subsp. mays
  peptide (1)..(226): Ceres Seq. ID no. 12372197
TSLPSSRRSEKSSLLHSAGPTPPTDPIQPTDHGVPAGVLLRPHPQAGRRLLQPARRHQGRRPADARRRGLPARRRARLGGRPPARGGEDPAPRRGVRPAPGRAAAVARHPRGLHRLPGHAGGGGRGAAAGQLRARLPPGLHRPLDRPRPDDVPAVPLRPPAKPLGPGRAARAGPARQPSHARSRLVRTVSEATFTFSVARPRSQPIPVVPERRGHVSDGDRAAGWS

SEQ ID NO: 10181 - protein, 185 aa, Zea mays subsp. mays
  peptide (1)..(185): Ceres Seq. ID no. 12372198
  misc_feature (113)..(155): Pfam Name: Zinc finger, C3HC4 type (RING finger) Pfam Description: Zinc finger, C3HC4 type (RING finger)
  misc_feature (80)..(174): Homolog of NCBI NO: 38345870 NR Description: OSJNBa0064M23.12 [Oryza sativa (japonica
  misc_feature (32)..(162): Homolog of NCBI NO: 34897812 NR Description: P0514G12.26 [Oryza sativa (japonica
  misc_feature (85)..(169): Homolog of NCBI NO: 32488512 NR Description: OSJNBa0011J08.19 [Oryza sativa (japonica
  misc_feature (32)..(161): Homolog of NCBI NO: 15222553 NR Description: putative RING zinc finger protein; protein id: supported by cDNA: gi_16648709 [Arabidopsis thaliana]
  misc_feature (78)..(162): Homolog of NCBI NO: 15229284 NR Description: putative protein; protein id: At3g43430.1, by cDNA: 3137. [Arabidopsis thaliana] >gi|11358362|pir||T47385
  misc_feature (87)..(161): Homolog of NCBI NO: 15233117 NR Description: RING finger protein; protein id: At3g61460.1, by cDNA: 25801., supported by cDNA: gi_17644156, supported by
  misc_feature (91)..(161): Homolog of NCBI NO: 18411282 NR Description: similar to RING finger protein; protein id:
  misc_feature (66)..(163): Homolog of NCBI NO: 34903102 NR Description: unnamed protein product [Oryza sativa (japonica group)] >gi|6815070|dbj|BAA90357.1| unnamed protein product
  misc_feature (91)..(160): Homolog of NCBI NO: 21554155 NR Description: RING zinc finger protein-like [Arabidopsis
  misc_feature (32)..(161): Homolog of NCBI NO: 15233350 NR Description: RING-H2 finger protein RHA1b; protein id: supported by cDNA: 37097., supported by cDNA: gi_3790566
PLCLLLGGRRRALCFIRPVQLHRPIQSNPLTMGFPPVCCCAPIPKPVVAFCNLLGAIKDAVLLTLAAVGFPHDAARGSADAHQPEEVKTRLPAVEYAQLLAEQQPSPATHAACIVCLDTLEAADEVRRLGNCAHAFHRACIDRWIDLGRTTCPLCRSDLLPSPWGRAGLLGLGRLASRLTRVRVW

SEQ ID NO: 10182 - protein, 154 aa, Zea mays subsp. mays
  peptide (1)..(154): Ceres Seq. ID no. 12372199
  misc_feature (82)..(124): Pfam Name: Zinc finger, C3HC4 type (RING finger) Pfam Description: Zinc finger, C3HC4 type (RING finger)
  misc_feature (49)..(143): Homolog of NCBI NO: 38345870 NR Description: OSJNBa0064M23.12 [Oryza sativa (japonica
  misc_feature (1)..(131): Homolog of NCBI NO: 34897812 NR Description: P0514G12.26 [Oryza sativa (japonica
  misc_feature (54)..(138): Homolog of NCBI NO: 32488512 NR Description: OSJNBa0011J08.19 [Oryza sativa (japonica
  misc_feature (1)..(130): Homolog of NCBI NO: 15222553 NR Description: putative RING zinc finger protein; protein id: supported by cDNA: gi_16648709 [Arabidopsis thaliana]
  misc_feature (47)..(131): Homolog of NCBI NO: 15229284 NR Description: putative protein; protein id: At3g43430.1, by cDNA: 3137. [Arabidopsis thaliana] >gi|11358362|pir||T47385
  misc_feature (56)..(130): Homolog of NCBI NO: 15233117 NR Description: RING finger protein; protein id: At3g61460.1, by cDNA: 25801., supported by cDNA: gi_17644156, supported by
  misc_feature (60)..(130): Homolog of NCBI NO: 18411282 NR Description: similar to RING finger protein; protein id:
  misc_feature (35)..(132): Homolog of NCBI NO: 34903102 NR Description: unnamed protein product [Oryza sativa (japonica group)] >gi|6815070|dbj|BAA90357.1| unnamed protein product
  misc_feature (60)..(129): Homolog of NCBI NO: 21554155 NR Description: RING zinc finger protein-like [Arabidopsis
  misc_feature (1)..(130): Homolog of NCBI NO: 15233350 NR Description: RING-H2 finger protein RHA1b; protein id: supported by cDNA: 37097., supported by cDNA: gi_3790566
MGFPPVCCCAPIPKPVVAFCNLLGAIKDAVLLTLAAVGFPHDAARGSADAHQPEEVKTRLPAVEYAQLLAEQQPSPATHAACIVCLDTLEAADEVRRLGNCAHAFHRACIDRWIDLGRTTCPLCRSDLLPSPWGRAGLLGLGRLASRLTRVRVW

SEQ ID NO: 10183 - DNA, 671 bp, Zea mays subsp. mays
  misc_feature (1)..(671): Ceres Seq. ID no. 13564010
  misc_feature: MA Experiment ID: 108528 Result: Up-regulated in Transcription
  misc_feature: MA Experiment 108528 PARAMETER Experiment Name: Zm_Imbibed_Seeds_P Parameter: Age (day) Value: 5 vs. 2
  misc_feature: MA Experiment 108528 PARAMETER Experiment Name: Zm_Imbibed_Seeds_P Parameter: Organism Value: Zea mays
  misc_feature: MA Experiment 108528 PARAMETER Experiment Name: Zm_Imbibed_Seeds_P Parameter: Plant Line Value: 35A19
  misc_feature: MA Experiment 108528 PARAMETER Experiment Name: Zm_Imbibed_Seeds_P Parameter: Tissue Value: Aerial vs. Embryo
  misc_feature: MA Experiment ID: 108530 Result: Up-regulated in Transcription
  misc_feature: MA Experiment 108530 PARAMETER Experiment Name: Zm_Imbibed_Seeds_P Parameter: Age (day) Value: 6 vs. 2
  misc_feature: MA Experiment 108530 PARAMETER Experiment Name: Zm_Imbibed_Seeds_P Parameter: Organism Value: Zea mays
  misc_feature: MA Experiment 108530 PARAMETER Experiment Name: Zm_Imbibed_Seeds_P Parameter: Plant Line Value: 35A19
  misc_feature: MA Experiment 108530 PARAMETER Experiment Name: Zm_Imbibed_Seeds_P Parameter: Tissue Value: Aerial vs. Embryo
agcttagtgatccttgtgatcaaattttgattgtggcaaacacacatatttattgggacccacaatggatcgatgtaaagttggctcaggcaaaatatcttctttcgagagtatctcagtttgagcaactcatctcaaataaatataattgtaaaccttcagtgatcattgctggtgacttcaattcgacacctggtgacaaggtatacaattaccttttatctgccaacctaggatctacggacgaagctccaatcaagttacgcagcctttatgctgcgaatggaggggagccagagtacacaaactacactcctggttttaccggaacactggactacatattcttgtcggatggtagttcgataaaacctactagcctacttcgtttgccgcgaggggattctgaggatgtgaaaggaggcttgcccaactttcgacatcctagcgatcatctcccaattggtgctgattttctggtagtcaacatctagtgcaggtgttgattgctttttcaacagaaatagtaaatgccgttgaataatttgtgttgttggctcaagtttcagagtttaaatgtaatatctcaaggaacaagcgtttcttttcttgtagagcaattaacaatgcgaattttattcatcaattttaatataataggagtattgtcc

SEQ ID NO: 10184 - protein, 163 aa, Zea mays subsp. mays
  peptide (1)..(163): Ceres Seq. ID no. 13564011
  misc_feature (1)..(158): Pfam Name: Endonuclease/Exonuclease/phosphatase family Pfam Description: Endonuclease/Exonuclease/phosphatase family
  misc_feature (1)..(158): Homolog of NCBI NO: 15222367 NR Description: endonuclease/exonuclease/phosphatase family thaliana] >gi|12322547|gb|AAG51276.1|AC027135_17 hypothetical [Arabidopsis thaliana] >gi|12597833|gb|AAG60143.1|AC074360_8
  misc_feature (1)..(158): Homolog of NCBI NO: 28973671 NR Description: unknown protein [Arabidopsis thaliana]
  misc_feature (4)..(158): Homolog of NCBI NO: 12322536 NR Description: hypothetical protein [Arabidopsis thaliana]
  misc_feature (4)..(158): Homolog of NCBI NO: 15222370 NR Description: endonuclease/exonuclease/phosphatase family thaliana] >gi|12597850|gb|AAG60160.1|AC074360_25 hypothetical
  misc_feature (9)..(157): Homolog of NCBI NO: 26342330 NR Description: unnamed protein product [Mus musculus]
  misc_feature (9)..(157): Homolog of NCBI NO: 21732296 NR Description: hypothetical protein [Homo sapiens]
  misc_feature (9)..(157): Homolog of NCBI NO: 40538842 NR Description: RIKEN cDNA E430028B21 gene [Mus musculus]
  misc_feature (1)..(162): Homolog of NCBI NO: 19074877 NR Description: similarity to CARBON CATABOLITE REPRESSOR PROTEIN [Encephalitozoon cuniculi] >gi|19069602|emb|CAD25987.1| to CARBON CATABOLITE REPRESSOR PROTEIN 4 [Encephalitozoon
  misc_feature (9)..(157): Homolog of NCBI NO: 26353952 NR Description: unnamed protein product [Mus musculus]
  misc_feature (9)..(157): Homolog of NCBI NO: 34877112 NR Description: similar to CG31759-PA [Rattus norvegicus]
LSDPCDQILIVANTHIYWDPQWIDVKLAQAKYLLSRVSQFEQLISNKYNCKPSVIIAGDFNSTPGDKVYNYLLSANLGSTDEAPIKLRSLYAANGGEPEYTNYTPGFTGTLDYIFLSDGSSIKPTSLLRLPRGDSEDVKGGLPNFRHPSDHLPIGADFLVVNI

SEQ ID NO: 10185 - DNA, 901 bp, Zea mays subsp. mays
  misc_feature (1)..(901): Ceres Seq. ID no. 12376262
  misc_feature: MA Experiment ID: 108530 Result: Down-regulated in Transcription
  misc_feature: MA Experiment 108530 PARAMETER Experiment Name: Zm_Imbibed_Seeds_P Parameter: Age (day) Value: 6 vs. 2
  misc_feature: MA Experiment 108530 PARAMETER Experiment Name: Zm_Imbibed_Seeds_P Parameter: Organism Value: Zea mays
  misc_feature: MA Experiment 108530 PARAMETER Experiment Name: Zm_Imbibed_Seeds_P Parameter: Plant Line Value: 35A19
  misc_feature: MA Experiment 108530 PARAMETER Experiment Name: Zm_Imbibed_Seeds_P Parameter: Tissue Value: Aerial vs. Embryo
  misc_feature: MA Experiment ID: 108535 Result: Up-regulated in Transcription
  misc_feature: MA Experiment 108535 PARAMETER Experiment Name: Zm_Meristem_P Parameter: Age (day) Value: 8
  misc_feature: MA Experiment 108535 PARAMETER Experiment Name: Zm_Meristem_P Parameter: Organism Value: Zea mays
  misc_feature: MA Experiment 108535 PARAMETER Experiment Name: Zm_Meristem_P Parameter: Plant Line Value: 35A19
  misc_feature: MA Experiment 108535 PARAMETER Experiment Name: Zm_Meristem_P Parameter: Tissue Value: Root Meristem vs. Above Root Meristem
  misc_feature: MA Experiment ID: 108544 Result: Down-regulated in Transcription
  misc_feature: MA Experiment ID: 20000487 Result: Up-regulated in Transcription
  misc_feature: MA Experiment 20000487 PARAMETER Experiment Name: Zm_50mM_NH4NO3_L_to_H_P Parameter: Organism Value: Zea mays
  misc_feature: MA Experiment 20000487 PARAMETER Experiment Name: Zm_50mM_NH4NO3_L_to_H_P Parameter: Timepoint (hr) Value: 4
  misc_feature: MA Experiment 20000487 PARAMETER Experiment Name: Zm_50mM_NH4NO3_L_to_H_P Parameter: Tissue Value: Leaves
  misc_feature: MA Experiment 20000487 PARAMETER Experiment Name: Zm_50mM_NH4NO3_L_to_H_P Parameter: Treatment Value: 50mM NH4NO3 vs. 100mM Mannitol
  misc_feature: MA Experiment ID: 20000488 Result: Up-regulated in Transcription
  misc_feature: MA Experiment 20000488 PARAMETER Experiment Name: Zm_50mM_NH4NO3_L_to_H_P Parameter: Organism Value: Zea mays
  misc_feature: MA Experiment 20000488 PARAMETER Experiment Name: Zm_50mM_NH4NO3_L_to_H_P Parameter: Timepoint (hr) Value: 8
  misc_feature: MA Experiment 20000488 PARAMETER Experiment Name: Zm_50mM_NH4NO3_L_to_H_P Parameter: Tissue Value: Leaves
  misc_feature: MA Experiment 20000488 PARAMETER Experiment Name: Zm_50mM_NH4NO3_L_to_H_P Parameter: Treatment Value: 50mM NH4NO3 vs. 100mM Mannitol
  misc_feature: MA Experiment ID: 20000535 Result: Up-regulated in Transcription
  misc_feature: MA Experiment 20000535 PARAMETER Experiment Name: Zm_Hybrid_Seed_Dev_P Parameter: DAP Value: 30 vs. 12
  misc_feature: MA Experiment 20000535 PARAMETER Experiment Name: Zm_Hybrid_Seed_Dev_P Parameter: Organism Value: Zea mays
  misc_feature: MA Experiment 20000535 PARAMETER Experiment Name: Zm_Hybrid_Seed_Dev_P Parameter: Plant Line Value: 35A19
  misc_feature: MA Experiment 20000535 PARAMETER Experiment Name: Zm_Hybrid_Seed_Dev_P Parameter: Tissue Value: Embryo vs. Unfert Floret
  misc_feature: MA Experiment ID: 20000626 Result: Up-regulated in Transcription
  misc_feature: MA Experiment 20000626 PARAMETER Experiment Name: Zm_Herbicide-Treatments_P Parameter: Timepoint (hr) Value: 12
  misc_feature: MA Experiment 20000626 PARAMETER Experiment Name: Zm_Herbicide-Treatments_P Parameter: Tissue Value: Aerial
  misc_feature: MA Experiment 20000626 PARAMETER Experiment Name: Zm_Herbicide-Treatments_P Parameter: Treatment Value: Roundup vs. No Treatment
aaaaccccagccaccaggtaccaatggcggccaccgcgatggaccatgacggcggcgacgacgtggtcacaccaggggagcttctcggaaactcattaaccctcgcggccggacgtggcgcctacgccgacggtcgctctgtgcgcgcgtcggtcaccgggcgccgccgcatcgtgccgcccgcacctggctccgacgaccagagatccacggtggaggtggtggggcacaaggcccatggagctgtgccacagccgggaagcgttgtcatcgcccgagtaacaaaggttatggctagaatggcctctgcagacatcatgtgtgttgactcaaaggctatcagagaaaagttcactggcatgataaggcagcaagatgttcgtgcaactgaaattgacaaggtggatatgtaccaatcatatcgtcctggggacattgttaaagctatggttctttctcttggtgatgcaagggcatattacctttccactgcgaaaaatgaacttggagtcgtttcagcacaaagcatagctggtggtacattggttccaatcagttggactgagatgcaatgtgatttgaccggtcaaattgagcaaaggaaagttgcaaaggtggaatagatgtgctggccctcctgataaatgttggtggcggtatacaaattgtggaccagtgataccaggtccttgggcggactgcccaattctgcgacgtccaacttcattacagctgcattgagcatgggtttttaaaaccctggctgaattaactagacatgaatcgtagccatgggtcctgtaacccaaccttgggatctgaatcatagccatgggttctgtaacccagtaaccttgcccttgtgatttgttactctgagctaatgacattgcagttttcc

SEQ ID NO: 10186 - protein, 206 aa, Zea mays subsp. mays
  peptide (1)..(206): Ceres Seq. ID no. 12376263
  misc_feature (21)..(205): Homolog of NCBI NO: 18421805 NR Description: putative protein; protein id: At5g38890.1
  misc_feature (21)..(153): Homolog of NCBI NO: 9758066 NR Description: gene_id:K15E6.10~ref|NP_057130.1~similar to
  misc_feature (24)..(206): Homolog of NCBI NO: 7705612 NR Description: exosomal core protein CSL4; homolog of yeast
  misc_feature (24)..(206): Homolog of NCBI NO: 22267446 NR Description: RIKEN cDNA 2610104C07 [Mus musculus]
  misc_feature (49)..(204): Homolog of NCBI NO: 38104559 NR Description: hypothetical protein MG08628.4 [Magnaporthe
  misc_feature (110)..(204): Homolog of NCBI NO: 6324097 NR Description: Represses the replication of double-stranded RNA protecting the host from the otherwise lethal effects of the
  misc_feature (52)..(111): Homolog of NCBI NO: 6324097 NR Description: Represses the replication of double-stranded RNA protecting the host from the otherwise lethal effects of the
  misc_feature (20)..(204): Homolog of NCBI NO: 7491999 NR Description: hypothetical protein SPCC965.01 - fission yeast
  misc_feature (20)..(204): Homolog of NCBI NO: 19076010 NR Description: hypothetical protein [Schizosaccharomyces pombe]
  misc_feature (21)..(205): Homolog of NCBI NO: 24583644 NR Description: CG6249-PA [Drosophila melanogaster]
NPSHQVPMAATAMDHDGGDDVVTPGELLGNSLTLAAGRGAYADGRSVRASVTGRRRIVPPAPGSDDQRSTVEVVGHKAHGAVPQPGSVVIARVTKVMARMASADIMCVDSKAIREKFTGMIRQQDVRATEIDKVDMYQSYRPGDIVKAMVLSLGDARAYYLSTAKNELGVVSAQSIAGGTLVPISWTEMQCDLTGQIEQRKVAKVE

SEQ ID NO: 10187 - protein, 199 aa, Zea mays subsp. mays
  peptide (1)..(199): Ceres Seq. ID no. 12376264
  misc_feature (14)..(198): Homolog of NCBI NO: 18421805 NR Description: putative protein; protein id: At5g38890.1
  misc_feature (14)..(146): Homolog of NCBI NO: 9758066 NR Description: gene_id:K15E6.10~ref|NP_057130.1~similar to
  misc_feature (17)..(199): Homolog of NCBI NO: 7705612 NR Description: exosomal core protein CSL4; homolog of yeast
  misc_feature (17)..(199): Homolog of NCBI NO: 22267446 NR Description: RIKEN cDNA 2610104C07 [Mus musculus]
  misc_feature (42)..(197): Homolog of NCBI NO: 38104559 NR Description: hypothetical protein MG08628.4 [Magnaporthe
  misc_feature (103)..(197): Homolog of NCBI NO: 6324097 NR Description: Represses the replication of double-stranded RNA protecting the host from the otherwise lethal effects of the
  misc_feature (45)..(104): Homolog of NCBI NO: 6324097 NR Description: Represses the replication of double-stranded RNA protecting the host from the otherwise lethal effects of the
  misc_feature (13)..(197): Homolog of NCBI NO: 7491999 NR Description: hypothetical protein SPCC965.01 - fission yeast
  misc_feature (13)..(197): Homolog of NCBI NO: 19076010 NR Description: hypothetical protein [Schizosaccharomyces pombe]
  misc_feature (14)..(198): Homolog of NCBI NO: 24583644 NR Description: CG6249-PA [Drosophila melanogaster]
MAATAMDHDGGDDVVTPGELLGNSLTLAAGRGAYADGRSVRASVTGRRRIVPPAPGSDDQRSTVEVVGHKAHGAVPQPGSVVIARVTKVMARMASADIMCVDSKAIREKFTGMIRQQDVRATEIDKVDMYQSYRPGDIVKAMVLSLGDARAYYLSTAKNELGVVSAQSIAGGTLVPISWTEMQCDLTGQIEQRKVAKVE

SEQ ID NO: 10188 - protein, 194 aa, Zea mays subsp. mays
  peptide (1)..(194): Ceres Seq. ID no. 12376265
  misc_feature (9)..(193): Homolog of NCBI NO: 18421805 NR Description: putative protein; protein id: At5g38890.1
  misc_feature (9)..(141): Homolog of NCBI NO: 9758066 NR Description: gene_id:K15E6.10~ref|NP_057130.1~similar to
  misc_feature (12)..(194): Homolog of NCBI NO: 7705612 NR Description: exosomal core protein CSL4; homolog of yeast
  misc_feature (12)..(194): Homolog of NCBI NO: 22267446 NR Description: RIKEN cDNA 2610104C07 [Mus musculus]
  misc_feature (37)..(192): Homolog of NCBI NO: 38104559 NR Description: hypothetical protein MG08628.4 [Magnaporthe
  misc_feature (98)..(192): Homolog of NCBI NO: 6324097 NR Description: Represses the replication of double-stranded RNA protecting the host from the otherwise lethal effects of the
  misc_feature (40)..(99): Homolog of NCBI NO: 6324097 NR Description: Represses the replication of double-stranded RNA protecting the host from the otherwise lethal effects of the
  misc_feature (8)..(192): Homolog of NCBI NO: 7491999 NR Description: hypothetical protein SPCC965.01 - fission yeast
  misc_feature (8)..(192): Homolog of NCBI NO: 19076010 NR Description: hypothetical protein [Schizosaccharomyces pombe]
  misc_feature (9)..(193): Homolog of NCBI NO: 24583644 NR Description: CG6249-PA [Drosophila melanogaster]
MDHDGGDDVVTPGELLGNSLTLAAGRGAYADGRSVRASVTGRRRIVPPAPGSDDQRSTVEVVGHKAHGAVPQPGSVVIARVTKVMARMASADIMCVDSKAIREKFTGMIRQQDVRATEIDKVDMYQSYRPGDIVKAMVLSLGDARAYYLSTAKNELGVVSAQSIAGGTLVPISWTEMQCDLTGQIEQRKVAKVE

SEQ ID NO: 10189 - DNA, 892 bp, Zea mays subsp. mays
  misc_feature (1)..(892): Ceres Seq. ID no. 12361752
  misc_feature: MA Experiment ID: 108544 Result: Up-regulated in Transcription
accacaccaaaacccgcatccataaacaagaaaaagaaaagaaaacccccgctgccagcgacagaagaagaaggggtcccttctccttggttgcgttgcgcctccctcctgtctgcgtgcgtgcaatcgacgcagaggcgcgggcgctcgcaccaccacgaccacgacccgatggctttcatgcgctcccgctcaaatgcatcttctggcatgggagttgctcctaacattagggagacattcgttgagcttcaaatgaagaaggcattccgatatgttatcttcaaaatcgaagagaagcaaaagcaggtggttgtggagaagacaggggctactactgaaagctatgatgattttttggcctctctcccagagaatgactgccgatatgcgctgtatgattttgattttgttactggggagaatgtgcagaaaagcaagattttcttcattgcctggtccccatcgacatcccgcatacgtgctaagatgctgtactccacgtcgaaggaccgcatcaagtacgagcttgacgggttccactacgaaatccaggcgaccgacccatcggaggtggacatcgaggttctccgggagcgggctcactgaagctggttctccttttgaagggacctgtggagggccgtgaaccttcagccagatgcaaattcaattgtcaacgatgaagctcccgccgtggtgtttgttaataagttactgtaagcatatcatttagtcgctactcgctatgcatgacactagctggtgaagcgctatctaagctctattggtatgaccgtatgaggtttggttgccgtgttgccgagcctgtaaacgaagcaagatttgcagacttgttatattgtggtattgatgatactggattactggc

SEQ ID NO: 10190 - protein, 202 aa, Zea mays subsp. mays
  peptide (1)..(202): Ceres Seq. ID no. 12361753
  misc_feature (75)..(202): Pfam Name: Cofilin/tropomyosin-type actin-binding protein Pfam Description: Cofilin/tropomyosin-type actin-binding protein
  misc_feature (58)..(202): Homolog of NCBI NO: 34897072 NR Description: putative actin-depolymerizing factor [Oryza
  misc_feature (66)..(202): Homolog of NCBI NO: 4566614 NR Description: actin depolymerizing factor [Populus x canescens]
  misc_feature (63)..(202): Homolog of NCBI NO: 18402587 NR Description: actin depolymerizing factor 6; protein id: supported by cDNA: 255294., supported by cDNA: gi_13926244,
  misc_feature (66)..(202): Homolog of NCBI NO: 32363121 NR Description: Actin-depolymerizing factor (ADF)
  misc_feature (63)..(202): Homolog of NCBI NO: 21554405 NR Description: Actin-depolymerizing factor ADF-6 [Arabidopsis
  misc_feature (58)..(202): Homolog of NCBI NO: 24745620 NR Description: actin depolymerizing factor 6 [Solanum tuberosum]
  misc_feature (71)..(202): Homolog of NCBI NO: 25295741 NR Description: actin depolymerizing factor 6 [imported] - thaliana >gi|13926245|gb|AAK49596.1|AF372880_1 At2g31200/F16D14.4 thaliana] >gi|16323230|gb|AAL15349.1| At2g31200/F16D14.4
  misc_feature (69)..(201): Homolog of NCBI NO: 7330254 NR Description: actin depolymerizing factor [Elaeis guineensis]
  misc_feature (65)..(202): Homolog of NCBI NO: 17366768 NR Description: Actin-depolymerizing factor 1 (ADF 1)
  misc_feature (65)..(201): Homolog of NCBI NO: 17366765 NR Description: Actin-depolymerizing factor 2 (ADF 2)
TTPKPASINKKKKRKPPLPATEEEGVPSPWLRCASLLSACVQSTQRRGRSHHHDHDPMAFMRSRSNASSGMGVAPNIRETFVELQMKKAFRYVIFKIEEKQKQVVVEKTGATTESYDDFLASLPENDCRYALYDFDFVTGENVQKSKIFFIAWSPSTSRIRAKMLYSTSKDRIKYELDGFHYEIQATDPSEVDIEVLRERAH

SEQ ID NO: 10191 - protein, 145 aa, Zea mays subsp. mays
  peptide (1)..(145): Ceres Seq. ID no. 12361754
  misc_feature (18)..(145): Pfam Name: Cofilin/tropomyosin-type actin-binding protein Pfam Description: Cofilin/tropomyosin-type actin-binding protein
  misc_feature (1)..(145): Homolog of NCBI NO: 34897072 NR Description: putative actin-depolymerizing factor [Oryza
  misc_feature (9)..(145): Homolog of NCBI NO: 4566614 NR Description: actin depolymerizing factor [Populus x canescens]
  misc_feature (6)..(145): Homolog of NCBI NO: 18402587 NR Description: actin depolymerizing factor 6; protein id: supported by cDNA: 255294., supported by cDNA: gi_13926244,
  misc_feature (9)..(145): Homolog of NCBI NO: 32363121 NR Description: Actin-depolymerizing factor (ADF)
  misc_feature (6)..(145): Homolog of NCBI NO: 21554405 NR Description: Actin-depolymerizing factor ADF-6 [Arabidopsis
  misc_feature (1)..(145): Homolog of NCBI NO: 24745620 NR Description: actin depolymerizing factor 6 [Solanum tuberosum]
  misc_feature (14)..(145): Homolog of NCBI NO: 25295741 NR Description: actin depolymerizing factor 6 [imported] - thaliana >gi|13926245|gb|AAK49596.1|AF372880_1 At2g31200/F16D14.4 thaliana] >gi|16323230|gb|AAL15349.1| At2g31200/F16D14.4
  misc_feature (12)..(144): Homolog of NCBI NO: 7330254 NR Description: actin depolymerizing factor [Elaeis guineensis]
  misc_feature (8)..(145): Homolog of NCBI NO: 17366768 NR Description: Actin-depolymerizing factor 1 (ADF 1)
  misc_feature (8)..(144): Homolog of NCBI NO: 17366765 NR Description: Actin-depolymerizing factor 2 (ADF 2)
MAFMRSRSNASSGMGVAPNIRETFVELQMKKAFRYVIFKIEEKQKQVVVEKTGATTESYDDFLASLPENDCRYALYDFDFVTGENVQKSKIFFIAWSPSTSRIRAKMLYSTSKDRIKYELDGFHYEIQATDPSEVDIEVLRERAH

SEQ ID NO: 10192 - protein, 142 aa, Zea mays subsp. mays
  peptide (1)..(142): Ceres Seq. ID no. 12361755
  misc_feature (15)..(142): Pfam Name: Cofilin/tropomyosin-type actin-binding protein Pfam Description: Cofilin/tropomyosin-type actin-binding protein
  misc_feature (1)..(142): Homolog of NCBI NO: 34897072 NR Description: putative actin-depolymerizing factor [Oryza
  misc_feature (6)..(142): Homolog of NCBI NO: 4566614 NR Description: actin depolymerizing factor [Populus x canescens]
  misc_feature (3)..(142): Homolog of NCBI NO: 18402587 NR Description: actin depolymerizing factor 6; protein id: supported by cDNA: 255294., supported by cDNA: gi_13926244,
  misc_feature (6)..(142): Homolog of NCBI NO: 32363121 NR Description: Actin-depolymerizing factor (ADF)
  misc_feature (3)..(142): Homolog of NCBI NO: 21554405 NR Description: Actin-depolymerizing factor ADF-6 [Arabidopsis
  misc_feature (1)..(142): Homolog of NCBI NO: 24745620 NR Description: actin depolymerizing factor 6 [Solanum tuberosum]
  misc_feature (11)..(142): Homolog of NCBI NO: 25295741 NR Description: actin depolymerizing factor 6 [imported] - thaliana >gi|13926245|gb|AAK49596.1|AF372880_1 At2g31200/F16D14.4 thaliana] >gi|16323230|gb|AAL15349.1| At2g31200/F16D14.4
  misc_feature (9)..(141): Homolog of NCBI NO: 7330254 NR Description: actin depolymerizing factor [Elaeis guineensis]
  misc_feature (5)..(142): Homolog of NCBI NO: 17366768 NR Description: Actin-depolymerizing factor 1 (ADF 1)
  misc_feature (5)..(141): Homolog of NCBI NO: 17366765 NR Description: Actin-depolymerizing factor 2 (ADF 2)
MRSRSNASSGMGVAPNIRETFVELQMKKAFRYVIFKIEEKQKQVVVEKTGATTESYDDFLASLPENDCRYALYDFDFVTGENVQKSKIFFIAWSPSTSRIRAKMLYSTSKDRIKYELDGFHYEIQATDPSEVDIEVLRERAH

SEQ ID NO: 10193 - DNA, 870 bp, Zea mays subsp. mays
  misc_feature (1)..(870): Ceres Seq. ID no. 12400389
  misc_feature: MA Experiment ID: 108504 Result: Down-regulated in Transcription
  misc_feature: MA Experiment 108504 PARAMETER Experiment Name: Zm_Drought_P Parameter: Age (day) Value: 8
  misc_feature: MA Experiment 108504 PARAMETER Experiment Name: Zm_Drought_P Parameter: Organism Value: Zea mays
  misc_feature: MA Experiment 108504 PARAMETER Experiment Name: Zm_Drought_P Parameter: Plant Line Value: 35A19
  misc_feature: MA Experiment 108504 PARAMETER Experiment Name: Zm_Drought_P Parameter: Timepoint (hr) Value: 12
  misc_feature: MA Experiment 108504 PARAMETER Experiment Name: Zm_Drought_P Parameter: Tissue Value: Aerial
  misc_feature: MA Experiment 108504 PARAMETER Experiment Name: Zm_Drought_P Parameter: Treatment Value: Drought vs. No Drought
  misc_feature: MA Experiment ID: 108513 Result: Down-regulated in Transcription
  misc_feature: MA Experiment 108513 PARAMETER Experiment Name: Zm_100uM_ABA_P Parameter: Age (day) Value: 8
  misc_feature: MA Experiment 108513 PARAMETER Experiment Name: Zm_100uM_ABA_P Parameter: Organism Value: Zea mays
  misc_feature: MA Experiment 108513 PARAMETER Experiment Name: Zm_100uM_ABA_P Parameter: Plant Line Value: 35A19
  misc_feature: MA Experiment 108513 PARAMETER Experiment Name: Zm_100uM_ABA_P Parameter: Timepoint (hr) Value: 6
  misc_feature: MA Experiment 108513 PARAMETER Experiment Name: Zm_100uM_ABA_P Parameter: Tissue Value: Aerial
  misc_feature: MA Experiment 108513 PARAMETER Experiment Name: Zm_100uM_ABA_P Parameter: Treatment Value: 100uM ABA vs. No Treatment
  misc_feature: MA Experiment ID: 108523 Result: Down-regulated in Transcription
  misc_feature: MA Experiment 108523 PARAMETER Experiment Name: Zm_42deg_Heat_P Parameter: Age (day) Value: 8
  misc_feature: MA Experiment 108523 PARAMETER Experiment Name: Zm_42deg_Heat_P Parameter: Organism Value: Zea mays
  misc_feature: MA Experiment 108523 PARAMETER Experiment Name: Zm_42deg_Heat_P Parameter: Plant Line Value: 35A19
  misc_feature: MA Experiment 108523 PARAMETER Experiment Name: Zm_42deg_Heat_P Parameter: Temperature (deg C) Value: 42 vs. 22
  misc_feature: MA Experiment 108523 PARAMETER Experiment Name: Zm_42deg_Heat_P Parameter: Timepoint (hr) Value: 6
  misc_feature: MA Experiment 108523 PARAMETER Experiment Name: Zm_42deg_Heat_P Parameter: Tissue Value: Aerial
  misc_feature: MA Experiment ID: 108527 Result: Down-regulated in Transcription
  misc_feature: MA Experiment 108527 PARAMETER Experiment Name: Zm_5mM_NO_P Parameter: Age (day) Value: 8
  misc_feature: MA Experiment 108527 PARAMETER Experiment Name: Zm_5mM_NO_P Parameter: Organism Value: Zea mays
  misc_feature: MA Experiment 108527 PARAMETER Experiment Name: Zm_5mM_NO_P Parameter: Plant Line Value: 35A19
  misc_feature: MA Experiment 108527 PARAMETER Experiment Name: Zm_5mM_NO_P Parameter: Timepoint (hr) Value: 6
  misc_feature: MA Experiment 108527 PARAMETER Experiment Name: Zm_5mM_NO_P Parameter: Tissue Value: Aerial
  misc_feature: MA Experiment 108527 PARAMETER Experiment Name: Zm_5mM_NO_P Parameter: Treatment Value: 5mM NO vs. No Treatment
  misc_feature: MA Experiment ID: 108535 Result: Up-regulated in Transcription
  misc_feature: MA Experiment 108535 PARAMETER Experiment Name: Zm_Meristem_P Parameter: Age (day) Value: 8
  misc_feature: MA Experiment 108535 PARAMETER Experiment Name: Zm_Meristem_P Parameter: Organism Value: Zea mays
  misc_feature: MA Experiment 108535 PARAMETER Experiment Name: Zm_Meristem_P Parameter: Plant Line Value: 35A19
  misc_feature: MA Experiment 108535 PARAMETER Experiment Name: Zm_Meristem_P Parameter: Tissue Value: Root Meristem vs. Above Root Meristem
  misc_feature: MA Experiment ID: 108540 Result: Down-regulated in Transcription
  misc_feature: MA Experiment 108540 PARAMETER Experiment Name: Zm_20percent_PEG_P Parameter: Age (day) Value: 8
  misc_feature: MA Experiment 108540 PARAMETER Experiment Name: Zm_20percent_PEG_P Parameter: Organism Value: Zea mays
  misc_feature: MA Experiment 108540 PARAMETER Experiment Name: Zm_20percent_PEG_P Parameter: Plant Line Value: 35A19
  misc_feature: MA Experiment 108540 PARAMETER Experiment Name: Zm_20percent_PEG_P Parameter: Timepoint (hr) Value: 6
  misc_feature: MA Experiment 108540 PARAMETER Experiment Name: Zm_20percent_PEG_P Parameter: Tissue Value: Aerial
  misc_feature: MA Experiment 108540 PARAMETER Experiment Name: Zm_20percent_PEG_P Parameter: Treatment Value: 20percent PEG vs. No Treatment
  misc_feature: MA Experiment ID: 108544 Result: Down-regulated in Transcription
  misc_feature: MA Experiment ID: 108556 Result: Down-regulated in Transcription
  misc_feature: MA Experiment 108556 PARAMETER Experiment Name: Zm_Drought_P Parameter: Age (day) Value: 9
  misc_feature: MA Experiment 108556 PARAMETER Experiment Name: Zm_Drought_P Parameter: Organism Value: Zea mays
  misc_feature: MA Experiment 108556 PARAMETER Experiment Name: Zm_Drought_P Parameter: Plant Line Value: 35A19
  misc_feature: MA Experiment 108556 PARAMETER Experiment Name: Zm_Drought_P Parameter: Timepoint (hr) Value: 24
  misc_feature: MA Experiment 108556 PARAMETER Experiment Name: Zm_Drought_P Parameter: Tissue Value: Aerial
  misc_feature: MA Experiment 108556 PARAMETER Experiment Name: Zm_Drought_P Parameter: Treatment Value: Drought vs. No Drought
  misc_feature: MA Experiment ID: 108559 Result: Down-regulated in Transcription
  misc_feature: MA Experiment 108559 PARAMETER Experiment Name: Zm_5mM_NO_P Parameter: Age (day) Value: 8
  misc_feature: MA Experiment 108559 PARAMETER Experiment Name: Zm_5mM_NO_P Parameter: Organism Value: Zea mays
  misc_feature: MA Experiment 108559 PARAMETER Experiment Name: Zm_5mM_NO_P Parameter: Plant Line Value: 35A19
  misc_feature: MA Experiment 108559 PARAMETER Experiment Name: Zm_5mM_NO_P Parameter: Timepoint (hr) Value: 12
  misc_feature: MA Experiment 108559 PARAMETER Experiment Name: Zm_5mM_NO_P Parameter: Tissue Value: Aerial
  misc_feature: MA Experiment 108559 PARAMETER Experiment Name: Zm_5mM_NO_P Parameter: Treatment Value: 5mM NO vs. No Treatment
  misc_feature: MA Experiment ID: 108597 Result: Down-regulated in Transcription
  misc_feature: MA Experiment 108597 PARAMETER Experiment Name: Zm_100uM_ABA_P Parameter: Age (day) Value: 9
  misc_feature: MA Experiment 108597 PARAMETER Experiment Name: Zm_100uM_ABA_P Parameter: Organism Value: Zea mays
  misc_feature: MA Experiment 108597 PARAMETER Experiment Name: Zm_100uM_ABA_P Parameter: Plant Line Value: 35A19
  misc_feature: MA Experiment 108597 PARAMETER Experiment Name: Zm_100uM_ABA_P Parameter: Timepoint (hr) Value: 24
  misc_feature: MA Experiment 108597 PARAMETER Experiment Name: Zm_100uM_ABA_P Parameter: Tissue Value: Aerial
  misc_feature: MA Experiment 108597 PARAMETER Experiment Name: Zm_100uM_ABA_P Parameter: Treatment Value: 100uM ABA vs. No Treatment
  misc_feature: MA Experiment ID: 108689 Result: Down-regulated in Transcription
  misc_feature: MA Experiment 108689 PARAMETER Experiment Name: Zm_Drought_Roots_P Parameter: Age (day) Value: 9
  misc_feature: MA Experiment 108689 PARAMETER Experiment Name: Zm_Drought_Roots_P Parameter: Organism Value: Zea mays
  misc_feature: MA Experiment 108689 PARAMETER Experiment Name: Zm_Drought_Roots_P Parameter: Plant Line Value: 35A19
  misc_feature: MA Experiment 108689 PARAMETER Experiment Name: Zm_Drought_Roots_P Parameter: Timepoint (hr) Value: 24
  misc_feature: MA Experiment 108689 PARAMETER Experiment Name: Zm_Drought_Roots_P Parameter: Tissue Value: Roots
  misc_feature: MA Experiment 108689 PARAMETER Experiment Name: Zm_Drought_Roots_P Parameter: Treatment Value: Drought vs. No Drought
  misc_feature: MA Experiment ID: 20000478 Result: Down-regulated in Transcription
  misc_feature: MA Experiment 20000478 PARAMETER Experiment Name: Zm_5mM_SA_P Parameter: Age (day) Value: 11
  misc_feature: MA Experiment 20000478 PARAMETER Experiment Name: Zm_5mM_SA_P Parameter: Organism Value: Zea mays
  misc_feature: MA Experiment 20000478 PARAMETER Experiment Name: Zm_5mM_SA_P Parameter: Plant Line Value: 35A19
  misc_feature: MA Experiment 20000478 PARAMETER Experiment Name: Zm_5mM_SA_P Parameter: Timepoint (hr) Value: 72
  misc_feature: MA Experiment 20000478 PARAMETER Experiment Name: Zm_5mM_SA_P Parameter: Tissue Value: Aerial
  misc_feature: MA Experiment 20000478 PARAMETER Experiment Name: Zm_5mM_SA_P Parameter: Treatment Value: 5mM SA vs. No Treatment
  misc_feature: MA Experiment ID: 20000487 Result: Down-regulated in Transcription
  misc_feature: MA Experiment 20000487 PARAMETER Experiment Name: Zm_50mM_NH4NO3_L_to_H_P Parameter: Organism Value: Zea mays
  misc_feature: MA Experiment 20000487 PARAMETER Experiment Name: Zm_50mM_NH4NO3_L_to_H_P Parameter: Timepoint (hr) Value: 4
  misc_feature: MA Experiment 20000487 PARAMETER Experiment Name: Zm_50mM_NH4NO3_L_to_H_P Parameter: Tissue Value: Leaves
  misc_feature: MA Experiment 20000487 PARAMETER Experiment Name: Zm_50mM_NH4NO3_L_to_H_P Parameter: Treatment Value: 50mM NH4NO3 vs. 100mM Mannitol
  misc_feature: MA Experiment ID: 20000535 Result: Up-regulated in Transcription
  misc_feature: MA Experiment 20000535 PARAMETER Experiment Name: Zm_Hybrid_Seed_Dev_P Parameter: DAP Value: 30 vs. 12
  misc_feature: MA Experiment 20000535 PARAMETER Experiment Name: Zm_Hybrid_Seed_Dev_P Parameter: Organism Value: Zea mays
  misc_feature: MA Experiment 20000535 PARAMETER Experiment Name: Zm_Hybrid_Seed_Dev_P Parameter: Plant Line Value: 35A19
  misc_feature: MA Experiment 20000535 PARAMETER Experiment Name: Zm_Hybrid_Seed_Dev_P Parameter: Tissue Value: Embryo vs. Unfert Floret
  misc_feature: MA Experiment ID: 20000626 Result: Down-regulated in Transcription
  misc_feature: MA Experiment 20000626 PARAMETER Experiment Name: Zm_Herbicide-Treatments_P Parameter: Timepoint (hr) Value: 12
  misc_feature: MA Experiment 20000626 PARAMETER Experiment Name: Zm_Herbicide-Treatments_P Parameter: Tissue Value: Aerial
  misc_feature: MA Experiment 20000626 PARAMETER Experiment Name: Zm_Herbicide-Treatments_P Parameter: Treatment Value: Roundup vs. No Treatment
  misc_feature: MA Experiment ID: 20000627 Result: Down-regulated in Transcription
  misc_feature: MA Experiment 20000627 PARAMETER Experiment Name: Zm_Herbicide-Treatments_P Parameter: Timepoint (hr) Value: 12
  misc_feature: MA Experiment 20000627 PARAMETER Experiment Name: Zm_Herbicide-Treatments_P Parameter: Tissue Value: Aerial
  misc_feature: MA Experiment 20000627 PARAMETER Experiment Name: Zm_Herbicide-Treatments_P Parameter: Treatment Value: Finale vs. No Treatment
  misc_feature: MA Experiment ID: 20000628 Result: Down-regulated in Transcription
  misc_feature: MA Experiment 20000628 PARAMETER Experiment Name: Zm_Herbicide-Treatments_P Parameter: Timepoint (hr) Value: 12
  misc_feature: MA Experiment 20000628 PARAMETER Experiment Name: Zm_Herbicide-Treatments_P Parameter: Tissue Value: Aerial
  misc_feature: MA Experiment 20000628 PARAMETER Experiment Name: Zm_Herbicide-Treatments_P Parameter: Treatment Value: Glean vs. No Treatment
  misc_feature: MA Experiment ID: 20000629 Result: Down-regulated in Transcription
  misc_feature: MA Experiment 20000629 PARAMETER Experiment Name: Zm_Herbicide-Treatments_P Parameter: Timepoint (hr) Value: 12
  misc_feature: MA Experiment 20000629 PARAMETER Experiment Name: Zm_Herbicide-Treatments_P Parameter: Tissue Value: Aerial
  misc_feature: MA Experiment 20000629 PARAMETER Experiment Name: Zm_Herbicide-Treatments_P Parameter: Treatment Value: Trimec vs. No Treatment
  misc_feature: MA Experiment ID: 20000632 Result: Down-regulated in Transcription
  misc_feature: MA Experiment 20000632 PARAMETER Experiment Name: Zm_Herbicide-Treatments_P Parameter: Timepoint (hr) Value: 4
  misc_feature: MA Experiment 20000632 PARAMETER Experiment Name: Zm_Herbicide-Treatments_P Parameter: Tissue Value: Aerial
  misc_feature: MA Experiment 20000632 PARAMETER Experiment Name: Zm_Herbicide-Treatments_P Parameter: Treatment Value: Glean vs. No Treatment
  misc_feature: MA Experiment ID: 20000633 Result: Down-regulated in Transcription
  misc_feature: MA Experiment 20000633 PARAMETER Experiment Name: Zm_Herbicide-Treatments_P Parameter: Timepoint (hr) Value: 4
  misc_feature: MA Experiment 20000633 PARAMETER Experiment Name: Zm_Herbicide-Treatments_P Parameter: Tissue Value: Aerial
  misc_feature: MA Experiment 20000633 PARAMETER Experiment Name: Zm_Herbicide-Treatments_P Parameter: Treatment Value: Trimec vs. No Treatment
  misc_feature: MA Experiment ID: 20001614 Result: Up-regulated in Transcription
  misc_feature: MA Experiment 20001614 PARAMETER Experiment Name: Zm_50ppm_KNO3_L-to-H_P Parameter: Age (day) Value: 21
  misc_feature: MA Experiment 20001614 PARAMETER Experiment Name: Zm_50ppm_KNO3_L-to-H_P Parameter: Organism Value: Zea mays
  misc_feature: MA Experiment 20001614 PARAMETER Experiment Name: Zm_50ppm_KNO3_L-to-H_P Parameter: Plant Line Value: 35A19
  misc_feature: MA Experiment 20001614 PARAMETER Experiment Name: Zm_50ppm_KNO3_L-to-H_P Parameter: Timepoint (hr) Value: 48
  misc_feature: MA Experiment 20001614 PARAMETER Experiment Name: Zm_50ppm_KNO3_L-to-H_P Parameter: Tissue Value: Roots
  misc_feature: MA Experiment 20001614 PARAMETER Experiment Name: Zm_50ppm_KNO3_L-to-H_P Parameter: Treatment Value: 50ppm KNO3 vs. 50ppm KCl
aatccatcaatcctcatcgccacccaacccgccaagtccccaagcaagttgagcatccatccatccatggcgggaggcaagtccaccggcaatgccgcgcgcagcaggaagcgcgtcgaggcaaccgtcctcaagcgctccagggacgggagcgccttcaccagatgcgaggcctgcaacaaggacgtccccgtcgtcctcatcgacatgcacagctgcagcctcgaggagaagatcaggatgacgctcgaggcgcaggtcgtcgagaagaccgtcgaggtcgccagtgcggaccgcaagaagtcctccgccaagggaggtggtaacaaggacgccaagcgcaagcgctcgcccaccgccttcttcctcttcatggacgacttcaggaaggagttcaaggccacccatcctgacaacaagagtgtcgccaccgttgcaaaggaaggaggggagaggtggaagtccatgacagacgaggagaagaagccttacattgaaaaggccgcggagctcaaggctgaggccgagaatggcgagggcagtggtgagaacaatgttgccactaagaaagccaagacagatgaccaggaggtggatcagccagcaaagaagctcagaaagtgcaaggctcttcacgaggacgaggatgacgatggtgaccaggaagacgaggatgagaagaacgagttggatgacgacatgtagatggcagaggccactctcccatctctgtaaatggatggcagatgtgagcgtctagttagaaatgtcacttgtttcaagctagagggaagaggaagatagtcagtagtgaatatcccccgttatcgttgctacatgaatgaactattctatgatgcagttctgtcc

SEQ ID NO: 10194 - protein, 234 aa, Zea mays subsp. mays
  peptide (1)..(234): Ceres Seq. ID no. 12400390
  misc_feature (115)..(181): Pfam Name: HMG (high mobility group) box Pfam Description: HMG (high mobility group) box
  misc_feature (81)..(234): Homolog of NCBI NO: 17017396 NR Description: HMG type nucleosome/chromatin assembly factor D mays] >gi|22135475|gb|AAM93218.1|AF527617_1 nucleasome/chromatin
  misc_feature (26)..(234): Homolog of NCBI NO: 38637289 NR Description: putative HMG type nucleosome/chromatin assembly
  misc_feature (23)..(234): Homolog of NCBI NO: 18420676 NR Description: expressed protein; protein id: At5g23420.1, by cDNA: 207075. [Arabidopsis thaliana] unknown [Arabidopsis thaliana] >gi|26452394|dbj|BAC43282.1|
  misc_feature (23)..(234): Homolog of NCBI NO: 9759080 NR Description: gene_id:K19M13.4~unknown protein [Arabidopsis
  misc_feature (94)..(226): Homolog of NCBI NO: 3885888 NR Description: high mobility group protein [Oryza sativa]
  misc_feature (92)..(226): Homolog of NCBI NO: 123378 NR Description: DNA-BINDING PROTEIN MNB1B (HMG1-LIKE PROTEIN)
  misc_feature (92)..(226): Homolog of NCBI NO: 7446229 NR Description: high mobility group protein MNB1b - maize
  misc_feature (85)..(226): Homolog of NCBI NO: 729738 NR Description: HMG1/2-LIKE PROTEIN >gi|100791|pir||S18991 high
  misc_feature (99)..(226): Homolog of NCBI NO: 7446227 NR Description: high mobility group protein HMGc2 - maize
  misc_feature (95)..(227): Homolog of NCBI NO: 7446226 NR Description: high mobility group protein HMGc1 - maize HMGc1 [Zea mays] >gi|5441504|emb|CAB46753.1| HMGc1 protein [Zea
NPSILIATQPAKSPSKLSIHPSMAGGKSTGNAARSRKRVEATVLKRSRDGSAFTRCEACNKDVPVVLIDMHSCSLEEKIRMTLEAQVVEKTVEVASADRKKSSAKGGGNKDAKRKRSPTAFFLFMDDFRKEFKATHPDNKSVATVAKEGGERWKSMTDEEKKPYIEKAAELKAEAENGEGSGENNVATKKAKTDDQEVDQPAKKLRKCKALHEDEDDDGDQEDEDEKNELDDDM

SEQ ID NO: 10195 - protein, 212 aa, Zea mays subsp. mays
  peptide (1)..(212): Ceres Seq. ID no. 12400391
  misc_feature (93)..(159): Pfam Name: HMG (high mobility group) box Pfam Description: HMG (high mobility group) box
  misc_feature (59)..(212): Homolog of NCBI NO: 17017396 NR Description: HMG type nucleosome/chromatin assembly factor D mays] >gi|22135475|gb|AAM93218.1|AF527617_1 nucleasome/chromatin
  misc_feature (4)..(212): Homolog of NCBI NO: 38637289 NR Description: putative HMG type nucleosome/chromatin assembly
  misc_feature (1)..(212): Homolog of NCBI NO: 18420676 NR Description: expressed protein; protein id: At5g23420.1, by cDNA: 207075. [Arabidopsis thaliana] unknown [Arabidopsis thaliana] >gi|26452394|dbj|BAC43282.1|
  misc_feature (1)..(212): Homolog of NCBI NO: 9759080 NR Description: gene_id:K19M13.4~unknown protein [Arabidopsis
  misc_feature (72)..(204): Homolog of NCBI NO: 3885888 NR Description: high mobility group protein [Oryza sativa]
  misc_feature (70)..(204): Homolog of NCBI NO: 123378 NR Description: DNA-BINDING PROTEIN MNB1B (HMG1-LIKE PROTEIN)
  misc_feature (70)..(204): Homolog of NCBI NO: 7446229 NR Description: high mobility group protein MNB1b - maize
  misc_feature (63)..(204): Homolog of NCBI NO: 729738 NR Description: HMG1/2-LIKE PROTEIN >gi|100791|pir||S18991 high
  misc_feature (77)..(204): Homolog of NCBI NO: 7446227 NR Description: high mobility group protein HMGc2 - maize
  misc_feature (73)..(205): Homolog of NCBI NO: 7446226 NR Description: high mobility group protein HMGc1 - maize HMGc1 [Zea mays] >gi|5441504|emb|CAB46753.1| HMGc1 protein [Zea
MAGGKSTGNAARSRKRVEATVLKRSRDGSAFTRCEACNKDVPVVLIDMHSCSLEEKIRMTLEAQVVEKTVEVASADRKKSSAKGGGNKDAKRKRSPTAFFLFMDDFRKEFKATHPDNKSVATVAKEGGERWKSMTDEEKKPYIEKAAELKAEAENGEGSGENNVATKKAKTDDQEVDQPAKKLRKCKALHEDEDDDGDQEDEDEKNELDDDM

SEQ ID NO: 10196 - protein, 165 aa, Zea mays subsp. mays
  peptide (1)..(165): Ceres Seq. ID no. 12400392
  misc_feature (46)..(112): Pfam Name: HMG (high mobility group) box Pfam Description: HMG (high mobility group) box
  misc_feature (12)..(165): Homolog of NCBI NO: 17017396 NR Description: HMG type nucleosome/chromatin assembly factor D mays] >gi|22135475|gb|AAM93218.1|AF527617_1 nucleasome/chromatin
  misc_feature (1)..(165): Homolog of NCBI NO: 38637289 NR Description: putative HMG type nucleosome/chromatin assembly
  misc_feature (1)..(165): Homolog of NCBI NO: 18420676 NR Description: expressed protein; protein id: At5g23420.1, by cDNA: 207075. [Arabidopsis thaliana] unknown [Arabidopsis thaliana] >gi|26452394|dbj|BAC43282.1|
  misc_feature (1)..(165): Homolog of NCBI NO: 9759080 NR Description: gene_id:K19M13.4~unknown protein [Arabidopsis
  misc_feature (25)..(157): Homolog of NCBI NO: 3885888 NR Description: high mobility group protein [Oryza sativa]
  misc_feature (23)..(157): Homolog of NCBI NO: 123378 NR Description: DNA-BINDING PROTEIN MNB1B (HMG1-LIKE PROTEIN)
  misc_feature (23)..(157): Homolog of NCBI NO: 7446229 NR Description: high mobility group protein MNB1b - maize
  misc_feature (16)..(157): Homolog of NCBI NO: 729738 NR Description: HMG1/2-LIKE PROTEIN >gi|100791|pir||S18991 high
  misc_feature (30)..(157): Homolog of NCBI NO: 7446227 NR Description: high mobility group protein HMGc2 - maize
  misc_feature (26)..(158): Homolog of NCBI NO: 7446226 NR Description: high mobility group protein HMGc1 - maize HMGc1 [Zea mays] >gi|5441504|emb|CAB46753.1| HMGc1 protein [Zea
MHSCSLEEKIRMTLEAQVVEKTVEVASADRKKSSAKGGGNKDAKRKRSPTAFFLFMDDFRKEFKATHPDNKSVATVAKEGGERWKSMTDEEKKPYIEKAAELKAEAENGEGSGENNVATKKAKTDDQEVDQPAKKLRKCKALHEDEDDDGDQEDEDEKNELDDDM

SEQ ID NO: 10197 - DNA, 1307 bp, Zea mays subsp. mays
  misc_feature (1)..(1307): Ceres Seq. ID no. 12400773
  misc_feature: MA Experiment ID: 108528 Result: Up-regulated in Transcription
  misc_feature: MA Experiment 108528 PARAMETER Experiment Name: Zm_Imbibed_Seeds_P Parameter: Age (day) Value: 5 vs. 2
  misc_feature: MA Experiment 108528 PARAMETER Experiment Name: Zm_Imbibed_Seeds_P Parameter: Organism Value: Zea mays
  misc_feature: MA Experiment 108528 PARAMETER Experiment Name: Zm_Imbibed_Seeds_P Parameter: Plant Line Value: 35A19
  misc_feature: MA Experiment 108528 PARAMETER Experiment Name: Zm_Imbibed_Seeds_P Parameter: Tissue Value: Aerial vs. Embryo
  misc_feature: MA Experiment ID: 108530 Result: Up-regulated in Transcription
  misc_feature: MA Experiment 108530 PARAMETER Experiment Name: Zm_Imbibed_Seeds_P Parameter: Age (day) Value: 6 vs. 2
  misc_feature: MA Experiment 108530 PARAMETER Experiment Name: Zm_Imbibed_Seeds_P Parameter: Organism Value: Zea mays
  misc_feature: MA Experiment 108530 PARAMETER Experiment Name: Zm_Imbibed_Seeds_P Parameter: Plant Line Value: 35A19
  misc_feature: MA Experiment 108530 PARAMETER Experiment Name: Zm_Imbibed_Seeds_P Parameter: Tissue Value: Aerial vs. Embryo
  misc_feature: MA Experiment ID: 108547 Result: Up-regulated in Transcription
  misc_feature: MA Experiment 108547 PARAMETER Experiment Name: Zm_Imbibed_Seeds_P Parameter: Age (day) Value: 4 vs. 2
  misc_feature: MA Experiment 108547 PARAMETER Experiment Name: Zm_Imbibed_Seeds_P Parameter: Organism Value: Zea mays
  misc_feature: MA Experiment 108547 PARAMETER Experiment Name: Zm_Imbibed_Seeds_P Parameter: Plant Line Value: 35A19
  misc_feature: MA Experiment 108547 PARAMETER Experiment Name: Zm_Imbibed_Seeds_P Parameter: Tissue Value: Aerial vs. Embryo
  misc_feature: MA Experiment ID: 108556 Result: Down-regulated in Transcription
  misc_feature: MA Experiment 108556 PARAMETER Experiment Name: Zm_Drought_P Parameter: Age (day) Value: 9
  misc_feature: MA Experiment 108556 PARAMETER Experiment Name: Zm_Drought_P Parameter: Organism Value: Zea mays
  misc_feature: MA Experiment 108556 PARAMETER Experiment Name: Zm_Drought_P Parameter: Plant Line Value: 35A19
  misc_feature: MA Experiment 108556 PARAMETER Experiment Name: Zm_Drought_P Parameter: Timepoint (hr) Value: 24
  misc_feature: MA Experiment 108556 PARAMETER Experiment Name: Zm_Drought_P Parameter: Tissue Value: Aerial
  misc_feature: MA Experiment 108556 PARAMETER Experiment Name: Zm_Drought_P Parameter: Treatment Value: Drought vs. No Drought
  misc_feature: MA Experiment ID: 20000478 Result: Down-regulated in Transcription
  misc_feature: MA Experiment 20000478 PARAMETER Experiment Name: Zm_5mM_SA_P Parameter: Age (day) Value: 11
  misc_feature: MA Experiment 20000478 PARAMETER Experiment Name: Zm_5mM_SA_P Parameter: Organism Value: Zea mays
  misc_feature: MA Experiment 20000478 PARAMETER Experiment Name: Zm_5mM_SA_P Parameter: Plant Line Value: 35A19
  misc_feature: MA Experiment 20000478 PARAMETER Experiment Name: Zm_5mM_SA_P Parameter: Timepoint (hr) Value: 72
  misc_feature: MA Experiment 20000478 PARAMETER Experiment Name: Zm_5mM_SA_P Parameter: Tissue Value: Aerial
  misc_feature: MA Experiment 20000478 PARAMETER Experiment Name: Zm_5mM_SA_P Parameter: Treatment Value: 5mM SA vs. No Treatment
  misc_feature: MA Experiment ID: 20000479 Result: Down-regulated in Transcription
  misc_feature: MA Experiment 20000479 PARAMETER Experiment Name: Zm_Drought_P Parameter: Age (day) Value: 10
  misc_feature: MA Experiment 20000479 PARAMETER Experiment Name: Zm_Drought_P Parameter: Organism Value: Zea mays
  misc_feature: MA Experiment 20000479 PARAMETER Experiment Name: Zm_Drought_P Parameter: Plant Line Value: 35A19
  misc_feature: MA Experiment 20000479 PARAMETER Experiment Name: Zm_Drought_P Parameter: Timepoint (hr) Value: 48
  misc_feature: MA Experiment 20000479 PARAMETER Experiment Name: Zm_Drought_P Parameter: Tissue Value: Aerial
  misc_feature: MA Experiment 20000479 PARAMETER Experiment Name: Zm_Drought_P Parameter: Treatment Value: Drought vs. No Drought
  misc_feature: MA Experiment ID: 20000480 Result: Down-regulated in Transcription
  misc_feature: MA Experiment 20000480 PARAMETER Experiment Name: Zm_Drought_P Parameter: Age (day) Value: 11
  misc_feature: MA Experiment 20000480 PARAMETER Experiment Name: Zm_Drought_P Parameter: Organism Value: Zea mays
  misc_feature: MA Experiment 20000480 PARAMETER Experiment Name: Zm_Drought_P Parameter: Plant Line Value: 35A19
  misc_feature: MA Experiment 20000480 PARAMETER Experiment Name: Zm_Drought_P Parameter: Timepoint (hr) Value: 72
  misc_feature: MA Experiment 20000480 PARAMETER Experiment Name: Zm_Drought_P Parameter: Tissue Value: Aerial
  misc_feature: MA Experiment 20000480 PARAMETER Experiment Name: Zm_Drought_P Parameter: Treatment Value: Drought vs. No Drought
ctcgccgcccccgtctcctctcctctcctctcctccgcatccacggccgcaggagncagccagccactcgacgatctagtcgtctctctctccccgctctgccgcctcgctgccgcggcttcccgtcggctggaggatgaaggtcacggtcgtgtcccggagcggccgggaggtcgtcaagggcggcatcgacctcaaggactcggccaaggtcgcggacctgcaggaggccatccatgccaggactaagaagtattatccttctaggcagcggctcaccctcccccttcaacctggaaaaggcgggaagccagttgtcctcagtccaaaggccagcctgctagaatactgctagaagggttctgggtcactgacagtggtcttcaaagatttagggccacaggtctactacagcacactgttcttcttcgagtacctgggtcctctcatcactaccccatgttctactatctgcccgtctacaaatacttcgggtacgagggggagcgggccatgcaccctgtccagacctacgccatgtactactggtgcttccactacttcaagcggatcatggagacgttcttcgtgcaccgcttcagccacgcgacgtcgccgctctcgaacgtcttcaggaactgtgcctactactggaccttcggcgcttacattgcttactactgcaaccacccgctgtacaccccagtgagtgacctgcagatgaagattgggtttggttttggggtcgtctgccaggtcgcgaacttctactgccacatcctgctgcggaacctcaggagcccaagcggcagcggcgggtaccagatcccccgcggtttcttgttcaacatcgtgacctgcgccaattacaccaccgagatctaccagtgggtcggcttcaacatcgccacacagaccgtggcaggttacgtcttccttgtcgtggcggcgggcatcatgaccaactgggcgctcggcaagcacagccgtctgaagaagctgtttgacggcaaggatgggaggcccaagtaccctcgccggtgggtgattctccctccgttcctgtgaagaggcggtggtggtggctcactgttggtggtcggcccattgtgattcgatgtctacagacagttgtactgtactaatcgtgcctgtttagcggttgaacttggattccgttgtccgaagtttctaatccgaaagatggatttcattttcttcttcttcttcttagcattatgtcactgtctcacgtcgtcctgtctcaatacagtctaaggttcatgtgatgttatccccatttgtcc

SEQ ID NO: 10198 - protein, 202 aa, Zea mays subsp. mays; identical to SEQ ID NO: 2383
  peptide (1)..(202): Ceres Seq. ID no. 12400774
  misc_feature (50)..(202): Pfam Name: 3-oxo-5-alpha-steroid 4-dehydrogenase Pfam Description: 3-oxo-5-alpha-steroid 4-dehydrogenase
  misc_feature (1)..(202): Homolog of NCBI NO: 34895848 NR Description: putative glycoprotein [Oryza sativa (japonica group)] >gi|9663963|dbj|BAB03604.1| putative glycoprotein [Oryza
  misc_feature (1)..(202): Homolog of NCBI NO: 15233250 NR Description: synaptic glycoprotein SC2-like protein; protein At3g55360.1, supported by cDNA: 6774., supported by cDNA: supported by cDNA: gi_20148508 [Arabidopsis thaliana]
  misc_feature (1)..(202): Homolog of NCBI NO: 25004880 NR Description: steroid 5-alpha reductase [Cicer arietinum]
  misc_feature (1)..(202): Homolog of NCBI NO: 39590267 NR Description: Hypothetical protein CBG11196 [Caenorhabditis
  misc_feature (1)..(202): Homolog of NCBI NO: 24657023 NR Description: CG10849-PA [Drosophila melanogaster]
  misc_feature (1)..(202): Homolog of NCBI NO: 27819746 NR Description: SD09294p [Drosophila melanogaster]
  misc_feature (1)..(202): Homolog of NCBI NO: 17531783 NR Description: Synaptic glycoprotein SC2 (35.1 kD) elegans] >gi|7206593|gb|AAF39753.1| Hypothetical protein C15F1.6
  misc_feature (1)..(183): Homolog of NCBI NO: 13111809 NR Description: Unknown (protein for IMAGE:2901253) [Homo sapiens]
  misc_feature (1)..(183): Homolog of NCBI NO: 24475816 NR Description: glycoprotein, synaptic 2; synaptic glycoprotein [Homo sapiens] >gi|20177939|sp|Q9NZ01|GSN2_HUMAN Synaptic
  misc_feature (1)..(183): Homolog of NCBI NO: 19924091 NR Description: synaptic glycoprotein SC2 [Rattus norvegicus]

SEQ ID NO: 10199 - protein, 184 aa, Zea mays subsp. mays; identical to SEQ ID NO: 2384
  peptide (1)..(184): Ceres Seq. ID no. 12400775
  misc_feature (32)..(184): Pfam Name: 3-oxo-5-alpha-steroid 4-dehydrogenase Pfam Description: 3-oxo-5-alpha-steroid 4-dehydrogenase
  misc_feature (1)..(184): Homolog of NCBI NO: 34895848 NR Description: putative glycoprotein [Oryza sativa (japonica group)] >gi|9663963|dbj|BAB03604.1| putative glycoprotein [Oryza
  misc_feature (1)..(184): Homolog of NCBI NO: 15233250 NR Description: synaptic glycoprotein SC2-like protein; protein At3g55360.1, supported by cDNA: 6774., supported by cDNA: supported by cDNA: gi_20148508 [Arabidopsis thaliana]
  misc_feature (1)..(184): Homolog of NCBI NO: 25004880 NR Description: steroid 5-alpha reductase [Cicer arietinum]
  misc_feature (1)..(184): Homolog of NCBI NO: 39590267 NR Description: Hypothetical protein CBG11196 [Caenorhabditis
  misc_feature (1)..(184): Homolog of NCBI NO: 24657023 NR Description: CG10849-PA [Drosophila melanogaster]
  misc_feature (1)..(184): Homolog of NCBI NO: 27819746 NR Description: SD09294p [Drosophila melanogaster]
  misc_feature (1)..(184): Homolog of NCBI NO: 17531783 NR Description: Synaptic glycoprotein SC2 (35.1 kD) elegans] >gi|7206593|gb|AAF39753.1| Hypothetical protein C15F1.6
  misc_feature (1)..(165): Homolog of NCBI NO: 13111809 NR Description: Unknown (protein for IMAGE:2901253) [Homo sapiens]
  misc_feature (1)..(165): Homolog of NCBI NO: 24475816 NR Description: glycoprotein, synaptic 2; synaptic glycoprotein [Homo sapiens] >gi|20177939|sp|Q9NZ01|GSN2_HUMAN Synaptic
  misc_feature (1)..(165): Homolog of NCBI NO: 19924091 NR Description: synaptic glycoprotein SC2 [Rattus norvegicus]

SEQ ID NO: 10200 - protein, 176 aa, Zea mays subsp. mays
  peptide (1)..(176): Ceres Seq. ID no. 12400776
  misc_feature (24)..(176): Pfam Name: 3-oxo-5-alpha-steroid 4-dehydrogenase Pfam Description: 3-oxo-5-alpha-steroid 4-dehydrogenase
  misc_feature (1)..(176): Homolog of NCBI NO: 34895848 NR Description: putative glycoprotein [Oryza sativa (japonica group)] >gi|9663963|dbj|BAB03604.1| putative glycoprotein [Oryza
  misc_feature (1)..(176): Homolog of NCBI NO: 15233250 NR Description: synaptic glycoprotein SC2-like protein; protein At3g55360.1, supported by cDNA: 6774., supported by cDNA: supported by cDNA: gi_20148508 [Arabidopsis thaliana]
  misc_feature (1)..(176): Homolog of NCBI NO: 25004880 NR Description: steroid 5-alpha reductase [Cicer arietinum]
  misc_feature (1)..(176): Homolog of NCBI NO: 39590267 NR Description: Hypothetical protein CBG11196 [Caenorhabditis
  misc_feature (1)..(176): Homolog of NCBI NO: 24657023 NR Description: CG10849-PA [Drosophila melanogaster]
  misc_feature (1)..(176): Homolog of NCBI NO: 27819746 NR Description: SD09294p [Drosophila melanogaster]
  misc_feature (1)..(176): Homolog of NCBI NO: 17531783 NR Description: Synaptic glycoprotein SC2 (35.1 kD) elegans] >gi|7206593|gb|AAF39753.1| Hypothetical protein C15F1.6
  misc_feature (1)..(157): Homolog of NCBI NO: 13111809 NR Description: Unknown (protein for IMAGE:2901253) [Homo sapiens]
  misc_feature (1)..(157): Homolog of NCBI NO: 19924091 NR Description: synaptic glycoprotein SC2 [Rattus norvegicus]
  misc_feature (1)..(157): Homolog of NCBI NO: 24475816 NR Description: glycoprotein, synaptic 2; synaptic glycoprotein [Homo sapiens] >gi|20177939|sp|Q9NZ01|GSN2_HUMAN Synaptic
MYYWCFHYFKRIMETFFVHRFSHATSPLSNVFRNCAYYWTFGAYIAYYCNHPLYTPVSDLQMKIGFGFGVVCQVANFYCHILLRNLRSPSGSGGYQIPRGFLFNIVTCANYTTEIYQWVGFNIATQTVAGYVFLVVAAGIMTNWALGKHSRLKKLFDGKDGRPKYPRRWVILPPFL

SEQ ID NO: 10201 - DNA, 1046 bp, Zea mays subsp. mays
  misc_feature (1)..(1046): Ceres Seq. ID no. 12355410
  misc_feature: MA Experiment ID: 108543 Result: Up-regulated in Transcription
  misc_feature: MA Experiment ID: 108597 Result: Down-regulated in Transcription
  misc_feature: MA Experiment 108597 PARAMETER Experiment Name: Zm_100uM_ABA_P Parameter: Age (day) Value: 9
  misc_feature: MA Experiment 108597 PARAMETER Experiment Name: Zm_100uM_ABA_P Parameter: Organism Value: Zea mays
  misc_feature: MA Experiment 108597 PARAMETER Experiment Name: Zm_100uM_ABA_P Parameter: Plant Line Value: 35A19
  misc_feature: MA Experiment 108597 PARAMETER Experiment Name: Zm_100uM_ABA_P Parameter: Timepoint (hr) Value: 24
  misc_feature: MA Experiment 108597 PARAMETER Experiment Name: Zm_100uM_ABA_P Parameter: Tissue Value: Aerial
  misc_feature: MA Experiment 108597 PARAMETER Experiment Name: Zm_100uM_ABA_P Parameter: Treatment Value: 100uM ABA vs. No Treatment
attagctgtcgcgtcagttacgttttgcttgccctgttctcgttcggccttgacaacccggaaatcctccagccctctagtccccaacgacgcaggaagcaggatcgagccgaatcctccggaactcgccgccggggccaaccgacctcacactattgatcgaggatgtcgtacgcctacctcttcaagtacatcatcatcggcgacacaggcgtggggaagtcatgcctgctgctgcagttcacggataagcgcttccagcccgtgcacgatctcaccatcggcgttgaatttggcgcccgcatgatcaccatcgacaacaagcccatcaaactccagatttgggacacggctggccaagaatcattcagatctattactaggtcatactacagaggagctgctggagcccttttggtttatgatatcactaggagggagaccttcaatcatctcgcaagttggctagaagatgccaggcaacatgcaaatgctaacatgacagtgatgctgattggaaataaatgtgacctttctcataggcgtgctgtcagctatgaggaaggcgaacagtttgccaaggagcatggtctggtttttatggaggcatctgctaaaactgcacaaaacgtcgaggaggcattcattaagaccgctggtacaatatacaagaaaatccaagatggcatatttgatgtatcaaatgagtccaacgggatcaaagttggctatgctgttcccaactcatctggaggtggtgctggctcgtcctcacaggctggtggctgctgcagttgagcggtggcagcaagtcatacaattgcaagggttctctctgcagtatcttgatgtttgcctatagctggccccggatgatttgttctttcagccatcacgtttcaatccatgaacaaaccatcttcagtgttagttgtcattcaaacttgtgcgatctttctgtaaagccaatcattcacgattgctaacgtatgtgctttctgtaaccaaattgaaatcagttctatggtattctttgttcaaaatgt

SEQ ID NO: 10202 - protein, 210 aa, Zea mays subsp. mays
  peptide (1)..(210): Ceres Seq. ID no. 12355411
  misc_feature (8)..(169): Pfam Name: Ras family Pfam Description: Ras family
  misc_feature (1)..(210): Homolog of NCBI NO: 7438438 NR Description: GTP-binding protein yptm3 - maize
  misc_feature (1)..(210): Homolog of NCBI NO: 4837727 NR Description: small GTP binding protein Rab2 [Sporobolus
  misc_feature (1)..(210): Homolog of NCBI NO: 1346957 NR Description: RAS-RELATED PROTEIN RAB-2-B
  misc_feature (1)..(210): Homolog of NCBI NO: 1346956 NR Description: RAS-RELATED PROTEIN RAB-2-A
  misc_feature (1)..(210): Homolog of NCBI NO: 38344743 NR Description: OSJNBa0089K21.1 [Oryza sativa (japonica
  misc_feature (1)..(200): Homolog of NCBI NO: 38524287 NR Description: RAB-like small G-protein [Hordeum vulgare subsp.
  misc_feature (1)..(209): Homolog of NCBI NO: 15235981 NR Description: GTP-binding protein (At-RAB2); protein id:
  misc_feature (1)..(210): Homolog of NCBI NO: 1370176 NR Description: RAB2A [Lotus japonicus]
MSYAYLFKYIIIGDTGVGKSCLLLQFTDKRFQPVHDLTIGVEFGARMITIDNKPIKLQIWDTAGQESFRSITRSYYRGAAGALLVYDITRRETFNHLASWLEDARQHANANMTVMLIGNKCDLSHRRAVSYEEGEQFAKEHGLVFMEASAKTAQNVEEAFIKTAGTIYKKIQDGIFDVSNESNGIKVGYAVPNSSGGGAGSSSQAGGCCS

SEQ ID NO: 10203 - protein, 164 aa, Zea mays subsp. mays
  peptide (1)..(164): Ceres Seq. ID no. 12355412
  misc_feature (1)..(123): Pfam Name: Ras family Pfam Description: Ras family
  misc_feature (1)..(164): Homolog of NCBI NO: 7438438 NR Description: GTP-binding protein yptm3 - maize
  misc_feature (1)..(164): Homolog of NCBI NO: 4837727 NR Description: small GTP binding protein Rab2 [Sporobolus
  misc_feature (1)..(164): Homolog of NCBI NO: 1346957 NR Description: RAS-RELATED PROTEIN RAB-2-B
  misc_feature (1)..(164): Homolog of NCBI NO: 1346956 NR Description: RAS-RELATED PROTEIN RAB-2-A
  misc_feature (1)..(164): Homolog of NCBI NO: 38344743 NR Description: OSJNBa0089K21.1 [Oryza sativa (japonica
  misc_feature (1)..(154): Homolog of NCBI NO: 38524287 NR Description: RAB-like small G-protein [Hordeum vulgare subsp.
  misc_feature (1)..(163): Homolog of NCBI NO: 15235981 NR Description: GTP-binding protein (At-RAB2); protein id:
  misc_feature (1)..(164): Homolog of NCBI NO: 1370176 NR Description: RAB2A [Lotus japonicus]
MITIDNKPIKLQIWDTAGQESFRSITRSYYRGAAGALLVYDITRRETFNHLASWLEDARQHANANMTVMLIGNKCDLSHRRAVSYEEGEQFAKEHGLVFMEASAKTAQNVEEAFIKTAGTIYKKIQDGIFDVSNESNGIKVGYAVPNSSGGGAGSSSQAGGCCS

SEQ ID NO: 10204 - DNA, 2012 bp, Zea mays subsp. mays
  misc_feature (1)..(2012): Ceres Seq. ID no. 12386456
  misc_feature: MA Experiment ID: 108527 Result: Up-regulated in Transcription
  misc_feature: MA Experiment 108527 PARAMETER Experiment Name: Zm_5mM_NO_P Parameter: Age (day) Value: 8
  misc_feature: MA Experiment 108527 PARAMETER Experiment Name: Zm_5mM_NO_P Parameter: Organism Value: Zea mays
  misc_feature: MA Experiment 108527 PARAMETER Experiment Name: Zm_5mM_NO_P Parameter: Plant Line Value: 35A19
  misc_feature: MA Experiment 108527 PARAMETER Experiment Name: Zm_5mM_NO_P Parameter: Timepoint (hr) Value: 6
  misc_feature: MA Experiment 108527 PARAMETER Experiment Name: Zm_5mM_NO_P Parameter: Tissue Value: Aerial
  misc_feature: MA Experiment 108527 PARAMETER Experiment Name: Zm_5mM_NO_P Parameter: Treatment Value: 5mM NO vs. No Treatment
agcacacactcgcacgcacgagaaggccggagaggcggcgcacccggagaggcaaggcaagcgatccctctccctccctccctcgtatccaggacaacagcccgtgcgatccgatcccgatggcggcccggccggacgcgcgcagcggctactgcgccgcgacgcgcaccttccgtagcaagcgcgcggacgtcccgctccccgccgacgcggacctggacgtcgtcaggttcctcgcgtcccgccgccacgcgggcgtcgtcgcgctcgtcgacgctgccacgggccaccgggtcacgttccaggaactctggcgcgcggtggaaggggcggccaccgcgctcgccgcgccgccgctgtcgctccgcaagggccagatcgcgcttatcctctccccgaactccgtccacttccccgttgccgccctcgcagccatgtccctcggcgccgtcctcaccaccgccaacccgctcaacacgcccgccgagatcgccaagcaggtcgccgacgcgcgccccgtcgtcgccttcaccacccgcgacctcctccccaagctcccgcgcgccggcgccggcgccggcatccgcgtcgtcctcctcgagcccgaccgcctcccctccgaccctagccccgtcgtcgccaccatcggggagatctccgccacgccgcccgaccccacgcgccgccgggaccgcgtcacgcaggacgacccggccacgctgctctactcctcgggcaccacgggccccagcaagggcgtcgtcgccacgcaccggagcctcatctccatggtgcagatcatcatgtcgcgcttccgcctcgaggcctccaacaggaccgagaccttcctctgcacggtgcccatgttccacgtctacggcctcgtcgccttcgccacggggctgctcggctgcggcgccaccatcgtcgtgctctccaagtacgagctccccgagatgctgcgcgccatcaacgaatacggggtcacctacctcccactcgtgccgcccatcctcgtcgccatgctggcgtaccccaaccgcctgccgcttgggggcctgcgcaaggtgctctccggcggagcgccgctcagcaaggagctgatcgaggggtttaaggagaaatacccgcaggtggagatccttcaggggtacgggctgacagagagcacggctatcggcgcgtccacggactctgccgaggagagcagccggtacggcacggctgggctgctgtcgccaagcaccgaggctaagatcgtcgacccagagaccggcgaggcgctgccggtgaaccgcaccggcgagctctggatccgggggccatacgtcatgaaagggtatttcaagaacgcggaggcaacacaatcaacattgacgcctgatggatggctcaagactggggatctctgctacatagatgaggatggttatctcttcgttgtggatcgtctgaaggagttgatcaaatacaaagggtaccaggtgcctccggcagagttggaagctcttttgctaacacatccagaaatcgaagatgtcaccgttataccgtttcccgaccgtgaggtcggccagttcccaatggcctacgtagtgaggaagaaagggagcaatttgtcagagcgcgaggtgatggagttcgttgcgaaacaggtagcgccttacaagaaggttaggaaggtggcgtttgtggcggagattcccaagaacgcgtccggcaagattctgaggaaggatctcatcaagctcgccacatccaaatccaaactatgaaaattgtttttcgtgtttacagtgctggaatacgcttgtcgtccacgagcggcgagccattctctacgctgccccggtattttggttgtagaatgcttgtacaactgaagatcccgtcggctatgtgcttgcttgtgtacagtgctctgttctcgtacaatacaatattgggagggaatactaggcgtctgtacgtaggcttggatggaaataatatccggtaatttcagtgttggt

SEQ ID NO: 10205 - protein, 590 aa, Zea mays subsp. mays
  peptide (1)..(590): Ceres Seq. ID no. 12386457
  misc_feature (99)..(445): Pfam Name: AMP-binding enzyme Pfam Description: AMP-binding enzyme
  misc_feature (45)..(587): Homolog of NCBI NO: 20502991 NR Description: Putative AMP-binding protein [Oryza sativa
  misc_feature (42)..(590): Homolog of NCBI NO: 18394871 NR Description: expressed protein; protein id: At1g20510.1 thaliana] >gi|13430676|gb|AAK25960.1|AF360250_1 unknown protein thaliana] >gi|14532846|gb|AAK64105.1| unknown protein
  misc_feature (42)..(503): Homolog of NCBI NO: 8778603 NR Description: F5M15.17 [Arabidopsis thaliana]
  misc_feature (495)..(590): Homolog of NCBI NO: 8778603 NR Description: F5M15.17 [Arabidopsis thaliana]
  misc_feature (45)..(587): Homolog of NCBI NO: 15217956 NR Description: hypothetical protein; protein id: At1g20480.1
  misc_feature (45)..(581): Homolog of NCBI NO: 25402913 NR Description: protein F5M15.18 [imported] - Arabidopsis >gi|8778604|gb|AAF79612.1|AC027665_13 F5M15.18 [Arabidopsis
  misc_feature (83)..(587): Homolog of NCBI NO: 25402913 NR Description: protein F5M15.18 [imported] - Arabidopsis >gi|8778604|gb|AAF79612.1|AC027665_13 F5M15.18 [Arabidopsis
  misc_feature (45)..(445): Homolog of NCBI NO: 15217958 NR Description: hypothetical protein; protein id: At1g20490.1
  misc_feature (463)..(587): Homolog of NCBI NO: 15217958 NR Description: hypothetical protein; protein id: At1g20490.1
  misc_feature (45)..(587): Homolog of NCBI NO: 10177788 NR Description: AMP-binding protein-like [Arabidopsis thaliana]
HTLARTRRPERRRTRRGKASDPSPSLPRIQDNSPCDPIPMAARPDARSGYCAATRTFRSKRADVPLPADADLDVVRFLASRRHAGVVALVDAATGHRVTFQELWRAVEGAATALAAPPLSLRKGQIALILSPNSVHFPVAALAAMSLGAVLTTANPLNTPAEIAKQVADARPVVAFTTRDLLPKLPRAGAGAGIRVVLLEPDRLPSDPSPVVATIGEISATPPDPTRRRDRVTQDDPATLLYSSGTTGPSKGVVATHRSLISMVQIIMSRFRLEASNRTETFLCTVPMFHVYGLVAFATGLLGCGATIVVLSKYELPEMLRAINEYGVTYLPLVPPILVAMLAYPNRLPLGGLRKVLSGGAPLSKELIEGFKEKYPQVEILQGYGLTESTAIGASTDSAEESSRYGTAGLLSPSTEAKIVDPETGEALPVNRTGELWIRGPYVMKGYFKNAEATQSTLTPDGWLKTGDLCYIDEDGYLFVVDRLKELIKYKGYQVPPAELEALLLTHPEIEDVTVIPFPDREVGQFPMAYVVRKKGSNLSEREVMEFVAKQVAPYKKVRKVAFVAEIPKNASGKILRKDLIKLATSKSKL

SEQ ID NO: 10206 - protein, 551 aa, Zea mays subsp. mays
  peptide (1)..(551): Ceres Seq. ID no. 12386458
  misc_feature (60)..(406): Pfam Name: AMP-binding enzyme Pfam Description: AMP-binding enzyme
  misc_feature (6)..(548): Homolog of NCBI NO: 20502991 NR Description: Putative AMP-binding protein [Oryza sativa
  misc_feature (3)..(551): Homolog of NCBI NO: 18394871 NR Description: expressed protein; protein id: At1g20510.1 thaliana] >gi|13430676|gb|AAK25960.1|AF360250_1 unknown protein thaliana] >gi|14532846|gb|AAK64105.1| unknown protein
  misc_feature (3)..(464): Homolog of NCBI NO: 8778603 NR Description: F5M15.17 [Arabidopsis thaliana]
  misc_feature (456)..(551): Homolog of NCBI NO: 8778603 NR Description: F5M15.17 [Arabidopsis thaliana]
  misc_feature (6)..(548): Homolog of NCBI NO: 15217956 NR Description: hypothetical protein; protein id: At1g20480.1
  misc_feature (6)..(542): Homolog of NCBI NO: 25402913 NR Description: protein F5M15.18 [imported] - Arabidopsis >gi|8778604|gb|AAF79612.1|AC027665_13 F5M15.18 [Arabidopsis
  misc_feature (44)..(548): Homolog of NCBI NO: 25402913 NR Description: protein F5M15.18 [imported] - Arabidopsis >gi|8778604|gb|AAF79612.1|AC027665_13 F5M15.18 [Arabidopsis
  misc_feature (6)..(406): Homolog of NCBI NO: 15217958 NR Description: hypothetical protein; protein id: At1g20490.1
  misc_feature (424)..(548): Homolog of NCBI NO: 15217958 NR Description: hypothetical protein; protein id: At1g20490.1
  misc_feature (6)..(548): Homolog of NCBI NO: 10177788 NR Description: AMP-binding protein-like [Arabidopsis thaliana]
MAARPDARSGYCAATRTFRSKRADVPLPADADLDVVRFLASRRHAGVVALVDAATGHRVTFQELWRAVEGAATALAAPPLSLRKGQIALILSPNSVHFPVAALAAMSLGAVLTTANPLNTPAEIAKQVADARPVVAFTTRDLLPKLPRAGAGAGIRVVLLEPDRLPSDPSPVVATIGEISATPPDPTRRRDRVTQDDPATLLYSSGTTGPSKGVVATHRSLISMVQIIMSRFRLEASNRTETFLCTVPMFHVYGLVAFATGLLGCGATIVVLSKYELPEMLRAINEYGVTYLPLVPPILVAMLAYPNRLPLGGLRKVLSGGAPLSKELIEGFKEKYPQVEILQGYGLTESTAIGASTDSAEESSRYGTAGLLSPSTEAKIVDPETGEALPVNRTGELWIRGPYVMKGYFKNAEATQSTLTPDGWLKTGDLCYIDEDGYLFVVDRLKELIKYKGYQVPPAELEALLLTHPEIEDVTVIPFPDREVGQFPMAYVVRKKGSNLSEREVMEFVAKQVAPYKKVRKVAFVAEIPKNASGKILRKDLIKLATSKSKL

SEQ ID NO: 10207 - protein, 446 aa, Zea mays subsp. mays
  peptide (1)..(446): Ceres Seq. ID no. 12386459
  misc_feature (1)..(301): Pfam Name: AMP-binding enzyme Pfam Description: AMP-binding enzyme
  misc_feature (1)..(443): Homolog of NCBI NO: 20502991 NR Description: Putative AMP-binding protein [Oryza sativa
  misc_feature (1)..(446): Homolog of NCBI NO: 18394871 NR Description: expressed protein; protein id: At1g20510.1 thaliana] >gi|13430676|gb|AAK25960.1|AF360250_1 unknown protein thaliana] >gi|14532846|gb|AAK64105.1| unknown protein
  misc_feature (1)..(359): Homolog of NCBI NO: 8778603 NR Description: F5M15.17 [Arabidopsis thaliana]
  misc_feature (351)..(446): Homolog of NCBI NO: 8778603 NR Description: F5M15.17 [Arabidopsis thaliana]
  misc_feature (1)..(443): Homolog of NCBI NO: 15217956 NR Description: hypothetical protein; protein id: At1g20480.1
  misc_feature (1)..(437): Homolog of NCBI NO: 25402913 NR Description: protein F5M15.18 [imported] - Arabidopsis >gi|8778604|gb|AAF79612.1|AC027665_13 F5M15.18 [Arabidopsis
  misc_feature (1)..(443): Homolog of NCBI NO: 25402913 NR Description: protein F5M15.18 [imported] - Arabidopsis >gi|8778604|gb|AAF79612.1|AC027665_13 F5M15.18 [Arabidopsis
  misc_feature (1)..(301): Homolog of NCBI NO: 15217958 NR Description: hypothetical protein; protein id: At1g20490.1
  misc_feature (319)..(443): Homolog of NCBI NO: 15217958 NR Description: hypothetical protein; protein id: At1g20490.1
  misc_feature (1)..(443): Homolog of NCBI NO: 10177788 NR Description: AMP-binding protein-like [Arabidopsis thaliana]
MSLGAVLTTANPLNTPAEIAKQVADARPVVAFTTRDLLPKLPRAGAGAGIRVVLLEPDRLPSDPSPVVATIGEISATPPDPTRRRDRVTQDDPATLLYSSGTTGPSKGVVATHRSLISMVQIIMSRFRLEASNRTETFLCTVPMFHVYGLVAFATGLLGCGATIVVLSKYELPEMLRAINEYGVTYLPLVPPILVAMLAYPNRLPLGGLRKVLSGGAPLSKELIEGFKEKYPQVEILQGYGLTESTAIGASTDSAEESSRYGTAGLLSPSTEAKIVDPETGEALPVNRTGELWIRGPYVMKGYFKNAEATQSTLTPDGWLKTGDLCYIDEDGYLFVVDRLKELIKYKGYQVPPAELEALLLTHPEIEDVTVIPFPDREVGQFPMAYVVRKKGSNLSEREVMEFVAKQVAPYKKVRKVAFVAEIPKNASGKILRKDLIKLATSKSKL

SEQ ID NO: 10208 - DNA, 1095 bp, Zea mays subsp. mays
  misc_feature (1)..(1095): Ceres Seq. ID no. 12400739
  misc_feature: MA Experiment ID: 108522 Result: Down-regulated in Transcription
  misc_feature: MA Experiment 108522 PARAMETER Experiment Name: Zm_42deg_Heat_P Parameter: Age (day) Value: 8
  misc_feature: MA Experiment 108522 PARAMETER Experiment Name: Zm_42deg_Heat_P Parameter: Organism Value: Zea mays
  misc_feature: MA Experiment 108522 PARAMETER Experiment Name: Zm_42deg_Heat_P Parameter: Plant Line Value: 35A19
  misc_feature: MA Experiment 108522 PARAMETER Experiment Name: Zm_42deg_Heat_P Parameter: Temperature (deg C) Value: 42 vs. 22
  misc_feature: MA Experiment 108522 PARAMETER Experiment Name: Zm_42deg_Heat_P Parameter: Timepoint (hr) Value: 1
  misc_feature: MA Experiment 108522 PARAMETER Experiment Name: Zm_42deg_Heat_P Parameter: Tissue Value: Aerial
  misc_feature: MA Experiment ID: 108530 Result: Down-regulated in Transcription
  misc_feature: MA Experiment 108530 PARAMETER Experiment Name: Zm_Imbibed_Seeds_P Parameter: Age (day) Value: 6 vs. 2
  misc_feature: MA Experiment 108530 PARAMETER Experiment Name: Zm_Imbibed_Seeds_P Parameter: Organism Value: Zea mays
  misc_feature: MA Experiment 108530 PARAMETER Experiment Name: Zm_Imbibed_Seeds_P Parameter: Plant Line Value: 35A19
  misc_feature: MA Experiment 108530 PARAMETER Experiment Name: Zm_Imbibed_Seeds_P Parameter: Tissue Value: Aerial vs. Embryo
  misc_feature: MA Experiment ID: 108535 Result: Up-regulated in Transcription
  misc_feature: MA Experiment 108535 PARAMETER Experiment Name: Zm_Meristem_P Parameter: Age (day) Value: 8
  misc_feature: MA Experiment 108535 PARAMETER Experiment Name: Zm_Meristem_P Parameter: Organism Value: Zea mays
  misc_feature: MA Experiment 108535 PARAMETER Experiment Name: Zm_Meristem_P Parameter: Plant Line Value: 35A19
  misc_feature: MA Experiment 108535 PARAMETER Experiment Name: Zm_Meristem_P Parameter: Tissue Value: Root Meristem vs. Above Root Meristem
  misc_feature: MA Experiment ID: 108544 Result: Down-regulated in Transcription
  misc_feature: MA Experiment ID: 108556 Result: Down-regulated in Transcription
  misc_feature: MA Experiment 108556 PARAMETER Experiment Name: Zm_Drought_P Parameter: Age (day) Value: 9
  misc_feature: MA Experiment 108556 PARAMETER Experiment Name: Zm_Drought_P Parameter: Organism Value: Zea mays
  misc_feature: MA Experiment 108556 PARAMETER Experiment Name: Zm_Drought_P Parameter: Plant Line Value: 35A19
  misc_feature: MA Experiment 108556 PARAMETER Experiment Name: Zm_Drought_P Parameter: Timepoint (hr) Value: 24
  misc_feature: MA Experiment 108556 PARAMETER Experiment Name: Zm_Drought_P Parameter: Tissue Value: Aerial
  misc_feature: MA Experiment 108556 PARAMETER Experiment Name: Zm_Drought_P Parameter: Treatment Value: Drought vs. No Drought
  misc_feature: MA Experiment ID: 20000487 Result: Up-regulated in Transcription
  misc_feature: MA Experiment 20000487 PARAMETER Experiment Name: Zm_50mM_NH4NO3_L_to_H_P Parameter: Organism Value: Zea mays
  misc_feature: MA Experiment 20000487 PARAMETER Experiment Name: Zm_50mM_NH4NO3_L_to_H_P Parameter: Timepoint (hr) Value: 4
  misc_feature: MA Experiment 20000487 PARAMETER Experiment Name: Zm_50mM_NH4NO3_L_to_H_P Parameter: Tissue Value: Leaves
  misc_feature: MA Experiment 20000487 PARAMETER Experiment Name: Zm_50mM_NH4NO3_L_to_H_P Parameter: Treatment Value: 50mM NH4NO3 vs. 100mM Mannitol
  misc_feature: MA Experiment ID: 20000488 Result: Up-regulated in Transcription
  misc_feature: MA Experiment 20000488 PARAMETER Experiment Name: Zm_50mM_NH4NO3_L_to_H_P Parameter: Organism Value: Zea mays
  misc_feature: MA Experiment 20000488 PARAMETER Experiment Name: Zm_50mM_NH4NO3_L_to_H_P Parameter: Timepoint (hr) Value: 8
  misc_feature: MA Experiment 20000488 PARAMETER Experiment Name: Zm_50mM_NH4NO3_L_to_H_P Parameter: Tissue Value: Leaves
  misc_feature: MA Experiment 20000488 PARAMETER Experiment Name: Zm_50mM_NH4NO3_L_to_H_P Parameter: Treatment Value: 50mM NH4NO3 vs. 100mM Mannitol
  misc_feature: MA Experiment ID: 20000534 Result: Down-regulated in Transcription
  misc_feature: MA Experiment 20000534 PARAMETER Experiment Name: Zm_Hybrid_Pollen_P Parameter: Age (day) Value: 8
  misc_feature: MA Experiment 20000534 PARAMETER Experiment Name: Zm_Hybrid_Pollen_P Parameter: Organism Value: Zea mays
  misc_feature: MA Experiment 20000534 PARAMETER Experiment Name: Zm_Hybrid_Pollen_P Parameter: Plant Line Value: 35A19
  misc_feature: MA Experiment 20000534 PARAMETER Experiment Name: Zm_Hybrid_Pollen_P Parameter: Tissue Value: Pollen vs. Aerial
  misc_feature: MA Experiment ID: 20000535 Result: Up-regulated in Transcription
  misc_feature: MA Experiment 20000535 PARAMETER Experiment Name: Zm_Hybrid_Seed_Dev_P Parameter: DAP Value: 30 vs. 12
  misc_feature: MA Experiment 20000535 PARAMETER Experiment Name: Zm_Hybrid_Seed_Dev_P Parameter: Organism Value: Zea mays
  misc_feature: MA Experiment 20000535 PARAMETER Experiment Name: Zm_Hybrid_Seed_Dev_P Parameter: Plant Line Value: 35A19
  misc_feature: MA Experiment 20000535 PARAMETER Experiment Name: Zm_Hybrid_Seed_Dev_P Parameter: Tissue Value: Embryo vs. Unfert Floret
  misc_feature: MA Experiment ID: 20000626 Result: Up-regulated in Transcription
  misc_feature: MA Experiment 20000626 PARAMETER Experiment Name: Zm_Herbicide-Treatments_P Parameter: Timepoint (hr) Value: 12
  misc_feature: MA Experiment 20000626 PARAMETER Experiment Name: Zm_Herbicide-Treatments_P Parameter: Tissue Value: Aerial
  misc_feature: MA Experiment 20000626 PARAMETER Experiment Name: Zm_Herbicide-Treatments_P Parameter: Treatment Value: Roundup vs. No Treatment
  misc_feature: MA Experiment ID: 20000632 Result: Down-regulated in Transcription
  misc_feature: MA Experiment 20000632 PARAMETER Experiment Name: Zm_Herbicide-Treatments_P Parameter: Timepoint (hr) Value: 4
  misc_feature: MA Experiment 20000632 PARAMETER Experiment Name: Zm_Herbicide-Treatments_P Parameter: Tissue Value: Aerial
  misc_feature: MA Experiment 20000632 PARAMETER Experiment Name: Zm_Herbicide-Treatments_P Parameter: Treatment Value: Glean vs. No Treatment
  misc_feature: MA Experiment ID: 20001605 Result: Up-regulated in Transcription
  misc_feature: MA Experiment 20001605 PARAMETER Experiment Name: Zm_50ppm_KNO3_L-to-H_P Parameter: Age (day) Value: 19
  misc_feature: MA Experiment 20001605 PARAMETER Experiment Name: Zm_50ppm_KNO3_L-to-H_P Parameter: Organism Value: Zea mays
  misc_feature: MA Experiment 20001605 PARAMETER Experiment Name: Zm_50ppm_KNO3_L-to-H_P Parameter: Plant Line Value: 35A19
  misc_feature: MA Experiment 20001605 PARAMETER Experiment Name: Zm_50ppm_KNO3_L-to-H_P Parameter: Timepoint (hr) Value: 4
  misc_feature: MA Experiment 20001605 PARAMETER Experiment Name: Zm_50ppm_KNO3_L-to-H_P Parameter: Tissue Value: Shoots
  misc_feature: MA Experiment 20001605 PARAMETER Experiment Name: Zm_50ppm_KNO3_L-to-H_P Parameter: Treatment Value: 50ppm KNO3 vs. 50ppm KCl
  misc_feature: MA Experiment ID: 20001606 Result: Up-regulated in Transcription
  misc_feature: MA Experiment 20001606 PARAMETER Experiment Name: Zm_50ppm_KNO3_L-to-H_P Parameter: Age (day) Value: 19
  misc_feature: MA Experiment 20001606 PARAMETER Experiment Name: Zm_50ppm_KNO3_L-to-H_P Parameter: Organism Value: Zea mays
  misc_feature: MA Experiment 20001606 PARAMETER Experiment Name: Zm_50ppm_KNO3_L-to-H_P Parameter: Plant Line Value: 35A19
  misc_feature: MA Experiment 20001606 PARAMETER Experiment Name: Zm_50ppm_KNO3_L-to-H_P Parameter: Timepoint (hr) Value: 8
  misc_feature: MA Experiment 20001606 PARAMETER Experiment Name: Zm_50ppm_KNO3_L-to-H_P Parameter: Tissue Value: Shoots
  misc_feature: MA Experiment 20001606 PARAMETER Experiment Name: Zm_50ppm_KNO3_L-to-H_P Parameter: Treatment Value: 50ppm KNO3 vs. 50ppm KCl
ccaacacgagcggttagaaaccctagtcaaaaccctcgccctcccaaaaactactcacgtctcgccgccccgccgtatcaccctttctcggcggccggcctcttctcttcacggactcgcaggtcatcgagatgtcgtcggcggaggcgaaggccgcggcgaaggcggtcccggagtctgtgctgcgcaagcgcaagcgggaggagcagtgggcagcggacaagaaggagaaggccctcgcagacaggaaggaggcgcttgacagccgcaagatcatatttgctcgcgccaagcagtacgcccaggagtacgacgcccaggagaaggagcttgtgcagctcaagcgtgaggctcggttgaagggtgggttctatgtgagccccagaggccaagcttctgtttgtggtccgcatccgtggtatcaatgccatgcaccccaagacccgcaagatcttgcagctcctgcgtttgaggcagatcttcaatggtgtctttctcaaggttaacaaggcaactattaacatgctacggagggtggagccatatgttgcgtatggatacccgaacctgaagagtgttagggaattgatctacaaaagaggttatgggaagctgaacaagcagaggattccgcttagcaacaacaatgtcatcgaggagggccttgggaagcataatatcatctgcatcgaggaccttgttcatgagatcatgacggttggcccacacttcaaagaggccaacaacttcctctggccattcaagctgaaagcgccccttggtggcctcaagaagaagaggaaccactatgtggagggtggcgacgctggcaaccgtgagaactacatcaacgagctcatcaagaggatgaactaggctctcttgtatcctgtgagaatgcattcgatgtcggcatggatatgcaattttgttccatggctgtcatacgtcacgacttcaactaggaaatgggtcctgtttatgtttgcagttgcctctgtaggttttaatacatcaagacataaaccaacacgtgccccaagtgtcactcgctagggctaccaagattgttgcaaaaaagatagcactttttcc

SEQ ID NO: 10209 - protein, 148 aa, Zea mays subsp. mays
  peptide (1)..(148): Ceres Seq. ID no. 12400740
  misc_feature (1)..(40): Pfam Name: Ribosomal protein L30p/L7e Pfam Description: Ribosomal protein L30p/L7e
  misc_feature (1)..(148): Homolog of NCBI NO: 15226212 NR Description: putative ribosomal protein L7; protein id: supported by cDNA: 13298., supported by cDNA: gi_13877566, by cDNA: gi_15028382, supported by cDNA: gi_19310656, supported
  misc_feature (1)..(148): Homolog of NCBI NO: 445613 NR Description: ribosomal protein L7
  misc_feature (1)..(148): Homolog of NCBI NO: 27311547 NR Description: Unknown protein [Arabidopsis thaliana]
  misc_feature (1)..(148): Homolog of NCBI NO: 38346542 NR Description: OSJNBa0035M09.3 [Oryza sativa (japonica
  misc_feature (1)..(148): Homolog of NCBI NO: 30689617 NR Description: 60S ribosomal protein L7 (RPL7C) [Arabidopsis >gi|15450713|gb|AAK96628.1| At2g44120/F6E13.25 [Arabidopsis >gi|17386142|gb|AAL38617.1|AF446884_1 At2g44120/F6E13.25
  misc_feature (1)..(148): Homolog of NCBI NO: 30689623 NR Description: 60S ribosomal protein L7 (RPL7C) [Arabidopsis >gi|6174958|sp|Q42208|RL7_ARATH 60S ribosomal protein L7
  misc_feature (1)..(148): Homolog of NCBI NO: 15231288 NR Description: ribosomal protein, putative; protein id: supported by cDNA: gi_14532551, supported by cDNA: gi_15810195, by cDNA: gi_18655394 [Arabidopsis thaliana]
  misc_feature (1)..(148): Homolog of NCBI NO: 38637548 NR Description: putative 60S ribosomal protein L7 [Oryza sativa
  misc_feature (1)..(147): Homolog of NCBI NO: 28630259 NR Description: ribosomal protein L7 [Branchiostoma lanceolatum]
  misc_feature (1)..(148): Homolog of NCBI NO: 15293877 NR Description: ribosomal protein L7 [Ictalurus punctatus]
MHPKTRKILQLLRLRQIFNGVFLKVNKATINMLRRVEPYVAYGYPNLKSVRELIYKRGYGKLNKQRIPLSNNNVIEEGLGKHNIICIEDLVHEIMTVGPHFKEANNFLWPFKLKAPLGGLKKKRNHYVEGGDAGNRENYINELIKRMN

SEQ ID NO: 10210 - protein, 124 aa, Zea mays subsp. mays
  peptide (1)..(124): Ceres Seq. ID no. 12400741
  misc_feature (1)..(87): Homolog of NCBI NO: 38637548 NR Description: putative 60S ribosomal protein L7 [Oryza sativa
  misc_feature (6)..(84): Homolog of NCBI NO: 38346542 NR Description: OSJNBa0035M09.3 [Oryza sativa (japonica
  misc_feature (1)..(87): Homolog of NCBI NO: 15231288 NR Description: ribosomal protein, putative; protein id: supported by cDNA: gi_14532551, supported by cDNA: gi_15810195, by cDNA: gi_18655394 [Arabidopsis thaliana]
  misc_feature (4)..(87): Homolog of NCBI NO: 30689617 NR Description: 60S ribosomal protein L7 (RPL7C) [Arabidopsis >gi|15450713|gb|AAK96628.1| At2g44120/F6E13.25 [Arabidopsis >gi|17386142|gb|AAL38617.1|AF446884_1 At2g44120/F6E13.25
  misc_feature (4)..(87): Homolog of NCBI NO: 30689623 NR Description: 60S ribosomal protein L7 (RPL7C) [Arabidopsis >gi|6174958|sp|Q42208|RL7_ARATH 60S ribosomal protein L7
  misc_feature (13)..(87): Homolog of NCBI NO: 15226212 NR Description: putative ribosomal protein L7; protein id: supported by cDNA: 13298., supported by cDNA: gi_13877566, by cDNA: gi_15028382, supported by cDNA: gi_19310656, supported
  misc_feature (4)..(87): Homolog of NCBI NO: 27311547 NR Description: Unknown protein [Arabidopsis thaliana]
  misc_feature (13)..(87): Homolog of NCBI NO: 445613 NR Description: ribosomal protein L7
  misc_feature (13)..(87): Homolog of NCBI NO: 28630259 NR Description: ribosomal protein L7 [Branchiostoma lanceolatum]
  misc_feature (1)..(82): Homolog of NCBI NO: 15293877 NR Description: ribosomal protein L7 [Ictalurus punctatus]
MSSAEAKAAAKAVPESVLRKRKREEQWAADKKEKALADRKEALDSRKIIFARAKQYAQEYDAQEKELVQLKREARLKGGFYVSPRGQASVCGPHPWYQCHAPQDPQDLAAPAFEADLQWCLSQG

SEQ ID NO: 10211 - protein, 119 aa, Zea mays subsp. mays
  peptide (1)..(119): Ceres Seq. ID no. 12400742
  misc_feature (72)..(119): Homolog of NCBI NO: 29841077 NR Description: similar to NM_058275 probable 60S ribosomal
  misc_feature (72)..(119): Homolog of NCBI NO: 29841446 NR Description: similar to GenBank Accession Number AF401559
PTRAVRNPSQNPRPPKNYSRLAAPPYHPFSAAGLFSSRTRRSSRCRRRRRRPRRRRSRSLCCASASGRSSGQRTRRRRPSQTGRRRLTAARSYLLAPSSTPRSTTPRRRSLCSSSVRLG

SEQ ID NO: 10212 - DNA, 465 bp, Zea mays subsp. mays
  misc_feature (1)..(465): Ceres Seq. ID no. 12345496
  misc_feature: MA Experiment ID: 108530 Result: Down-regulated in Transcription
  misc_feature: MA Experiment 108530 PARAMETER Experiment Name: Zm_Imbibed_Seeds_P Parameter: Age (day) Value: 6 vs. 2
  misc_feature: MA Experiment 108530 PARAMETER Experiment Name: Zm_Imbibed_Seeds_P Parameter: Organism Value: Zea mays
  misc_feature: MA Experiment 108530 PARAMETER Experiment Name: Zm_Imbibed_Seeds_P Parameter: Plant Line Value: 35A19
  misc_feature: MA Experiment 108530 PARAMETER Experiment Name: Zm_Imbibed_Seeds_P Parameter: Tissue Value: Aerial vs. Embryo
  misc_feature: MA Experiment ID: 108535 Result: Up-regulated in Transcription
  misc_feature: MA Experiment 108535 PARAMETER Experiment Name: Zm_Meristem_P Parameter: Age (day) Value: 8
  misc_feature: MA Experiment 108535 PARAMETER Experiment Name: Zm_Meristem_P Parameter: Organism Value: Zea mays
  misc_feature: MA Experiment 108535 PARAMETER Experiment Name: Zm_Meristem_P Parameter: Plant Line Value: 35A19
  misc_feature: MA Experiment 108535 PARAMETER Experiment Name: Zm_Meristem_P Parameter: Tissue Value: Root Meristem vs. Above Root Meristem
  misc_feature: MA Experiment ID: 108544 Result: Down-regulated in Transcription
  misc_feature: MA Experiment ID: 20000478 Result: Down-regulated in Transcription
  misc_feature: MA Experiment 20000478 PARAMETER Experiment Name: Zm_5mM_SA_P Parameter: Age (day) Value: 11
  misc_feature: MA Experiment 20000478 PARAMETER Experiment Name: Zm_5mM_SA_P Parameter: Organism Value: Zea mays
  misc_feature: MA Experiment 20000478 PARAMETER Experiment Name: Zm_5mM_SA_P Parameter: Plant Line Value: 35A19
  misc_feature: MA Experiment 20000478 PARAMETER Experiment Name: Zm_5mM_SA_P Parameter: Timepoint (hr) Value: 72
  misc_feature: MA Experiment 20000478 PARAMETER Experiment Name: Zm_5mM_SA_P Parameter: Tissue Value: Aerial
  misc_feature: MA Experiment 20000478 PARAMETER Experiment Name: Zm_5mM_SA_P Parameter: Treatment Value: 5mM SA vs. No Treatment
  misc_feature: MA Experiment ID: 20001612 Result: Up-regulated in Transcription
  misc_feature: MA Experiment 20001612 PARAMETER Experiment Name: Zm_50ppm_KNO3_L-to-H_P Parameter: Age (day) Value: 19
  misc_feature: MA Experiment 20001612 PARAMETER Experiment Name: Zm_50ppm_KNO3_L-to-H_P Parameter: Organism Value: Zea mays
  misc_feature: MA Experiment 20001612 PARAMETER Experiment Name: Zm_50ppm_KNO3_L-to-H_P Parameter: Plant Line Value: 35A19
  misc_feature: MA Experiment 20001612 PARAMETER Experiment Name: Zm_50ppm_KNO3_L-to-H_P Parameter: Timepoint (hr) Value: 8
  misc_feature: MA Experiment 20001612 PARAMETER Experiment Name: Zm_50ppm_KNO3_L-to-H_P Parameter: Tissue Value: Roots
  misc_feature: MA Experiment 20001612 PARAMETER Experiment Name: Zm_50ppm_KNO3_L-to-H_P Parameter: Treatment Value: 50ppm KNO3 vs. 50ppm KCl
atgggcaggattatcaactctgacgaggtgcagtctgtggttaagccactcaacaaggaggtgaagcgcagggagaagaggaagaacccgctcacgaacatggctgctgtgctcaagctgaacccctacctcggcactgcccggaagatggccacccttgctgaggctgcccgagtcaaggcccggaaggagaagcttgattccaagaggaccaagcttacctcggaggagactgccaaggtcaaggctgccggcaaggcgtggtacaagaccatgatctcggacagtgactacaccgagtttgagaacttcaccaagtggctcggagtgacgcagtgaagcggcctttgagacctagttaagttttgattagttgtgtcgctgaacttgtattgagacgaaatagtattttatcaatctgtcttatcctgcatcttcacaacaagttacctatctgtggactct

SEQ ID NO: 10213 - protein, 112 aa, Zea mays subsp. mays
  peptide (1)..(112): Ceres Seq. ID no. 12345497
  misc_feature (1)..(112): Homolog of NCBI NO: 34393487 NR Description: putative 60S ribosomal protein L4/L1 [Oryza
  misc_feature (1)..(112): Homolog of NCBI NO: 34897236 NR Description: putative 60S ribosomal protein L1 [Oryza sativa
  misc_feature (1)..(112): Homolog of NCBI NO: 15232723 NR Description: putative 60S ribosomal protein L1; protein id: supported by cDNA: 39947., supported by cDNA: gi_15982714 thaliana] >gi|17369604|sp|Q9SF40|RL4B_ARATH 60S putative 60S
  misc_feature (1)..(112): Homolog of NCBI NO: 21593543 NR Description: 60S ribosomal protein L4-B (L1) [Arabidopsis
  misc_feature (1)..(112): Homolog of NCBI NO: 17367847 NR Description: 60S ribosomal protein L4 (L1)
  misc_feature (1)..(112): Homolog of NCBI NO: 13605831 NR Description: AT5g02870/F9G14_180 [Arabidopsis thaliana]
  misc_feature (1)..(112): Homolog of NCBI NO: 15242558 NR Description: 60S ribosomal protein - like; protein id: supported by cDNA: gi_13605830, supported by cDNA: gi_15450797, by cDNA: gi_16649032, supported by cDNA: gi_17064751, supported
  misc_feature (1)..(112): Homolog of NCBI NO: 26450328 NR Description: putative 60S ribosomal protein [Arabidopsis
  misc_feature (17)..(112): Homolog of NCBI NO: 25403525 NR Description: probable 60S ribosomal protein [imported] - thaliana (fragment) >gi|12320955|gb|AAG50600.1|AC079605_5 60S
  misc_feature (3)..(112): Homolog of NCBI NO: 6441068 NR Description: 60S ribosomal protein L4 [Chlamydomonas sp. HS-5]
MGRIINSDEVQSVVKPLNKEVKRREKRKNPLTNMAAVLKLNPYLGTARKMATLAEAARVKARKEKLDSKRTKLTSEETAKVKAAGKAWYKTMISDSDYTEFENFTKWLGVTQ

SEQ ID NO: 10214 - protein, 79 aa, Zea mays subsp. mays
  peptide (1)..(79): Ceres Seq. ID no. 12345498
  misc_feature (1)..(79): Homolog of NCBI NO: 34393487 NR Description: putative 60S ribosomal protein L4/L1 [Oryza
  misc_feature (1)..(79): Homolog of NCBI NO: 34897236 NR Description: putative 60S ribosomal protein L1 [Oryza sativa
  misc_feature (1)..(79): Homolog of NCBI NO: 15232723 NR Description: putative 60S ribosomal protein L1; protein id: supported by cDNA: 39947., supported by cDNA: gi_15982714 thaliana] >gi|17369604|sp|Q9SF40|RL4B_ARATH 60S putative 60S
  misc_feature (1)..(79): Homolog of NCBI NO: 21593543 NR Description: 60S ribosomal protein L4-B (L1) [Arabidopsis
  misc_feature (1)..(79): Homolog of NCBI NO: 17367847 NR Description: 60S ribosomal protein L4 (L1)
  misc_feature (1)..(79): Homolog of NCBI NO: 13605831 NR Description: AT5g02870/F9G14_180 [Arabidopsis thaliana]
  misc_feature (1)..(79): Homolog of NCBI NO: 15242558 NR Description: 60S ribosomal protein - like; protein id: supported by cDNA: gi_13605830, supported by cDNA: gi_15450797, by cDNA: gi_16649032, supported by cDNA: gi_17064751, supported
  misc_feature (1)..(79): Homolog of NCBI NO: 26450328 NR Description: putative 60S ribosomal protein [Arabidopsis
  misc_feature (1)..(79): Homolog of NCBI NO: 25403525 NR Description: probable 60S ribosomal protein [imported] - thaliana (fragment) >gi|12320955|gb|AAG50600.1|AC079605_5 60S
  misc_feature (1)..(79): Homolog of NCBI NO: 6441068 NR Description: 60S ribosomal protein L4 [Chlamydomonas sp. HS-5]
MAAVLKLNPYLGTARKMATLAEAARVKARKEKLDSKRTKLTSEETAKVKAAGKAWYKTMISDSDYTEFENFTKWLGVTQ

SEQ ID NO: 10215 - protein, 63 aa, Zea mays subsp. mays
  peptide (1)..(63): Ceres Seq. ID no. 12345499
  misc_feature (1)..(63): Homolog of NCBI NO: 34393487 NR Description: putative 60S ribosomal protein L4/L1 [Oryza
  misc_feature (1)..(63): Homolog of NCBI NO: 34897236 NR Description: putative 60S ribosomal protein L1 [Oryza sativa
  misc_feature (1)..(63): Homolog of NCBI NO: 15232723 NR Description: putative 60S ribosomal protein L1; protein id: supported by cDNA: 39947., supported by cDNA: gi_15982714 thaliana] >gi|17369604|sp|Q9SF40|RL4B_ARATH 60S putative 60S
  misc_feature (1)..(63): Homolog of NCBI NO: 21593543 NR Description: 60S ribosomal protein L4-B (L1) [Arabidopsis
  misc_feature (1)..(63): Homolog of NCBI NO: 17367847 NR Description: 60S ribosomal protein L4 (L1)
  misc_feature (1)..(63): Homolog of NCBI NO: 13605831 NR Description: AT5g02870/F9G14_180 [Arabidopsis thaliana]
  misc_feature (1)..(63): Homolog of NCBI NO: 15242558 NR Description: 60S ribosomal protein - like; protein id: supported by cDNA: gi_13605830, supported by cDNA: gi_15450797, by cDNA: gi_16649032, supported by cDNA: gi_17064751, supported
  misc_feature (1)..(63): Homolog of NCBI NO: 26450328 NR Description: putative 60S ribosomal protein [Arabidopsis
  misc_feature (1)..(63): Homolog of NCBI NO: 25403525 NR Description: probable 60S ribosomal protein [imported] - thaliana (fragment) >gi|12320955|gb|AAG50600.1|AC079605_5 60S
  misc_feature (1)..(63): Homolog of NCBI NO: 6441068 NR Description: 60S ribosomal protein L4 [Chlamydomonas sp. HS-5]
MATLAEAARVKARKEKLDSKRTKLTSEETAKVKAAGKAWYKTMISDSDYTEFENFTKWLGVTQ

SEQ ID NO: 10216 - DNA, 763 bp, Zea mays subsp. mays
  misc_feature (1)..(763): Ceres Seq. ID no. 12358030
  misc_feature: MA Experiment ID: 108530 Result: Down-regulated in Transcription
  misc_feature: MA Experiment 108530 PARAMETER Experiment Name: Zm_Imbibed_Seeds_P Parameter: Age (day) Value: 6 vs. 2
  misc_feature: MA Experiment 108530 PARAMETER Experiment Name: Zm_Imbibed_Seeds_P Parameter: Organism Value: Zea mays
  misc_feature: MA Experiment 108530 PARAMETER Experiment Name: Zm_Imbibed_Seeds_P Parameter: Plant Line Value: 35A19
  misc_feature: MA Experiment 108530 PARAMETER Experiment Name: Zm_Imbibed_Seeds_P Parameter: Tissue Value: Aerial vs. Embryo
  misc_feature: MA Experiment ID: 108535 Result: Up-regulated in Transcription
  misc_feature: MA Experiment 108535 PARAMETER Experiment Name: Zm_Meristem_P Parameter: Age (day) Value: 8
  misc_feature: MA Experiment 108535 PARAMETER Experiment Name: Zm_Meristem_P Parameter: Organism Value: Zea mays
  misc_feature: MA Experiment 108535 PARAMETER Experiment Name: Zm_Meristem_P Parameter: Plant Line Value: 35A19
  misc_feature: MA Experiment 108535 PARAMETER Experiment Name: Zm_Meristem_P Parameter: Tissue Value: Root Meristem vs. Above Root Meristem
  misc_feature: MA Experiment ID: 108544 Result: Down-regulated in Transcription
  misc_feature: MA Experiment ID: 108556 Result: Down-regulated in Transcription
  misc_feature: MA Experiment 108556 PARAMETER Experiment Name: Zm_Drought_P Parameter: Age (day) Value: 9
  misc_feature: MA Experiment 108556 PARAMETER Experiment Name: Zm_Drought_P Parameter: Organism Value: Zea mays
  misc_feature: MA Experiment 108556 PARAMETER Experiment Name: Zm_Drought_P Parameter: Plant Line Value: 35A19
  misc_feature: MA Experiment 108556 PARAMETER Experiment Name: Zm_Drought_P Parameter: Timepoint (hr) Value: 24
  misc_feature: MA Experiment 108556 PARAMETER Experiment Name: Zm_Drought_P Parameter: Tissue Value: Aerial
  misc_feature: MA Experiment 108556 PARAMETER Experiment Name: Zm_Drought_P Parameter: Treatment Value: Drought vs. No Drought
  misc_feature: MA Experiment ID: 20000488 Result: Up-regulated in Transcription
  misc_feature: MA Experiment 20000488 PARAMETER Experiment Name: Zm_50mM_NH4NO3_L_to_H_P Parameter: Organism Value: Zea mays
  misc_feature: MA Experiment 20000488 PARAMETER Experiment Name: Zm_50mM_NH4NO3_L_to_H_P Parameter: Timepoint (hr) Value: 8
  misc_feature: MA Experiment 20000488 PARAMETER Experiment Name: Zm_50mM_NH4NO3_L_to_H_P Parameter: Tissue Value: Leaves
  misc_feature: MA Experiment 20000488 PARAMETER Experiment Name: Zm_50mM_NH4NO3_L_to_H_P Parameter: Treatment Value: 50mM NH4NO3 vs. 100mM Mannitol
ctagaacgccgccgccagtcctcactcctcaccatttcccaaaccctacccatacccccgccgccgccgccatgccgcccaagctcgacccgtcgcaggtggtggaggtcttcgtccgggtgacgggcggcgaggtcggcgcggcgtcgtccctggcgcccaagatcggcccgctcggtctctccccgaagaagatcggcgaggacattgccaaggagacggccaaggactggaagggcctgcgcgtcaccgtcaagctcactgtccagaaccgcaggccaaggtctccgtcgtcccctccgccgccgcgctcgtcatcaaggcgctcaaggagcccgagagggacaggaagaaggtcaagaacatcaagcacagcggcaacatcggcctcgacgacgtcgtcgaggatcgccaggaccatgaggaacaggtccatggccaaggagttggccggcaccgtcaaggagatcctcggcacctgcgtcagcgtcgggtgcaccgtcgacggcaaggaccccaaggacctgcagcaggagattgatgacggcgaggtcgagatcccgtccgcttgaagactagacatccgaggggacttccattggtgctgctgaagtgttgttgttctgcatgccgtcgatgtacctttttcaagcaacgtgttccatctatttttttgtctagctatgttagtgatatcttgtgagagacctcaatgttaccaccgtatctttgtctttgttggatggagagttttaagcggttc

SEQ ID NO: 10217 - protein, 189 aa, Zea mays subsp. mays
  peptide (1)..(189): Ceres Seq. ID no. 12358031
  misc_feature (36)..(94): Pfam Name: Ribosomal protein L11, N-terminal domain Pfam Description: Ribosomal protein L11, N-terminal domain
  misc_feature (24)..(189): Homolog of NCBI NO: 38567975 NR Description: OSJNBa0093F12.16 [Oryza sativa (japonica
  misc_feature (24)..(187): Homolog of NCBI NO: 40287508 NR Description: 60S ribosomal protein L12 [Capsicum annuum]
  misc_feature (24)..(187): Homolog of NCBI NO: 15228098 NR Description: 60S ribosomal protein L12; protein id: supported by cDNA: 23523., supported by cDNA: gi_13926285 thaliana] >gi|19884128|sp|P50883|RL12_ARATH 60S ribosomal protein
  misc_feature (24)..(187): Homolog of NCBI NO: 15231814 NR Description: 60S RIBOSOMAL PROTEIN L12 -like; protein id:
  misc_feature (24)..(187): Homolog of NCBI NO: 6094002 NR Description: 60S RIBOSOMAL PROTEIN L12
  misc_feature (24)..(188): Homolog of NCBI NO: 15239409 NR Description: 60S ribosomal protein L12 - like; protein id: supported by cDNA: 42276., supported by cDNA: gi_14517557, by cDNA: gi_18700231 [Arabidopsis thaliana]
  misc_feature (24)..(187): Homolog of NCBI NO: 19075397 NR Description: 60s ribosomal protein l12 [Schizosaccharomyces
  misc_feature (33)..(189): Homolog of NCBI NO: 1710485 NR Description: 60S RIBOSOMAL PROTEIN L12 >gi|7440807|pir||T08157
  misc_feature (24)..(165): Homolog of NCBI NO: 3986695 NR Description: ribosomal protein L12 [Cichorium intybus]
  misc_feature (24)..(189): Homolog of NCBI NO: 27371046 NR Description: Similar to ribosomal protein L12 [Xenopus laevis]
RTPPPVLTPHHFPNPTHTPAAAAMPPKLDPSQVVEVFVRVTGGEVGAASSLAPKIGPLGLSPKKIGEDIAKETAKDWKGLRVTVKLTVQNRRPRSPSSPPPPRSSSRRSRSPRGTGRRSRTSSTAATSASTTSSRIARTMRNRSMAKELAGTVKEILGTCVSVGCTVDGKDPKDLQQEIDDGEVEIPSA

SEQ ID NO: 10218 - protein, 166 aa, Zea mays subsp. mays
  peptide (1)..(166): Ceres Seq. ID no. 12358032
  misc_feature (13)..(71): Pfam Name: Ribosomal protein L11, N-terminal domain Pfam Description: Ribosomal protein L11, N-terminal domain
  misc_feature (1)..(166): Homolog of NCBI NO: 38567975 NR Description: OSJNBa0093F12.16 [Oryza sativa (japonica
  misc_feature (1)..(164): Homolog of NCBI NO: 40287508 NR Description: 60S ribosomal protein L12 [Capsicum annuum]
  misc_feature (1)..(164): Homolog of NCBI NO: 15228098 NR Description: 60S ribosomal protein L12; protein id: supported by cDNA: 23523., supported by cDNA: gi_13926285 thaliana] >gi|19884128|sp|P50883|RL12_ARATH 60S ribosomal protein
  misc_feature (1)..(164): Homolog of NCBI NO: 15231814 NR Description: 60S RIBOSOMAL PROTEIN L12 -like; protein id:
  misc_feature (1)..(164): Homolog of NCBI NO: 6094002 NR Description: 60S RIBOSOMAL PROTEIN L12
  misc_feature (1)..(165): Homolog of NCBI NO: 15239409 NR Description: 60S ribosomal protein L12 - like; protein id: supported by cDNA: 42276., supported by cDNA: gi_14517557, by cDNA: gi_18700231 [Arabidopsis thaliana]
  misc_feature (1)..(164): Homolog of NCBI NO: 19075397 NR Description: 60s ribosomal protein l12 [Schizosaccharomyces
  misc_feature (10)..(166): Homolog of NCBI NO: 1710485 NR Description: 60S RIBOSOMAL PROTEIN L12 >gi|7440807|pir||T08157
  misc_feature (1)..(142): Homolog of NCBI NO: 3986695 NR Description: ribosomal protein L12 [Cichorium intybus]
  misc_feature (1)..(166): Homolog of NCBI NO: 27371046 NR Description: Similar to ribosomal protein L12 [Xenopus laevis]
MPPKLDPSQVVEVFVRVTGGEVGAASSLAPKIGPLGLSPKKIGEDIAKETAKDWKGLRVTVKLTVQNRRPRSPSSPPPPRSSSRRSRSPRGTGRRSRTSSTAATSASTTSSRIARTMRNRSMAKELAGTVKEILGTCVSVGCTVDGKDPKDLQQEIDDGEVEIPSA

SEQ ID NO: 10219 - DNA, 1346 bp, Zea mays subsp. mays; identical to SEQ ID NO: 4989
  misc_feature (1)..(1346): Ceres Seq. ID no. 12379321
  misc_feature: MA Experiment ID: 20000535 Result: Down-regulated in Transcription
  misc_feature: MA Experiment 20000535 PARAMETER Experiment Name: Zm_Hybrid_Seed_Dev_P Parameter: DAP Value: 30 vs. 12
  misc_feature: MA Experiment 20000535 PARAMETER Experiment Name: Zm_Hybrid_Seed_Dev_P Parameter: Organism Value: Zea mays
  misc_feature: MA Experiment 20000535 PARAMETER Experiment Name: Zm_Hybrid_Seed_Dev_P Parameter: Plant Line Value: 35A19
  misc_feature: MA Experiment 20000535 PARAMETER Experiment Name: Zm_Hybrid_Seed_Dev_P Parameter: Tissue Value: Embryo vs. Unfert Floret

SEQ ID NO: 10220 - protein, 222 aa, Zea mays subsp. mays; identical to SEQ ID NO: 4990
  peptide (1)..(222): Ceres Seq. ID no. 12379322
  misc_feature (22)..(203): Pfam Name: SNF7 Pfam Description: SNF7
  misc_feature (22)..(203): Pfam Name: SNF7 Pfam Description: SNF7
  misc_feature (3)..(222): Homolog of NCBI NO: 15233464 NR Description: putative protein; protein id: At4g29160.1, by cDNA: 7471., supported by cDNA: gi_14596130, supported by
  misc_feature (5)..(222): Homolog of NCBI NO: 21594892 NR Description: copia-like retroelement pol polyprotein
  misc_feature (3)..(222): Homolog of NCBI NO: 15224854 NR Description: copia-like retroelement pol polyprotein; protein At2g19830.1, supported by cDNA: gi_15028176, supported by cDNA:
  misc_feature (1)..(218): Homolog of NCBI NO: 28277855 NR Description: Unknown (protein for MGC:56112) [Danio rerio]
  misc_feature (1)..(217): Homolog of NCBI NO: 28077049 NR Description: RIKEN cDNA 2010012F05 [Mus musculus] Protein c20orf178 homolog >gi|15030308|gb|AAH11429.1| Unknown
  misc_feature (5)..(222): Homolog of NCBI NO: 21594892 NR Description: copia-like retroelement pol polyprotein
  misc_feature (1)..(218): Homolog of NCBI NO: 28277855 NR Description: Unknown (protein for MGC:56112) [Danio rerio]
  misc_feature (25)..(213): Homolog of NCBI NO: 28828571 NR Description: hypothetical protein [Dictyostelium discoideum]
  misc_feature (1)..(219): Homolog of NCBI NO: 13182765 NR Description: CDA04 [Homo sapiens]
  misc_feature (1)..(219): Homolog of NCBI NO: 40548422 NR Description: Snf7 homologue associated with Alix 2 [Homo >gi|28071136|emb|CAD61949.1| unnamed protein product [Homo
  misc_feature (1)..(212): Homolog of NCBI NO: 28278647 NR Description: Similar to RIKEN cDNA 2010012F05 gene [Danio
  misc_feature (1)..(217): Homolog of NCBI NO: 28827795 NR Description: chromosome 20 open reading frame 178 [Homo >gi|24636296|sp|Q9H444|CTH8_HUMAN Protein c20orf178 dJ553F4.4 (Novel protein similar to Drosophila CG8055 protein)
  misc_feature (1)..(217): Homolog of NCBI NO: 28077049 NR Description: RIKEN cDNA 2010012F05 [Mus musculus] Protein c20orf178 homolog >gi|15030308|gb|AAH11429.1| Unknown
  misc_feature (3)..(222): Homolog of NCBI NO: 15224854 NR Description: copia-like retroelement pol polyprotein; protein At2g19830.1, supported by cDNA: gi_15028176, supported by cDNA:
  misc_feature (3)..(222): Homolog of NCBI NO: 15233464 NR Description: putative protein; protein id: At4g29160.1, by cDNA: 7471., supported by cDNA: gi_14596130, supported by
  misc_feature (1)..(217): Homolog of NCBI NO: 28827795 NR Description: chromosome 20 open reading frame 178 [Homo >gi|24636296|sp|Q9H444|CTH8_HUMAN Protein c20orf178 dJ553F4.4 (Novel protein similar to Drosophila CG8055 protein)
  misc_feature (1)..(212): Homolog of NCBI NO: 28278647 NR Description: Similar to RIKEN cDNA 2010012F05 gene [Danio
  misc_feature (1)..(219): Homolog of NCBI NO: 40548422 NR Description: Snf7 homologue associated with Alix 2 [Homo >gi|28071136|emb|CAD61949.1| unnamed protein product [Homo
  misc_feature (1)..(219): Homolog of NCBI NO: 13182765 NR Description: CDA04 [Homo sapiens]
  misc_feature (25)..(213): Homolog of NCBI NO: 28828571 NR Description: hypothetical protein [Dictyostelium discoideum]

SEQ ID NO: 10221 - protein, 220 aa, Zea mays subsp. mays; identical to SEQ ID NO: 4991
  peptide (1)..(220): Ceres Seq. ID no. 12379323
  misc_feature (20)..(201): Pfam Name: SNF7 Pfam Description: SNF7
  misc_feature (20)..(201): Pfam Name: SNF7 Pfam Description: SNF7
  misc_feature (1)..(220): Homolog of NCBI NO: 15233464 NR Description: putative protein; protein id: At4g29160.1, by cDNA: 7471., supported by cDNA: gi_14596130, supported by
  misc_feature (3)..(220): Homolog of NCBI NO: 21594892 NR Description: copia-like retroelement pol polyprotein
  misc_feature (1)..(220): Homolog of NCBI NO: 15224854 NR Description: copia-like retroelement pol polyprotein; protein At2g19830.1, supported by cDNA: gi_15028176, supported by cDNA:
  misc_feature (1)..(216): Homolog of NCBI NO: 28277855 NR Description: Unknown (protein for MGC:56112) [Danio rerio]
  misc_feature (1)..(215): Homolog of NCBI NO: 28077049 NR Description: RIKEN cDNA 2010012F05 [Mus musculus] Protein c20orf178 homolog >gi|15030308|gb|AAH11429.1| Unknown
  misc_feature (3)..(220): Homolog of NCBI NO: 21594892 NR Description: copia-like retroelement pol polyprotein
  misc_feature (1)..(216): Homolog of NCBI NO: 28277855 NR Description: Unknown (protein for MGC:56112) [Danio rerio]
  misc_feature (23)..(211): Homolog of NCBI NO: 28828571 NR Description: hypothetical protein [Dictyostelium discoideum]
  misc_feature (1)..(217): Homolog of NCBI NO: 13182765 NR Description: CDA04 [Homo sapiens]
  misc_feature (1)..(217): Homolog of NCBI NO: 40548422 NR Description: Snf7 homologue associated with Alix 2 [Homo >gi|28071136|emb|CAD61949.1| unnamed protein product [Homo
  misc_feature (1)..(210): Homolog of NCBI NO: 28278647 NR Description: Similar to RIKEN cDNA 2010012F05 gene [Danio
  misc_feature (1)..(215): Homolog of NCBI NO: 28827795 NR Description: chromosome 20 open reading frame 178 [Homo >gi|24636296|sp|Q9H444|CTH8_HUMAN Protein c20orf178 dJ553F4.4 (Novel protein similar to Drosophila CG8055 protein)
  misc_feature (1)..(215): Homolog of NCBI NO: 28077049 NR Description: RIKEN cDNA 2010012F05 [Mus musculus] Protein c20orf178 homolog >gi|15030308|gb|AAH11429.1| Unknown
  misc_feature (1)..(220): Homolog of NCBI NO: 15224854 NR Description: copia-like retroelement pol polyprotein; protein At2g19830.1, supported by cDNA: gi_15028176, supported by cDNA:
  misc_feature (1)..(220): Homolog of NCBI NO: 15233464 NR Description: putative protein; protein id: At4g29160.1, by cDNA: 7471., supported by cDNA: gi_14596130, supported by
  misc_feature (1)..(215): Homolog of NCBI NO: 28827795 NR Description: chromosome 20 open reading frame 178 [Homo >gi|24636296|sp|Q9H444|CTH8_HUMAN Protein c20orf178 dJ553F4.4 (Novel protein similar to Drosophila CG8055 protein)
  misc_feature (1)..(210): Homolog of NCBI NO: 28278647 NR Description: Similar to RIKEN cDNA 2010012F05 gene [Danio
  misc_feature (1)..(217): Homolog of NCBI NO: 40548422 NR Description: Snf7 homologue associated with Alix 2 [Homo >gi|28071136|emb|CAD61949.1| unnamed protein product [Homo
  misc_feature (1)..(217): Homolog of NCBI NO: 13182765 NR Description: CDA04 [Homo sapiens]
  misc_feature (23)..(211): Homolog of NCBI NO: 28828571 NR Description: hypothetical protein [Dictyostelium discoideum]

SEQ ID NO: 10222 - protein, 191 aa, Zea mays subsp. mays; identical to SEQ ID NO: 4992
  peptide (1)..(191): Ceres Seq. ID no. 12379324
  misc_feature (1)..(172): Pfam Name: SNF7 Pfam Description: SNF7
  misc_feature (1)..(172): Pfam Name: SNF7 Pfam Description: SNF7
  misc_feature (1)..(191): Homolog of NCBI NO: 15233464 NR Description: putative protein; protein id: At4g29160.1, by cDNA: 7471., supported by cDNA: gi_14596130, supported by
  misc_feature (1)..(191): Homolog of NCBI NO: 21594892 NR Description: copia-like retroelement pol polyprotein
  misc_feature (1)..(191): Homolog of NCBI NO: 15224854 NR Description: copia-like retroelement pol polyprotein; protein At2g19830.1, supported by cDNA: gi_15028176, supported by cDNA:
  misc_feature (1)..(187): Homolog of NCBI NO: 28277855 NR Description: Unknown (protein for MGC:56112) [Danio rerio]
  misc_feature (1)..(186): Homolog of NCBI NO: 28077049 NR Description: RIKEN cDNA 2010012F05 [Mus musculus] Protein c20orf178 homolog >gi|15030308|gb|AAH11429.1| Unknown
  misc_feature (1)..(191): Homolog of NCBI NO: 21594892 NR Description: copia-like retroelement pol polyprotein
  misc_feature (1)..(187): Homolog of NCBI NO: 28277855 NR Description: Unknown (protein for MGC:56112) [Danio rerio]
  misc_feature (1)..(182): Homolog of NCBI NO: 28828571 NR Description: hypothetical protein [Dictyostelium discoideum]
  misc_feature (1)..(188): Homolog of NCBI NO: 13182765 NR Description: CDA04 [Homo sapiens]
  misc_feature (1)..(188): Homolog of NCBI NO: 40548422 NR Description: Snf7 homologue associated with Alix 2 [Homo >gi|28071136|emb|CAD61949.1| unnamed protein product [Homo
  misc_feature (1)..(181): Homolog of NCBI NO: 28278647 NR Description: Similar to RIKEN cDNA 2010012F05 gene [Danio
  misc_feature (1)..(186): Homolog of NCBI NO: 28827795 NR Description: chromosome 20 open reading frame 178 [Homo >gi|24636296|sp|Q9H444|CTH8_HUMAN Protein c20orf178 dJ553F4.4 (Novel protein similar to Drosophila CG8055 protein)
  misc_feature (1)..(186): Homolog of NCBI NO: 28077049 NR Description: RIKEN cDNA 2010012F05 [Mus musculus] Protein c20orf178 homolog >gi|15030308|gb|AAH11429.1| Unknown
  misc_feature (1)..(191): Homolog of NCBI NO: 15224854 NR Description: copia-like retroelement pol polyprotein; protein At2g19830.1, supported by cDNA: gi_15028176, supported by cDNA:
  misc_feature (1)..(191): Homolog of NCBI NO: 15233464 NR Description: putative protein; protein id: At4g29160.1, by cDNA: 7471., supported by cDNA: gi_14596130, supported by
  misc_feature (1)..(186): Homolog of NCBI NO: 28827795 NR Description: chromosome 20 open reading frame 178 [Homo >gi|24636296|sp|Q9H444|CTH8_HUMAN Protein c20orf178 dJ553F4.4 (Novel protein similar to Drosophila CG8055 protein)
  misc_feature (1)..(181): Homolog of NCBI NO: 28278647 NR Description: Similar to RIKEN cDNA 2010012F05 gene [Danio
  misc_feature (1)..(188): Homolog of NCBI NO: 40548422 NR Description: Snf7 homologue associated with Alix 2 [Homo >gi|28071136|emb|CAD61949.1| unnamed protein product [Homo
  misc_feature (1)..(188): Homolog of NCBI NO: 13182765 NR Description: CDA04 [Homo sapiens]
  misc_feature (1)..(182): Homolog of NCBI NO: 28828571 NR Description: hypothetical protein [Dictyostelium discoideum]

SEQ ID NO: 10223 - DNA, 696 bp, Zea mays subsp. mays
  misc_feature (1)..(696): Ceres Seq. ID no. 12400658
  misc_feature: MA Experiment ID: 108543 Result: Up-regulated in Transcription
gcatccacgctcgattcggccgttttccgcatccacggagccaggcgaccgccgccgcttccctactcacccttggccggcgacgacgagcgccaccacggcaggatgacgacgctgaggaacctcaagatcaagacgtcgacgtgcaagaggatcgtgaaggagctgcgctcgtacgagaaggaggtggagaaggaggcggccaagaccgccgacatgaaggagaagggcgctgatccctacgacctcaaacagcaggagaatgttttggctgagtcaaggatgatggtcccagactgccacaaacgacttgaaactgcactggctgacttgaaagcaacactggctgaactgaaggagtcaaatgagcaaggtgccgagattggagaagctgagagtacaatcgcagaagttgaagcagttgtcaagccagcagaagattaaactaaaaaaactcttggtttgctgaactgttagcgcacatcctattttcgcatattgagcccttgtgagcttattacgagatgtttgaggcgtgaaatcctgtaccattatcatcacttctatcttgaaatttgagtttctgttcccaagttctaagcgttactgtttgttgtctgggagagcgcacatccctggcttctccgggaagttgttagtgtaaattgaaattaagaaaaatggacgaatttgaat

SEQ ID NO: 10224 - protein, 147 aa, Zea mays subsp. mays
  peptide (1)..(147): Ceres Seq. ID no. 12400659
  misc_feature (41)..(134): Pfam Name: Tubulin binding cofactor A Pfam Description: Tubulin binding cofactor A
  misc_feature (36)..(115): Homolog of NCBI NO: 25408070 NR Description: probable TCP1-chaperonin cofactor A [imported] -
  misc_feature (39)..(139): Homolog of NCBI NO: 1711660 NR Description: TUBULIN-SPECIFIC CHAPERONE A (TUBULIN-FOLDING
  misc_feature (39)..(139): Homolog of NCBI NO: 4759212 NR Description: beta-tubulin cofactor A [Homo sapiens]
  misc_feature (39)..(139): Homolog of NCBI NO: 30585151 NR Description: Homo sapiens tubulin-specific chaperone a
  misc_feature (39)..(139): Homolog of NCBI NO: 28461233 NR Description: tubulin cofactor a [Bos taurus]
  misc_feature (36)..(147): Homolog of NCBI NO: 18402340 NR Description: TCP1-chaperonin cofactor A isolog; protein id: supported by cDNA: 1853., supported by cDNA: gi_15293036, by cDNA: gi_20259134, supported by cDNA: gi_20514256 [Arabidopsis
  misc_feature (39)..(139): Homolog of NCBI NO: 1711661 NR Description: TUBULIN-SPECIFIC CHAPERONE A (TUBULIN-FOLDING
  misc_feature (39)..(139): Homolog of NCBI NO: 6678225 NR Description: tubulin cofactor a; cofactor A; co-chaperonin
  misc_feature (39)..(139): Homolog of NCBI NO: 21706425 NR Description: Unknown (protein for IMAGE:4209187) [Mus musculus]
  misc_feature (39)..(139): Homolog of NCBI NO: 28278465 NR Description: Unknown (protein for MGC:56262) [Danio rerio]
ASTLDSAVFRIHGARRPPPLPYSPLAGDDERHHGRMTTLRNLKIKTSTCKRIVKELRSYEKEVEKEAAKTADMKEKGADPYDLKQQENVLAESRMMVPDCHKRLETALADLKATLAELKESNEQGAEIGEAESTIAEVEAVVKPAED

SEQ ID NO: 10225 - protein, 112 aa, Zea mays subsp. mays
  peptide (1)..(112): Ceres Seq. ID no. 12400660
  misc_feature (6)..(99): Pfam Name: Tubulin binding cofactor A Pfam Description: Tubulin binding cofactor A
  misc_feature (1)..(112): Homolog of NCBI NO: 18402340 NR Description: TCP1-chaperonin cofactor A isolog; protein id: supported by cDNA: 1853., supported by cDNA: gi_15293036, by cDNA: gi_20259134, supported by cDNA: gi_20514256 [Arabidopsis
  misc_feature (1)..(80): Homolog of NCBI NO: 25408070 NR Description: probable TCP1-chaperonin cofactor A [imported] -
  misc_feature (4)..(104): Homolog of NCBI NO: 1711660 NR Description: TUBULIN-SPECIFIC CHAPERONE A (TUBULIN-FOLDING
  misc_feature (4)..(104): Homolog of NCBI NO: 4759212 NR Description: beta-tubulin cofactor A [Homo sapiens]
  misc_feature (4)..(104): Homolog of NCBI NO: 30585151 NR Description: Homo sapiens tubulin-specific chaperone a
  misc_feature (4)..(104): Homolog of NCBI NO: 28461233 NR Description: tubulin cofactor a [Bos taurus]
  misc_feature (4)..(104): Homolog of NCBI NO: 1711661 NR Description: TUBULIN-SPECIFIC CHAPERONE A (TUBULIN-FOLDING
  misc_feature (4)..(104): Homolog of NCBI NO: 21706425 NR Description: Unknown (protein for IMAGE:4209187) [Mus musculus]
  misc_feature (4)..(104): Homolog of NCBI NO: 6678225 NR Description: tubulin cofactor a; cofactor A; co-chaperonin
  misc_feature (4)..(104): Homolog of NCBI NO: 28278465 NR Description: Unknown (protein for MGC:56262) [Danio rerio]
MTTLRNLKIKTSTCKRIVKELRSYEKEVEKEAAKTADMKEKGADPYDLKQQENVLAESRMMVPDCHKRLETALADLKATLAELKESNEQGAEIGEAESTIAEVEAVVKPAED

SEQ ID NO: 10226 - protein, 77 aa, Zea mays subsp. mays
  peptide (1)..(77): Ceres Seq. ID no. 12400661
IHARFGRFPHPRSQATAAASLLTLGRRRRAPPRQDDDAEEPQDQDVDVQEDREGAALVREGGGEGGGQDRRHEGEGR

SEQ ID NO: 10227 - DNA, 717 bp, Zea mays subsp. mays
  misc_feature (1)..(717): Ceres Seq. ID no. 12400650
  misc_feature: MA Experiment ID: 108535 Result: Up-regulated in Transcription
  misc_feature: MA Experiment 108535 PARAMETER Experiment Name: Zm_Meristem_P Parameter: Age (day) Value: 8
  misc_feature: MA Experiment 108535 PARAMETER Experiment Name: Zm_Meristem_P Parameter: Organism Value: Zea mays
  misc_feature: MA Experiment 108535 PARAMETER Experiment Name: Zm_Meristem_P Parameter: Plant Line Value: 35A19
  misc_feature: MA Experiment 108535 PARAMETER Experiment Name: Zm_Meristem_P Parameter: Tissue Value: Root Meristem vs. Above Root Meristem
  misc_feature: MA Experiment ID: 108556 Result: Down-regulated in Transcription
  misc_feature: MA Experiment 108556 PARAMETER Experiment Name: Zm_Drought_P Parameter: Age (day) Value: 9
  misc_feature: MA Experiment 108556 PARAMETER Experiment Name: Zm_Drought_P Parameter: Organism Value: Zea mays
  misc_feature: MA Experiment 108556 PARAMETER Experiment Name: Zm_Drought_P Parameter: Plant Line Value: 35A19
  misc_feature: MA Experiment 108556 PARAMETER Experiment Name: Zm_Drought_P Parameter: Timepoint (hr) Value: 24
  misc_feature: MA Experiment 108556 PARAMETER Experiment Name: Zm_Drought_P Parameter: Tissue Value: Aerial
  misc_feature: MA Experiment 108556 PARAMETER Experiment Name: Zm_Drought_P Parameter: Treatment Value: Drought vs. No Drought
  misc_feature: MA Experiment ID: 20000488 Result: Up-regulated in Transcription
  misc_feature: MA Experiment 20000488 PARAMETER Experiment Name: Zm_50mM_NH4NO3_L_to_H_P Parameter: Organism Value: Zea mays
  misc_feature: MA Experiment 20000488 PARAMETER Experiment Name: Zm_50mM_NH4NO3_L_to_H_P Parameter: Timepoint (hr) Value: 8
  misc_feature: MA Experiment 20000488 PARAMETER Experiment Name: Zm_50mM_NH4NO3_L_to_H_P Parameter: Tissue Value: Leaves
  misc_feature: MA Experiment 20000488 PARAMETER Experiment Name: Zm_50mM_NH4NO3_L_to_H_P Parameter: Treatment Value: 50mM NH4NO3 vs. 100mM Mannitol
aaccagcctccaccccatcaaccctacctaggcgccgccgccgccgcaggcggcccccgcatcgtcggcaagatgcagatctttgtgaagactctgacggggaagaccatcactttggaggtggagtcctcggacaccatcgacaatgtgaaggccaagatccaggacaaggagggcatccccccggaccagcagcggctcatcttcgccggcaagcagctcgaggacggtcgcaccctcgccgactacaacatccagaaggagtccaccctccacctggtgctccgcctccgcggcggcgccaagaagcgtaagaagaagacgtacaccaagcccaagaagatcaagcacaagcacaagaaggtgaagctctccgtgctgcagttctataaggtggacgacaccactagcaaggtgacccgcctccgcaaggagtgccccaactcagagtgcggcgcgggcgtcttcatggccaaccacttcgaccgccactactgcggcaagtgcggcctcacctatgtctacaaccagaaggcgtaattgcttgccccgatttgctttatccgcctaccctatcgagcatccagctgttggttactcgaactgtatctcatgtagatctgtctgaggttgaaacttaaatggagcagtagtatctgacatattggtacccctgttactgaattgacgtgatgctgagtttaattttgttttcgg

SEQ ID NO: 10228 - protein, 179 aa, Zea mays subsp. mays
  peptide (1)..(179): Ceres Seq. ID no. 12400651
  misc_feature (25)..(98): Pfam Name: Ubiquitin family Pfam Description: Ubiquitin family
  misc_feature (25)..(179): Homolog of NCBI NO: 902525 NR Description: ubiquitin fusion protein
  misc_feature (25)..(179): Homolog of NCBI NO: 82733 NR Description: ubiquitin / ribosomal protein S27a - maize ubiquitin fusion protein >gi|902527|gb|AAA70105.1| ubiquitin
  misc_feature (25)..(179): Homolog of NCBI NO: 100599 NR Description: ubiquitin / ribosomal protein S27a.2 - barley
  misc_feature (25)..(179): Homolog of NCBI NO: 100598 NR Description: ubiquitin / ribosomal protein S27a.1 - barley
  misc_feature (25)..(179): Homolog of NCBI NO: 34894792 NR Description: ubiquitin / ribosomal protein S27a [Oryza sativa
  misc_feature (25)..(179): Homolog of NCBI NO: 1044940 NR Description: fusion gene [Zea mays]
  misc_feature (25)..(177): Homolog of NCBI NO: 34581769 NR Description: ubiquitin extension protein [Cucumis sativus]
  misc_feature (25)..(179): Homolog of NCBI NO: 18252349 NR Description: ubiquitin extension protein [Pyrus communis]
  misc_feature (25)..(177): Homolog of NCBI NO: 279636 NR Description: ubiquitin / ribosomal protein S27a - tomato
  misc_feature (25)..(179): Homolog of NCBI NO: 541953 NR Description: ubiquitin/ribosomal protein S27a fusion protein - lupine >gi|438109|emb|CAA80333.1| ubiquitin extension protein
NQPPPHQPYLGAAAAAGGPRIVGKMQIFVKTLTGKTITLEVESSDTIDNVKAKIQDKEGIPPDQQRLIFAGKQLEDGRTLADYNIQKESTLHLVLRLRGGAKKRKKKTYTKPKKIKHKHKKVKLSVLQFYKVDDTTSKVTRLRKECPNSECGAGVFMANHFDRHYCGKCGLTYVYNQKA

SEQ ID NO: 10229 - protein, 155 aa, Zea mays subsp. mays
  peptide (1)..(155): Ceres Seq. ID no. 12400652
  misc_feature (1)..(74): Pfam Name: Ubiquitin family Pfam Description: Ubiquitin family
  misc_feature (1)..(155): Homolog of NCBI NO: 902525 NR Description: ubiquitin fusion protein
  misc_feature (1)..(155): Homolog of NCBI NO: 82733 NR Description: ubiquitin / ribosomal protein S27a - maize ubiquitin fusion protein >gi|902527|gb|AAA70105.1| ubiquitin
  misc_feature (1)..(155): Homolog of NCBI NO: 100599 NR Description: ubiquitin / ribosomal protein S27a.2 - barley
  misc_feature (1)..(155): Homolog of NCBI NO: 100598 NR Description: ubiquitin / ribosomal protein S27a.1 - barley
  misc_feature (1)..(155): Homolog of NCBI NO: 34894792 NR Description: ubiquitin / ribosomal protein S27a [Oryza sativa
  misc_feature (1)..(155): Homolog of NCBI NO: 1044940 NR Description: fusion gene [Zea mays]
  misc_feature (1)..(153): Homolog of NCBI NO: 34581769 NR Description: ubiquitin extension protein [Cucumis sativus]
  misc_feature (1)..(155): Homolog of NCBI NO: 18252349 NR Description: ubiquitin extension protein [Pyrus communis]
  misc_feature (1)..(153): Homolog of NCBI NO: 279636 NR Description: ubiquitin / ribosomal protein S27a - tomato
  misc_feature (1)..(155): Homolog of NCBI NO: 541953 NR Description: ubiquitin/ribosomal protein S27a fusion protein - lupine >gi|438109|emb|CAA80333.1| ubiquitin extension protein
MQIFVKTLTGKTITLEVESSDTIDNVKAKIQDKEGIPPDQQRLIFAGKQLEDGRTLADYNIQKESTLHLVLRLRGGAKKRKKKTYTKPKKIKHKHKKVKLSVLQFYKVDDTTSKVTRLRKECPNSECGAGVFMANHFDRHYCGKCGLTYVYNQKA

SEQ ID NO: 10230 - protein, 103 aa, Zea mays subsp. mays
  peptide (1)..(103): Ceres Seq. ID no. 12400653
PASTPSTLPRRRRRRRRPPHRRQDADLCEDSDGEDHHFGGGVLGHHRQCEGQDPGQGGHPPGPAAAHLRRQAARGRSHPRRLQHPEGVHPPPGAPPPRRRQEA

SEQ ID NO: 10231 - DNA, 764 bp, Zea mays subsp. mays
  misc_feature (1)..(764): Ceres Seq. ID no. 12341984
  misc_feature: MA Experiment ID: 108522 Result: Down-regulated in Transcription
  misc_feature: MA Experiment 108522 PARAMETER Experiment Name: Zm_42deg_Heat_P Parameter: Age (day) Value: 8
  misc_feature: MA Experiment 108522 PARAMETER Experiment Name: Zm_42deg_Heat_P Parameter: Organism Value: Zea mays
  misc_feature: MA Experiment 108522 PARAMETER Experiment Name: Zm_42deg_Heat_P Parameter: Plant Line Value: 35A19
  misc_feature: MA Experiment 108522 PARAMETER Experiment Name: Zm_42deg_Heat_P Parameter: Temperature (deg C) Value: 42 vs. 22
  misc_feature: MA Experiment 108522 PARAMETER Experiment Name: Zm_42deg_Heat_P Parameter: Timepoint (hr) Value: 1
  misc_feature: MA Experiment 108522 PARAMETER Experiment Name: Zm_42deg_Heat_P Parameter: Tissue Value: Aerial
  misc_feature: MA Experiment ID: 20000534 Result: Down-regulated in Transcription
  misc_feature: MA Experiment 20000534 PARAMETER Experiment Name: Zm_Hybrid_Pollen_P Parameter: Age (day) Value: 8
  misc_feature: MA Experiment 20000534 PARAMETER Experiment Name: Zm_Hybrid_Pollen_P Parameter: Organism Value: Zea mays
  misc_feature: MA Experiment 20000534 PARAMETER Experiment Name: Zm_Hybrid_Pollen_P Parameter: Plant Line Value: 35A19
  misc_feature: MA Experiment 20000534 PARAMETER Experiment Name: Zm_Hybrid_Pollen_P Parameter: Tissue Value: Pollen vs. Aerial
taaagttcagcagtgatggcaggcggattctgttaaccactaaagctggacgtgtccatgtgctagattcattccatggcaatagcattgcgtcgtgcaatgtgaagccagtggtaaccaactcaacactggaggcgtcgttcagccctgatggaaaccatatcatatctggctccggtgacggtagtgtttatgcttggaatgttaggagtggaaaggtcgcgcgctggggaagcacagacgacgaaccgccgctggtaaggtgggctccaggatccttgatgttcgtgacaggatcatcagaactgtcatgctgggttccggacctgtctaagctgggatcctttaccattagcaagtaggtgaaaatgataagaggtggactgcccttgcaaaccctgctcgtccctgtatgctctgtcgtgtggctactcatcctttagccaggtggccgtggtaaacttgcaacctgttacaattgaatgactcgtgtagagcatcggcagtggcgatctggcttctgaagccagcggctagacaatgaagatggatccatgctttagttctgtaaaccggagattgtagctgagtattgctgcatctccttgtttctggaaggcatcttggctcgtaaagattctgcaactcagaccagatggctaatatagagagagcaaagaaacaatggatagctgggctgcttgttctgttttcagttggattccttgaactgatgtgtgattccgttgtgcatgcaccgattc

SEQ ID NO: 10232 - protein, 119 aa, Zea mays subsp. mays
  peptide (1)..(119): Ceres Seq. ID no. 12341985
  misc_feature (1)..(119): Homolog of NCBI NO: 28564824 NR Description: OSJNBb0005G07.13 [Oryza sativa (japonica
  misc_feature (1)..(119): Homolog of NCBI NO: 18425050 NR Description: WD repeat protein-like; protein id: At5g66240.1, by cDNA: 11277., supported by cDNA: gi_19698940 [Arabidopsis
  misc_feature (1)..(119): Homolog of NCBI NO: 30698206 NR Description: transducin / WD-40 repeat protein family
  misc_feature (1)..(119): Homolog of NCBI NO: 21536827 NR Description: WD repeat protein-like [Arabidopsis thaliana]
  misc_feature (1)..(108): Homolog of NCBI NO: 15241434 NR Description: putative protein; protein id: At5g14530.1, by cDNA: 232187. [Arabidopsis thaliana] >gi|11358037|pir||T48626
  misc_feature (1)..(107): Homolog of NCBI NO: 19920938 NR Description: CG17293-PA [Drosophila melanogaster]
  misc_feature (1)..(109): Homolog of NCBI NO: 18676851 NR Description: unnamed protein product [Homo sapiens]
  misc_feature (1)..(109): Homolog of NCBI NO: 28277563 NR Description: Similar to RIKEN cDNA 9430077D24 gene [Danio
  misc_feature (1)..(107): Homolog of NCBI NO: 31232763 NR Description: ENSANGP00000013183 [Anopheles gambiae]
  misc_feature (1)..(109): Homolog of NCBI NO: 17512281 NR Description: Unknown (protein for IMAGE:3596090) [Mus musculus]
KFSSDGRRILLTTKAGRVHVLDSFHGNSIASCNVKPVVTNSTLEASFSPDGNHIISGSGDGSVYAWNVRSGKVARWGSTDDEPPLVRWAPGSLMFVTGSSELSCWVPDLSKLGSFTISK

SEQ ID NO: 10233 - DNA, 776 bp, Zea mays subsp. mays
  misc_feature (1)..(776): Ceres Seq. ID no. 12400260
  misc_feature: MA Experiment ID: 108528 Result: Down-regulated in Transcription
  misc_feature: MA Experiment 108528 PARAMETER Experiment Name: Zm_Imbibed_Seeds_P Parameter: Age (day) Value: 5 vs. 2
  misc_feature: MA Experiment 108528 PARAMETER Experiment Name: Zm_Imbibed_Seeds_P Parameter: Organism Value: Zea mays
  misc_feature: MA Experiment 108528 PARAMETER Experiment Name: Zm_Imbibed_Seeds_P Parameter: Plant Line Value: 35A19
  misc_feature: MA Experiment 108528 PARAMETER Experiment Name: Zm_Imbibed_Seeds_P Parameter: Tissue Value: Aerial vs. Embryo
  misc_feature: MA Experiment ID: 108535 Result: Down-regulated in Transcription
  misc_feature: MA Experiment 108535 PARAMETER Experiment Name: Zm_Meristem_P Parameter: Age (day) Value: 8
  misc_feature: MA Experiment 108535 PARAMETER Experiment Name: Zm_Meristem_P Parameter: Organism Value: Zea mays
  misc_feature: MA Experiment 108535 PARAMETER Experiment Name: Zm_Meristem_P Parameter: Plant Line Value: 35A19
  misc_feature: MA Experiment 108535 PARAMETER Experiment Name: Zm_Meristem_P Parameter: Tissue Value: Root Meristem vs. Above Root Meristem
  misc_feature: MA Experiment ID: 108543 Result: Up-regulated in Transcription
  misc_feature: MA Experiment ID: 108547 Result: Down-regulated in Transcription
  misc_feature: MA Experiment 108547 PARAMETER Experiment Name: Zm_Imbibed_Seeds_P Parameter: Age (day) Value: 4 vs. 2
  misc_feature: MA Experiment 108547 PARAMETER Experiment Name: Zm_Imbibed_Seeds_P Parameter: Organism Value: Zea mays
  misc_feature: MA Experiment 108547 PARAMETER Experiment Name: Zm_Imbibed_Seeds_P Parameter: Plant Line Value: 35A19
  misc_feature: MA Experiment 108547 PARAMETER Experiment Name: Zm_Imbibed_Seeds_P Parameter: Tissue Value: Aerial vs. Embryo
  misc_feature: MA Experiment ID: 20000108 Result: Down-regulated in Transcription
  misc_feature: MA Experiment 20000108 PARAMETER Experiment Name: Zm_Root-Tips_P Parameter: Age (day) Value: 12
  misc_feature: MA Experiment 20000108 PARAMETER Experiment Name: Zm_Root-Tips_P Parameter: Organism Value: Zea mays
  misc_feature: MA Experiment 20000108 PARAMETER Experiment Name: Zm_Root-Tips_P Parameter: Tissue Value: Root tips vs. Root mid region    35
  misc_feature: MA Experiment 20000108 PARAMETER Experiment Name: Zm_Root-Tips_P Parameter: Tissue Value: Root tips vs. Root mid region   Sequence Listing-Misc Features (4)
  misc_feature: MA Experiment ID: 20000535 Result: Down-regulated in Transcription
  misc_feature: MA Experiment 20000535 PARAMETER Experiment Name: Zm_Hybrid_Seed_Dev_P Parameter: DAP Value: 30 vs. 12
  misc_feature: MA Experiment 20000535 PARAMETER Experiment Name: Zm_Hybrid_Seed_Dev_P Parameter: Organism Value: Zea mays
  misc_feature: MA Experiment 20000535 PARAMETER Experiment Name: Zm_Hybrid_Seed_Dev_P Parameter: Plant Line Value: 35A19
  misc_feature: MA Experiment 20000535 PARAMETER Experiment Name: Zm_Hybrid_Seed_Dev_P Parameter: Tissue Value: Embryo vs. Unfert Floret
agcaagcaaagattgcgccggtgagggtgttcgggacggcggacttcgtgaacgctgcgagggttatggcttgcctggaggaagttggcgtggagtacgaggtcgtcgaggtcgactacgcggccatggagcacaagggcgcccagcacctcgcaagaaacccgttcggccaaatcccagcgtttcaggacggggacacgatgctctttgaatcccgagcaatcgccaagtacgtgctccgcaaatactccaagtcagctcaagtcgacctgctccgtgagggcaacccggaggaagccgccatggtagacgtgtggacggaggtcgaggcgcacacctacctacccggccatcgcgcccatcttctacgagtacgtggtgtaccccgccgagcatggcaccacgcccaaccaggaggtggtggacgagagtgtggagaggctcaggaaggtcctcgacgtctacgaggcgcacctgtacaagaccaagcagctctatctcgccggggactacttcagcctcgccgatctcaaccacgtcccgtacaccttccacctcatgaggacaccgcacgcgtcgctcttcgaggcgtatcctcacgttaaggcctggtgggagagagttatagcacgcccgtcgctgcagaagctcgccccggatatggtgatcaaagcctgattgcacgtacctttgtatcatcagattcttccttggggtgtatatatgcaaggggtacctttcttgcaaaataaataaagaaataaataaatccgatc

SEQ ID NO: 10234 - protein, 200 aa, Zea mays subsp. mays
  peptide (1)..(200): Ceres Seq. ID no. 12400261
  misc_feature (4)..(115): Homolog of NCBI NO: 18479038 NR Description: glutathione transferase [Hordeum vulgare subsp.
  misc_feature (4)..(115): Homolog of NCBI NO: 22022400 NR Description: glutathione-S-transferase 19E50 [Triticum
  misc_feature (4)..(115): Homolog of NCBI NO: 23504747 NR Description: glutathione transferase F6 [Triticum aestivum]
  misc_feature (4)..(115): Homolog of NCBI NO: 25287116 NR Description: glutathione transferase (EC 2.5.1.18) GST2a - Alopecurus myosuroides >gi|4127352|emb|CAA09190.1| glutathione
  misc_feature (4)..(113): Homolog of NCBI NO: 34914764 NR Description: putative glutathione S-transferase [Oryza sativa
  misc_feature (4)..(115): Homolog of NCBI NO: 25287117 NR Description: glutathione transferase (EC 2.5.1.18) GST2b - Alopecurus myosuroides >gi|4127354|emb|CAA09191.1| glutathione
  misc_feature (4)..(115): Homolog of NCBI NO: 25287118 NR Description: glutathione transferase (EC 2.5.1.18) GST2c - Alopecurus myosuroides >gi|4127370|emb|CAA09192.1| glutathione
  misc_feature (4)..(115): Homolog of NCBI NO: 25287121 NR Description: glutathione transferase (EC 2.5.1.18) GST2d - Alopecurus myosuroides >gi|4127372|emb|CAA09193.1| glutathione
  misc_feature (4)..(115): Homolog of NCBI NO: 34914744 NR Description: putative glutathione transferase [Oryza sativa
  misc_feature (7)..(115): Homolog of NCBI NO: 1170092 NR Description: GLUTATHIONE S-TRANSFERASE IV (GST-IV) (GST-27)
QAKIAPVRVFGTADFVNAARVMACLEEVGVEYEVVEVDYAAMEHKGAQHLARNPFGQIPAFQDGDTMLFESRAIAKYVLRKYSKSAQVDLLREGNPEEAAMVDVWTEVEAHTYLPGHRAHLLRVRGVPRRAWHHAQPGGGGRECGEAQEGPRRLRGAPVQDQAALSRRGLLQPRRSQPRPVHLPPHEDTARVALRGVSSR

SEQ ID NO: 10235 - protein, 179 aa, Zea mays subsp. mays
  peptide (1)..(179): Ceres Seq. ID no. 12400262
  misc_feature (1)..(94): Homolog of NCBI NO: 18479038 NR Description: glutathione transferase [Hordeum vulgare subsp.
  misc_feature (1)..(94): Homolog of NCBI NO: 22022400 NR Description: glutathione-S-transferase 19E50 [Triticum
  misc_feature (1)..(94): Homolog of NCBI NO: 23504747 NR Description: glutathione transferase F6 [Triticum aestivum]
  misc_feature (1)..(94): Homolog of NCBI NO: 25287116 NR Description: glutathione transferase (EC 2.5.1.18) GST2a - Alopecurus myosuroides >gi|4127352|emb|CAA09190.1| glutathione
  misc_feature (1)..(92): Homolog of NCBI NO: 34914764 NR Description: putative glutathione S-transferase [Oryza sativa
  misc_feature (1)..(94): Homolog of NCBI NO: 25287117 NR Description: glutathione transferase (EC 2.5.1.18) GST2b - Alopecurus myosuroides >gi|4127354|emb|CAA09191.1| glutathione
  misc_feature (1)..(94): Homolog of NCBI NO: 25287118 NR Description: glutathione transferase (EC 2.5.1.18) GST2c - Alopecurus myosuroides >gi|4127370|emb|CAA09192.1| glutathione
  misc_feature (1)..(94): Homolog of NCBI NO: 25287121 NR Description: glutathione transferase (EC 2.5.1.18) GST2d - Alopecurus myosuroides >gi|4127372|emb|CAA09193.1| glutathione
  misc_feature (1)..(94): Homolog of NCBI NO: 34914744 NR Description: putative glutathione transferase [Oryza sativa
  misc_feature (1)..(94): Homolog of NCBI NO: 1170092 NR Description: GLUTATHIONE S-TRANSFERASE IV (GST-IV) (GST-27)
MACLEEVGVEYEVVEVDYAAMEHKGAQHLARNPFGQIPAFQDGDTMLFESRAIAKYVLRKYSKSAQVDLLREGNPEEAAMVDVWTEVEAHTYLPGHRAHLLRVRGVPRRAWHHAQPGGGGRECGEAQEGPRRLRGAPVQDQAALSRRGLLQPRRSQPRPVHLPPHEDTARVALRGVSSR

SEQ ID NO: 10236 - protein, 159 aa, Zea mays subsp. mays
  peptide (1)..(159): Ceres Seq. ID no. 12400263
  misc_feature (1)..(74): Homolog of NCBI NO: 18479038 NR Description: glutathione transferase [Hordeum vulgare subsp.
  misc_feature (1)..(74): Homolog of NCBI NO: 22022400 NR Description: glutathione-S-transferase 19E50 [Triticum
  misc_feature (1)..(74): Homolog of NCBI NO: 23504747 NR Description: glutathione transferase F6 [Triticum aestivum]
  misc_feature (1)..(74): Homolog of NCBI NO: 25287116 NR Description: glutathione transferase (EC 2.5.1.18) GST2a - Alopecurus myosuroides >gi|4127352|emb|CAA09190.1| glutathione
  misc_feature (1)..(72): Homolog of NCBI NO: 34914764 NR Description: putative glutathione S-transferase [Oryza sativa
  misc_feature (1)..(74): Homolog of NCBI NO: 25287117 NR Description: glutathione transferase (EC 2.5.1.18) GST2b - Alopecurus myosuroides >gi|4127354|emb|CAA09191.1| glutathione
  misc_feature (1)..(74): Homolog of NCBI NO: 25287118 NR Description: glutathione transferase (EC 2.5.1.18) GST2c - Alopecurus myosuroides >gi|4127370|emb|CAA09192.1| glutathione
  misc_feature (1)..(74): Homolog of NCBI NO: 25287121 NR Description: glutathione transferase (EC 2.5.1.18) GST2d - Alopecurus myosuroides >gi|4127372|emb|CAA09193.1| glutathione
  misc_feature (1)..(74): Homolog of NCBI NO: 34914744 NR Description: putative glutathione transferase [Oryza sativa
  misc_feature (1)..(74): Homolog of NCBI NO: 1170092 NR Description: GLUTATHIONE S-TRANSFERASE IV (GST-IV) (GST-27)
MEHKGAQHLARNPFGQIPAFQDGDTMLFESRAIAKYVLRKYSKSAQVDLLREGNPEEAAMVDVWTEVEAHTYLPGHRAHLLRVRGVPRRAWHHAQPGGGGRECGEAQEGPRRLRGAPVQDQAALSRRGLLQPRRSQPRPVHLPPHEDTARVALRGVSSR

SEQ ID NO: 10237 - DNA, 979 bp, Zea mays subsp. mays
  misc_feature (1)..(979): Ceres Seq. ID no. 12400717
  misc_feature: MA Experiment ID: 108543 Result: Up-regulated in Transcription
  misc_feature: MA Experiment ID: 20000492 Result: Down-regulated in Transcription
  misc_feature: MA Experiment 20000492 PARAMETER Experiment Name: Zm_Hybrid_Seed_Dev_P Parameter: DAP Value: 12
  misc_feature: MA Experiment 20000492 PARAMETER Experiment Name: Zm_Hybrid_Seed_Dev_P Parameter: Organism Value: Zea mays
  misc_feature: MA Experiment 20000492 PARAMETER Experiment Name: Zm_Hybrid_Seed_Dev_P Parameter: Plant Line Value: 35A19
  misc_feature: MA Experiment 20000492 PARAMETER Experiment Name: Zm_Hybrid_Seed_Dev_P Parameter: Tissue Value: Fert Kernel vs. Unfert Floret
  misc_feature: MA Experiment ID: 20000535 Result: Down-regulated in Transcription
  misc_feature: MA Experiment 20000535 PARAMETER Experiment Name: Zm_Hybrid_Seed_Dev_P Parameter: DAP Value: 30 vs. 12
  misc_feature: MA Experiment 20000535 PARAMETER Experiment Name: Zm_Hybrid_Seed_Dev_P Parameter: Organism Value: Zea mays
  misc_feature: MA Experiment 20000535 PARAMETER Experiment Name: Zm_Hybrid_Seed_Dev_P Parameter: Plant Line Value: 35A19
  misc_feature: MA Experiment 20000535 PARAMETER Experiment Name: Zm_Hybrid_Seed_Dev_P Parameter: Tissue Value: Embryo vs. Unfert Floret
  misc_feature: MA Experiment ID: 20000626 Result: Down-regulated in Transcription
  misc_feature: MA Experiment 20000626 PARAMETER Experiment Name: Zm_Herbicide-Treatments_P Parameter: Timepoint (hr) Value: 12
  misc_feature: MA Experiment 20000626 PARAMETER Experiment Name: Zm_Herbicide-Treatments_P Parameter: Tissue Value: Aerial
  misc_feature: MA Experiment 20000626 PARAMETER Experiment Name: Zm_Herbicide-Treatments_P Parameter: Treatment Value: Roundup vs. No Treatment
cgattccgcccgcgtccgcggacccagatctggcgcccgcgcccatggcgacgcgcaggcgaatgctcctcaaggtcatcatcctcggcgacagcggggtcggcaagacctcgctgatgaaccagtacgtcaacaacaggttcagcaaccagtacaaggccaccatcggcgcggatttcctcaccaaggaggtccagatcgacgaccgcctcttcacactgcagatatgggatacggcaggacaggagcggtttcaaagtcttggtgtggcattttataggggagctgactgctgtgttcttgtatatgatgtcaacgtatccaagtcatttgaaaagctcaacaactggcgtgaggaattcctaattcaagccagcccatcagacccagagaatttcccatttgttgtgcttggtaacaagatcgatgttgatggtggtaacagccggactgtttctgagaagaaggctaaagcatggtgtgcttcaaagggaaacatcccctactttgagacgtcggctaaagagggcttcaatgtagaggctgcatttgagtgtatagcgaggaatgctgtaaaaaatgagccagaagaagatatgtatcttcctgatacgattgatgttgggggcgctggaaggcaacaacgttcgtcaggttgtgaatgctagaagatatggagcactgcgatttgctcggttggttggtctgattctctagggcttgtttgggtggcctgtgtcatttcatatatgtatttagtttgcaaaactgctatttgtggacactggatagtttggaagtctgcatgcgggtgcttattgtcgactcccgtgtagatgcagagaactcatttgtaactaccgtttcggtgttgtatcgtatctgcgctagatgctagtgttgtagcgcttttgattgttgatggattgcatatatgtactatatttgtacatgaacagaacgtagtgcccattttcat

SEQ ID NO: 10238 - protein, 221 aa, Zea mays subsp. mays
  peptide (1)..(221): Ceres Seq. ID no. 12400718
  misc_feature (24)..(192): Pfam Name: Ras family Pfam Description: Ras family
  misc_feature (15)..(221): Homolog of NCBI NO: 1370188 NR Description: RAB7D [Lotus japonicus]
  misc_feature (15)..(199): Homolog of NCBI NO: 34904236 NR Description: RAS-related GTP-binding protein Rab7 family
  misc_feature (15)..(221): Homolog of NCBI NO: 3914550 NR Description: RAS-RELATED PROTEIN RAB7
  misc_feature (15)..(221): Homolog of NCBI NO: 7388049 NR Description: Ras-related protein Rab7
  misc_feature (15)..(221): Homolog of NCBI NO: 15218194 NR Description: GTP-binding protein, putative; protein id: supported by cDNA: gi_15718409, supported by cDNA: gi_18389227, by cDNA: gi_20465884 [Arabidopsis thaliana]
  misc_feature (15)..(221): Homolog of NCBI NO: 15233284 NR Description: GTP-binding protein, putative; protein id: supported by cDNA: 115178., supported by cDNA: gi_15718411
  misc_feature (15)..(220): Homolog of NCBI NO: 7438407 NR Description: GTP-binding protein Rab7a - common tobacco
  misc_feature (15)..(219): Homolog of NCBI NO: 3914557 NR Description: RAS-RELATED PROTEIN RAB7 (POSSIBLE
  misc_feature (15)..(221): Homolog of NCBI NO: 34484308 NR Description: putative GTP-binding protein [Cucumis sativus]
  misc_feature (15)..(221): Homolog of NCBI NO: 1370186 NR Description: RAB7C [Lotus japonicus]
IPPASADPDLAPAPMATRRRMLLKVIILGDSGVGKTSLMNQYVNNRFSNQYKATIGADFLTKEVQIDDRLFTLQIWDTAGQERFQSLGVAFYRGADCCVLVYDVNVSKSFEKLNNWREEFLIQASPSDPENFPFVVLGNKIDVDGGNSRTVSEKKAKAWCASKGNIPYFETSAKEGFNVEAAFECIARNAVKNEPEEDMYLPDTIDVGGAGRQQRSSGCEC

SEQ ID NO: 10239 - protein, 207 aa, Zea mays subsp. mays; identical to SEQ ID NO: 5834
  peptide (1)..(207): Ceres Seq. ID no. 12400719
  misc_feature (10)..(178): Pfam Name: Ras family Pfam Description: Ras family
  misc_feature (1)..(207): Homolog of NCBI NO: 1370188 NR Description: RAB7D [Lotus japonicus]
  misc_feature (1)..(185): Homolog of NCBI NO: 34904236 NR Description: RAS-related GTP-binding protein Rab7 family
  misc_feature (1)..(207): Homolog of NCBI NO: 3914550 NR Description: RAS-RELATED PROTEIN RAB7
  misc_feature (1)..(207): Homolog of NCBI NO: 7388049 NR Description: Ras-related protein Rab7
  misc_feature (1)..(207): Homolog of NCBI NO: 15218194 NR Description: GTP-binding protein, putative; protein id: supported by cDNA: gi_15718409, supported by cDNA: gi_18389227, by cDNA: gi_20465884 [Arabidopsis thaliana]
  misc_feature (1)..(207): Homolog of NCBI NO: 15233284 NR Description: GTP-binding protein, putative; protein id: supported by cDNA: 115178., supported by cDNA: gi_15718411
  misc_feature (1)..(206): Homolog of NCBI NO: 7438407 NR Description: GTP-binding protein Rab7a - common tobacco
  misc_feature (1)..(205): Homolog of NCBI NO: 3914557 NR Description: RAS-RELATED PROTEIN RAB7 (POSSIBLE
  misc_feature (1)..(207): Homolog of NCBI NO: 34484308 NR Description: putative GTP-binding protein [Cucumis sativus]
  misc_feature (1)..(207): Homolog of NCBI NO: 1370186 NR Description: RAB7C [Lotus japonicus]

SEQ ID NO: 10240 - protein, 201 aa, Zea mays subsp. mays; identical to SEQ ID NO: 5835
  peptide (1)..(201): Ceres Seq. ID no. 12400720
  misc_feature (4)..(172): Pfam Name: Ras family Pfam Description: Ras family
  misc_feature (1)..(201): Homolog of NCBI NO: 1370188 NR Description: RAB7D [Lotus japonicus]
  misc_feature (1)..(179): Homolog of NCBI NO: 34904236 NR Description: RAS-related GTP-binding protein Rab7 family
  misc_feature (1)..(201): Homolog of NCBI NO: 3914550 NR Description: RAS-RELATED PROTEIN RAB7
  misc_feature (1)..(201): Homolog of NCBI NO: 7388049 NR Description: Ras-related protein Rab7
  misc_feature (1)..(201): Homolog of NCBI NO: 15218194 NR Description: GTP-binding protein, putative; protein id: supported by cDNA: gi_15718409, supported by cDNA: gi_18389227, by cDNA: gi_20465884 [Arabidopsis thaliana]
  misc_feature (1)..(201): Homolog of NCBI NO: 15233284 NR Description: GTP-binding protein, putative; protein id: supported by cDNA: 115178., supported by cDNA: gi_15718411
  misc_feature (1)..(200): Homolog of NCBI NO: 7438407 NR Description: GTP-binding protein Rab7a - common tobacco
  misc_feature (1)..(199): Homolog of NCBI NO: 3914557 NR Description: RAS-RELATED PROTEIN RAB7 (POSSIBLE
  misc_feature (1)..(201): Homolog of NCBI NO: 34484308 NR Description: putative GTP-binding protein [Cucumis sativus]
  misc_feature (1)..(201): Homolog of NCBI NO: 1370186 NR Description: RAB7C [Lotus japonicus]

SEQ ID NO: 10241 - DNA, 1280 bp, Zea mays subsp. mays; identical to SEQ ID NO: 1575
  misc_feature (1)..(1280): Ceres Seq. ID no. 12340706
  misc_feature: MA Experiment ID: 108530 Result: Down-regulated in Transcription
  misc_feature: MA Experiment 108530 PARAMETER Experiment Name: Zm_Imbibed_Seeds_P Parameter: Age (day) Value: 6 vs. 2
  misc_feature: MA Experiment 108530 PARAMETER Experiment Name: Zm_Imbibed_Seeds_P Parameter: Organism Value: Zea mays
  misc_feature: MA Experiment 108530 PARAMETER Experiment Name: Zm_Imbibed_Seeds_P Parameter: Plant Line Value: 35A19
  misc_feature: MA Experiment 108530 PARAMETER Experiment Name: Zm_Imbibed_Seeds_P Parameter: Tissue Value: Aerial vs. Embryo
  misc_feature: MA Experiment ID: 108535 Result: Up-regulated in Transcription
  misc_feature: MA Experiment 108535 PARAMETER Experiment Name: Zm_Meristem_P Parameter: Age (day) Value: 8
  misc_feature: MA Experiment 108535 PARAMETER Experiment Name: Zm_Meristem_P Parameter: Organism Value: Zea mays
  misc_feature: MA Experiment 108535 PARAMETER Experiment Name: Zm_Meristem_P Parameter: Plant Line Value: 35A19
  misc_feature: MA Experiment 108535 PARAMETER Experiment Name: Zm_Meristem_P Parameter: Tissue Value: Root Meristem vs. Above Root Meristem
  misc_feature: MA Experiment ID: 108544 Result: Down-regulated in Transcription
  misc_feature: MA Experiment ID: 108556 Result: Down-regulated in Transcription
  misc_feature: MA Experiment 108556 PARAMETER Experiment Name: Zm_Drought_P Parameter: Age (day) Value: 9
  misc_feature: MA Experiment 108556 PARAMETER Experiment Name: Zm_Drought_P Parameter: Organism Value: Zea mays
  misc_feature: MA Experiment 108556 PARAMETER Experiment Name: Zm_Drought_P Parameter: Plant Line Value: 35A19
  misc_feature: MA Experiment 108556 PARAMETER Experiment Name: Zm_Drought_P Parameter: Timepoint (hr) Value: 24
  misc_feature: MA Experiment 108556 PARAMETER Experiment Name: Zm_Drought_P Parameter: Tissue Value: Aerial
  misc_feature: MA Experiment 108556 PARAMETER Experiment Name: Zm_Drought_P Parameter: Treatment Value: Drought vs. No Drought
  misc_feature: MA Experiment ID: 20000108 Result: Up-regulated in Transcription
  misc_feature: MA Experiment 20000108 PARAMETER Experiment Name: Zm_Root-Tips_P Parameter: Age (day) Value: 12
  misc_feature: MA Experiment 20000108 PARAMETER Experiment Name: Zm_Root-Tips_P Parameter: Organism Value: Zea mays
  misc_feature: MA Experiment 20000108 PARAMETER Experiment Name: Zm_Root-Tips_P Parameter: Tissue Value: Root tips vs. Root mid region    35
  misc_feature: MA Experiment 20000108 PARAMETER Experiment Name: Zm_Root-Tips_P Parameter: Tissue Value: Root tips vs. Root mid region   Sequence Listing-Misc Features (4)
  misc_feature: MA Experiment ID: 20000478 Result: Down-regulated in Transcription
  misc_feature: MA Experiment 20000478 PARAMETER Experiment Name: Zm_5mM_SA_P Parameter: Age (day) Value: 11
  misc_feature: MA Experiment 20000478 PARAMETER Experiment Name: Zm_5mM_SA_P Parameter: Organism Value: Zea mays
  misc_feature: MA Experiment 20000478 PARAMETER Experiment Name: Zm_5mM_SA_P Parameter: Plant Line Value: 35A19
  misc_feature: MA Experiment 20000478 PARAMETER Experiment Name: Zm_5mM_SA_P Parameter: Timepoint (hr) Value: 72
  misc_feature: MA Experiment 20000478 PARAMETER Experiment Name: Zm_5mM_SA_P Parameter: Tissue Value: Aerial
  misc_feature: MA Experiment 20000478 PARAMETER Experiment Name: Zm_5mM_SA_P Parameter: Treatment Value: 5mM SA vs. No Treatment
  misc_feature: MA Experiment ID: 20000487 Result: Up-regulated in Transcription
  misc_feature: MA Experiment 20000487 PARAMETER Experiment Name: Zm_50mM_NH4NO3_L_to_H_P Parameter: Organism Value: Zea mays
  misc_feature: MA Experiment 20000487 PARAMETER Experiment Name: Zm_50mM_NH4NO3_L_to_H_P Parameter: Timepoint (hr) Value: 4
  misc_feature: MA Experiment 20000487 PARAMETER Experiment Name: Zm_50mM_NH4NO3_L_to_H_P Parameter: Tissue Value: Leaves
  misc_feature: MA Experiment 20000487 PARAMETER Experiment Name: Zm_50mM_NH4NO3_L_to_H_P Parameter: Treatment Value: 50mM NH4NO3 vs. 100mM Mannitol
  misc_feature: MA Experiment ID: 20000488 Result: Up-regulated in Transcription
  misc_feature: MA Experiment 20000488 PARAMETER Experiment Name: Zm_50mM_NH4NO3_L_to_H_P Parameter: Organism Value: Zea mays
  misc_feature: MA Experiment 20000488 PARAMETER Experiment Name: Zm_50mM_NH4NO3_L_to_H_P Parameter: Timepoint (hr) Value: 8
  misc_feature: MA Experiment 20000488 PARAMETER Experiment Name: Zm_50mM_NH4NO3_L_to_H_P Parameter: Tissue Value: Leaves
  misc_feature: MA Experiment 20000488 PARAMETER Experiment Name: Zm_50mM_NH4NO3_L_to_H_P Parameter: Treatment Value: 50mM NH4NO3 vs. 100mM Mannitol
  misc_feature: MA Experiment ID: 20000492 Result: Up-regulated in Transcription
  misc_feature: MA Experiment 20000492 PARAMETER Experiment Name: Zm_Hybrid_Seed_Dev_P Parameter: DAP Value: 12
  misc_feature: MA Experiment 20000492 PARAMETER Experiment Name: Zm_Hybrid_Seed_Dev_P Parameter: Organism Value: Zea mays
  misc_feature: MA Experiment 20000492 PARAMETER Experiment Name: Zm_Hybrid_Seed_Dev_P Parameter: Plant Line Value: 35A19
  misc_feature: MA Experiment 20000492 PARAMETER Experiment Name: Zm_Hybrid_Seed_Dev_P Parameter: Tissue Value: Fert Kernel vs. Unfert Floret
  misc_feature: MA Experiment ID: 20000626 Result: Up-regulated in Transcription
  misc_feature: MA Experiment 20000626 PARAMETER Experiment Name: Zm_Herbicide-Treatments_P Parameter: Timepoint (hr) Value: 12
  misc_feature: MA Experiment 20000626 PARAMETER Experiment Name: Zm_Herbicide-Treatments_P Parameter: Tissue Value: Aerial
  misc_feature: MA Experiment 20000626 PARAMETER Experiment Name: Zm_Herbicide-Treatments_P Parameter: Treatment Value: Roundup vs. No Treatment
  misc_feature: MA Experiment ID: 20000632 Result: Down-regulated in Transcription
  misc_feature: MA Experiment 20000632 PARAMETER Experiment Name: Zm_Herbicide-Treatments_P Parameter: Timepoint (hr) Value: 4
  misc_feature: MA Experiment 20000632 PARAMETER Experiment Name: Zm_Herbicide-Treatments_P Parameter: Tissue Value: Aerial
  misc_feature: MA Experiment 20000632 PARAMETER Experiment Name: Zm_Herbicide-Treatments_P Parameter: Treatment Value: Glean vs. No Treatment
  misc_feature: MA Experiment ID: 20000633 Result: Down-regulated in Transcription
  misc_feature: MA Experiment 20000633 PARAMETER Experiment Name: Zm_Herbicide-Treatments_P Parameter: Timepoint (hr) Value: 4
  misc_feature: MA Experiment 20000633 PARAMETER Experiment Name: Zm_Herbicide-Treatments_P Parameter: Tissue Value: Aerial
  misc_feature: MA Experiment 20000633 PARAMETER Experiment Name: Zm_Herbicide-Treatments_P Parameter: Treatment Value: Trimec vs. No Treatment

SEQ ID NO: 10242 - protein, 350 aa, Zea mays subsp. mays; identical to SEQ ID NO: 1576
  peptide (1)..(350): Ceres Seq. ID no. 12340707
  misc_feature (146)..(170): Pfam Name: Zinc finger, C2H2 type Pfam Description: Zinc finger, C2H2 type
  misc_feature (48)..(346): Homolog of NCBI NO: 21902026 NR Description: B1097D05.27 [Oryza sativa (japonica
  misc_feature (53)..(291): Homolog of NCBI NO: 18399026 NR Description: Expressed protein; protein id: At2g19385.1, by cDNA: 114879. [Arabidopsis thaliana]
  misc_feature (53)..(291): Homolog of NCBI NO: 21536909 NR Description: unknown [Arabidopsis thaliana]
  misc_feature (53)..(291): Homolog of NCBI NO: 7486241 NR Description: probable RNA-binding protein At2g19380 -
  misc_feature (53)..(336): Homolog of NCBI NO: 18399023 NR Description: RRM-containing RNA-binding protein; protein id:
  misc_feature (53)..(336): Homolog of NCBI NO: 7486241 NR Description: probable RNA-binding protein At2g19380 -
  misc_feature (53)..(135): Homolog of NCBI NO: 39581890 NR Description: Hypothetical protein CBG20151 [Caenorhabditis
  misc_feature (277)..(343): Homolog of NCBI NO: 39581890 NR Description: Hypothetical protein CBG20151 [Caenorhabditis
  misc_feature (214)..(346): Homolog of NCBI NO: 18399026 NR Description: Expressed protein; protein id: At2g19385.1, by cDNA: 114879. [Arabidopsis thaliana]
  misc_feature (214)..(346): Homolog of NCBI NO: 21536909 NR Description: unknown [Arabidopsis thaliana]

SEQ ID NO: 10243 - protein, 298 aa, Zea mays subsp. mays; identical to SEQ ID NO: 1577
  peptide (1)..(298): Ceres Seq. ID no. 12340708
  misc_feature (94)..(118): Pfam Name: Zinc finger, C2H2 type Pfam Description: Zinc finger, C2H2 type
  misc_feature (1)..(239): Homolog of NCBI NO: 18399026 NR Description: Expressed protein; protein id: At2g19385.1, by cDNA: 114879. [Arabidopsis thaliana]
  misc_feature (1)..(239): Homolog of NCBI NO: 21536909 NR Description: unknown [Arabidopsis thaliana]
  misc_feature (1)..(239): Homolog of NCBI NO: 7486241 NR Description: probable RNA-binding protein At2g19380 -
  misc_feature (1)..(284): Homolog of NCBI NO: 18399023 NR Description: RRM-containing RNA-binding protein; protein id:
  misc_feature (1)..(284): Homolog of NCBI NO: 7486241 NR Description: probable RNA-binding protein At2g19380 -
  misc_feature (1)..(294): Homolog of NCBI NO: 21902026 NR Description: B1097D05.27 [Oryza sativa (japonica
  misc_feature (1)..(83): Homolog of NCBI NO: 39581890 NR Description: Hypothetical protein CBG20151 [Caenorhabditis
  misc_feature (225)..(291): Homolog of NCBI NO: 39581890 NR Description: Hypothetical protein CBG20151 [Caenorhabditis
  misc_feature (162)..(294): Homolog of NCBI NO: 18399026 NR Description: Expressed protein; protein id: At2g19385.1, by cDNA: 114879. [Arabidopsis thaliana]
  misc_feature (162)..(294): Homolog of NCBI NO: 21536909 NR Description: unknown [Arabidopsis thaliana]

SEQ ID NO: 10244 - DNA, 685 bp, Zea mays subsp. mays
  misc_feature (1)..(685): Ceres Seq. ID no. 13628874
  misc_feature: MA Experiment ID: 108515 Result: Down-regulated in Transcription
  misc_feature: MA Experiment 108515 PARAMETER Experiment Name: Zm_2mM_SA_P Parameter: Age (day) Value: 8
  misc_feature: MA Experiment 108515 PARAMETER Experiment Name: Zm_2mM_SA_P Parameter: Organism Value: Zea mays
  misc_feature: MA Experiment 108515 PARAMETER Experiment Name: Zm_2mM_SA_P Parameter: Plant Line Value: 35A19
  misc_feature: MA Experiment 108515 PARAMETER Experiment Name: Zm_2mM_SA_P Parameter: Timepoint (hr) Value: 12
  misc_feature: MA Experiment 108515 PARAMETER Experiment Name: Zm_2mM_SA_P Parameter: Tissue Value: Aerial
  misc_feature: MA Experiment 108515 PARAMETER Experiment Name: Zm_2mM_SA_P Parameter: Treatment Value: 2mM SA vs. No Treatment
  misc_feature: MA Experiment ID: 108523 Result: Down-regulated in Transcription
  misc_feature: MA Experiment 108523 PARAMETER Experiment Name: Zm_42deg_Heat_P Parameter: Age (day) Value: 8
  misc_feature: MA Experiment 108523 PARAMETER Experiment Name: Zm_42deg_Heat_P Parameter: Organism Value: Zea mays
  misc_feature: MA Experiment 108523 PARAMETER Experiment Name: Zm_42deg_Heat_P Parameter: Plant Line Value: 35A19
  misc_feature: MA Experiment 108523 PARAMETER Experiment Name: Zm_42deg_Heat_P Parameter: Temperature (deg C) Value: 42 vs. 22
  misc_feature: MA Experiment 108523 PARAMETER Experiment Name: Zm_42deg_Heat_P Parameter: Timepoint (hr) Value: 6
  misc_feature: MA Experiment 108523 PARAMETER Experiment Name: Zm_42deg_Heat_P Parameter: Tissue Value: Aerial
  misc_feature: MA Experiment ID: 108535 Result: Up-regulated in Transcription
  misc_feature: MA Experiment 108535 PARAMETER Experiment Name: Zm_Meristem_P Parameter: Age (day) Value: 8
  misc_feature: MA Experiment 108535 PARAMETER Experiment Name: Zm_Meristem_P Parameter: Organism Value: Zea mays
  misc_feature: MA Experiment 108535 PARAMETER Experiment Name: Zm_Meristem_P Parameter: Plant Line Value: 35A19
  misc_feature: MA Experiment 108535 PARAMETER Experiment Name: Zm_Meristem_P Parameter: Tissue Value: Root Meristem vs. Above Root Meristem
  misc_feature: MA Experiment ID: 108544 Result: Down-regulated in Transcription
  misc_feature: MA Experiment ID: 108597 Result: Down-regulated in Transcription
  misc_feature: MA Experiment 108597 PARAMETER Experiment Name: Zm_100uM_ABA_P Parameter: Age (day) Value: 9
  misc_feature: MA Experiment 108597 PARAMETER Experiment Name: Zm_100uM_ABA_P Parameter: Organism Value: Zea mays
  misc_feature: MA Experiment 108597 PARAMETER Experiment Name: Zm_100uM_ABA_P Parameter: Plant Line Value: 35A19
  misc_feature: MA Experiment 108597 PARAMETER Experiment Name: Zm_100uM_ABA_P Parameter: Timepoint (hr) Value: 24
  misc_feature: MA Experiment 108597 PARAMETER Experiment Name: Zm_100uM_ABA_P Parameter: Tissue Value: Aerial
  misc_feature: MA Experiment 108597 PARAMETER Experiment Name: Zm_100uM_ABA_P Parameter: Treatment Value: 100uM ABA vs. No Treatment
  misc_feature: MA Experiment ID: 20000477 Result: Down-regulated in Transcription
  misc_feature: MA Experiment 20000477 PARAMETER Experiment Name: Zm_5mM_SA_P Parameter: Age (day) Value: 10
  misc_feature: MA Experiment 20000477 PARAMETER Experiment Name: Zm_5mM_SA_P Parameter: Organism Value: Zea mays
  misc_feature: MA Experiment 20000477 PARAMETER Experiment Name: Zm_5mM_SA_P Parameter: Plant Line Value: 35A19
  misc_feature: MA Experiment 20000477 PARAMETER Experiment Name: Zm_5mM_SA_P Parameter: Timepoint (hr) Value: 48
  misc_feature: MA Experiment 20000477 PARAMETER Experiment Name: Zm_5mM_SA_P Parameter: Tissue Value: Aerial
  misc_feature: MA Experiment 20000477 PARAMETER Experiment Name: Zm_5mM_SA_P Parameter: Treatment Value: 5mM SA vs. No Treatment
  misc_feature: MA Experiment ID: 20000478 Result: Down-regulated in Transcription
  misc_feature: MA Experiment 20000478 PARAMETER Experiment Name: Zm_5mM_SA_P Parameter: Age (day) Value: 11
  misc_feature: MA Experiment 20000478 PARAMETER Experiment Name: Zm_5mM_SA_P Parameter: Organism Value: Zea mays
  misc_feature: MA Experiment 20000478 PARAMETER Experiment Name: Zm_5mM_SA_P Parameter: Plant Line Value: 35A19
  misc_feature: MA Experiment 20000478 PARAMETER Experiment Name: Zm_5mM_SA_P Parameter: Timepoint (hr) Value: 72
  misc_feature: MA Experiment 20000478 PARAMETER Experiment Name: Zm_5mM_SA_P Parameter: Tissue Value: Aerial
  misc_feature: MA Experiment 20000478 PARAMETER Experiment Name: Zm_5mM_SA_P Parameter: Treatment Value: 5mM SA vs. No Treatment
  misc_feature: MA Experiment ID: 20000479 Result: Down-regulated in Transcription
  misc_feature: MA Experiment 20000479 PARAMETER Experiment Name: Zm_Drought_P Parameter: Age (day) Value: 10
  misc_feature: MA Experiment 20000479 PARAMETER Experiment Name: Zm_Drought_P Parameter: Organism Value: Zea mays
  misc_feature: MA Experiment 20000479 PARAMETER Experiment Name: Zm_Drought_P Parameter: Plant Line Value: 35A19
  misc_feature: MA Experiment 20000479 PARAMETER Experiment Name: Zm_Drought_P Parameter: Timepoint (hr) Value: 48
  misc_feature: MA Experiment 20000479 PARAMETER Experiment Name: Zm_Drought_P Parameter: Tissue Value: Aerial
  misc_feature: MA Experiment 20000479 PARAMETER Experiment Name: Zm_Drought_P Parameter: Treatment Value: Drought vs. No Drought
  misc_feature: MA Experiment ID: 20000632 Result: Down-regulated in Transcription
  misc_feature: MA Experiment 20000632 PARAMETER Experiment Name: Zm_Herbicide-Treatments_P Parameter: Timepoint (hr) Value: 4
  misc_feature: MA Experiment 20000632 PARAMETER Experiment Name: Zm_Herbicide-Treatments_P Parameter: Tissue Value: Aerial
  misc_feature: MA Experiment 20000632 PARAMETER Experiment Name: Zm_Herbicide-Treatments_P Parameter: Treatment Value: Glean vs. No Treatment
  misc_feature: MA Experiment ID: 20000633 Result: Down-regulated in Transcription
  misc_feature: MA Experiment 20000633 PARAMETER Experiment Name: Zm_Herbicide-Treatments_P Parameter: Timepoint (hr) Value: 4
  misc_feature: MA Experiment 20000633 PARAMETER Experiment Name: Zm_Herbicide-Treatments_P Parameter: Tissue Value: Aerial
  misc_feature: MA Experiment 20000633 PARAMETER Experiment Name: Zm_Herbicide-Treatments_P Parameter: Treatment Value: Trimec vs. No Treatment
aaacaacagcgaacacatctgcttcgcatttcttcccatcccccttcgcaacccaaaccccaactcgctccgcatcgatggcgcccaaggccgagaagaagcccgcggcgaagaagccggcggaggaggagcccgcggctgagaaggcgcccgccgggaagaagccgaaggcggagaagcgggtccccgctggcaagtccgctgccaaggagggcggcgagggcaagaggggcaggaagaagggcaagaagagcgtggagacctacaagatctacatcttcaaggtgctgaagcaggtgcacccggacattggcatctcctccaaggccatgtcgatcatgaactccttcattaacgatatcttcgagaagctagctgctgaggccgccaagctcgcgcgctataacaagaagccaaccatcacctcccgtgagatacagacttccgtgcgcctcgtccttcccggggagctcgccaagcacgccgtctccgagggcaccaaggccgtcaccaagttcacctcggcctaggctgcgctgccgccgcttgcaggattgtctcctgtgttcacgtgtattgctgtagttaggtgctgctggtttctgtctgttacccatctgtctgtagcaactttgttatctgataggaccgtaatggtgcttatttaacccagctatatgtttct

SEQ ID NO: 10245 - protein, 175 aa, Zea mays subsp. mays
  peptide (1)..(175): Ceres Seq. ID no. 13628875
  misc_feature (51)..(174): Pfam Name: Core histone H2A/H2B/H3/H4 Pfam Description: Core histone H2A/H2B/H3/H4
  misc_feature (51)..(174): Pfam Name: Core histone H2A/H2B/H3/H4 Pfam Description: Core histone H2A/H2B/H3/H4
  misc_feature (26)..(175): Homolog of NCBI NO: 399854 NR Description: Histone H2B.2 >gi|283042|pir||S28049 histone H2B
  misc_feature (26)..(175): Homolog of NCBI NO: 3913804 NR Description: Histone H2B.3 >gi|577825|emb|CAA49584.1| H2B
  misc_feature (26)..(175): Homolog of NCBI NO: 122022 NR Description: Histone H2B >gi|283025|pir||S22323 histone H2B -
  misc_feature (26)..(175): Homolog of NCBI NO: 399853 NR Description: Histone H2B.1 >gi|283041|pir||S28048 histone H2B
  misc_feature (26)..(175): Homolog of NCBI NO: 1708107 NR Description: Histone H2B >gi|7439752|pir||T02077 histone H2B -
  misc_feature (26)..(175): Homolog of NCBI NO: 3913804 NR Description: Histone H2B.3 >gi|577825|emb|CAA49584.1| H2B
  misc_feature (26)..(175): Homolog of NCBI NO: 399853 NR Description: Histone H2B.1 >gi|283041|pir||S28048 histone H2B
  misc_feature (16)..(80): Homolog of NCBI NO: 571480 NR Description: histone H1
  misc_feature (113)..(163): Homolog of NCBI NO: 30923862 NR Description: CG40461-PA [Drosophila melanogaster]
  misc_feature (27)..(172): Homolog of NCBI NO: 15223150 NR Description: histone H2B family [Arabidopsis thaliana] T23G18.3 [Arabidopsis thaliana]
  misc_feature (51)..(175): Homolog of NCBI NO: 39595176 NR Description: Hypothetical protein CBG03777 [Caenorhabditis
  misc_feature (26)..(175): Homolog of NCBI NO: 34895904 NR Description: putative histone H2B [Oryza sativa (japonica group)] >gi|9663991|dbj|BAB03632.1| putative histone H2B [Oryza
  misc_feature (26)..(175): Homolog of NCBI NO: 1708107 NR Description: Histone H2B >gi|7439752|pir||T02077 histone H2B -
  misc_feature (26)..(175): Homolog of NCBI NO: 122022 NR Description: Histone H2B >gi|283025|pir||S22323 histone H2B -
  misc_feature (26)..(175): Homolog of NCBI NO: 399854 NR Description: Histone H2B.2 >gi|283042|pir||S28049 histone H2B
  misc_feature (26)..(175): Homolog of NCBI NO: 34895904 NR Description: putative histone H2B [Oryza sativa (japonica group)] >gi|9663991|dbj|BAB03632.1| putative histone H2B [Oryza
  misc_feature (51)..(175): Homolog of NCBI NO: 39595176 NR Description: Hypothetical protein CBG03777 [Caenorhabditis
  misc_feature (27)..(172): Homolog of NCBI NO: 15223150 NR Description: histone H2B family [Arabidopsis thaliana] T23G18.3 [Arabidopsis thaliana]
  misc_feature (113)..(163): Homolog of NCBI NO: 30923862 NR Description: CG40461-PA [Drosophila melanogaster]
  misc_feature (16)..(80): Homolog of NCBI NO: 571480 NR Description: histone H1
TTANTSASHFFPSPFATQTPTRSASMAPKAEKKPAAKKPAEEEPAAEKAPAGKKPKAEKRVPAGKSAAKEGGEGKRGRKKGKKSVETYKIYIFKVLKQVHPDIGISSKAMSIMNSFINDIFEKLAAEAAKLARYNKKPTITSREIQTSVRLVLPGELAKHAVSEGTKAVTKFTSA

SEQ ID NO: 10246 - protein, 150 aa, Zea mays subsp. mays
  peptide (1)..(150): Ceres Seq. ID no. 13628876
  misc_feature (26)..(149): Pfam Name: Core histone H2A/H2B/H3/H4 Pfam Description: Core histone H2A/H2B/H3/H4
  misc_feature (26)..(149): Pfam Name: Core histone H2A/H2B/H3/H4 Pfam Description: Core histone H2A/H2B/H3/H4
  misc_feature (1)..(150): Homolog of NCBI NO: 399854 NR Description: Histone H2B.2 >gi|283042|pir||S28049 histone H2B
  misc_feature (1)..(150): Homolog of NCBI NO: 3913804 NR Description: Histone H2B.3 >gi|577825|emb|CAA49584.1| H2B
  misc_feature (1)..(150): Homolog of NCBI NO: 122022 NR Description: Histone H2B >gi|283025|pir||S22323 histone H2B -
  misc_feature (1)..(150): Homolog of NCBI NO: 399853 NR Description: Histone H2B.1 >gi|283041|pir||S28048 histone H2B
  misc_feature (1)..(150): Homolog of NCBI NO: 1708107 NR Description: Histone H2B >gi|7439752|pir||T02077 histone H2B -
  misc_feature (1)..(150): Homolog of NCBI NO: 3913804 NR Description: Histone H2B.3 >gi|577825|emb|CAA49584.1| H2B
  misc_feature (1)..(150): Homolog of NCBI NO: 399853 NR Description: Histone H2B.1 >gi|283041|pir||S28048 histone H2B
  misc_feature (1)..(55): Homolog of NCBI NO: 571480 NR Description: histone H1
  misc_feature (88)..(138): Homolog of NCBI NO: 30923862 NR Description: CG40461-PA [Drosophila melanogaster]
  misc_feature (2)..(147): Homolog of NCBI NO: 15223150 NR Description: histone H2B family [Arabidopsis thaliana] T23G18.3 [Arabidopsis thaliana]
  misc_feature (26)..(150): Homolog of NCBI NO: 39595176 NR Description: Hypothetical protein CBG03777 [Caenorhabditis
  misc_feature (1)..(150): Homolog of NCBI NO: 34895904 NR Description: putative histone H2B [Oryza sativa (japonica group)] >gi|9663991|dbj|BAB03632.1| putative histone H2B [Oryza
  misc_feature (1)..(150): Homolog of NCBI NO: 1708107 NR Description: Histone H2B >gi|7439752|pir||T02077 histone H2B -
  misc_feature (1)..(150): Homolog of NCBI NO: 122022 NR Description: Histone H2B >gi|283025|pir||S22323 histone H2B -
  misc_feature (1)..(150): Homolog of NCBI NO: 399854 NR Description: Histone H2B.2 >gi|283042|pir||S28049 histone H2B
  misc_feature (1)..(150): Homolog of NCBI NO: 34895904 NR Description: putative histone H2B [Oryza sativa (japonica group)] >gi|9663991|dbj|BAB03632.1| putative histone H2B [Oryza
  misc_feature (26)..(150): Homolog of NCBI NO: 39595176 NR Description: Hypothetical protein CBG03777 [Caenorhabditis
  misc_feature (2)..(147): Homolog of NCBI NO: 15223150 NR Description: histone H2B family [Arabidopsis thaliana] T23G18.3 [Arabidopsis thaliana]
  misc_feature (88)..(138): Homolog of NCBI NO: 30923862 NR Description: CG40461-PA [Drosophila melanogaster]
  misc_feature (1)..(55): Homolog of NCBI NO: 571480 NR Description: histone H1
MAPKAEKKPAAKKPAEEEPAAEKAPAGKKPKAEKRVPAGKSAAKEGGEGKRGRKKGKKSVETYKIYIFKVLKQVHPDIGISSKAMSIMNSFINDIFEKLAAEAAKLARYNKKPTITSREIQTSVRLVLPGELAKHAVSEGTKAVTKFTSA

SEQ ID NO: 10247 - protein, 96 aa, Zea mays subsp. mays
  peptide (1)..(96): Ceres Seq. ID no. 13628877
  misc_feature (11)..(90): Pfam Name: Sperm histone P2 Pfam Description: Sperm histone P2
  misc_feature (11)..(90): Pfam Name: Sperm histone P2 Pfam Description: Sperm histone P2
  misc_feature (1)..(96): Homolog of NCBI NO: 34784016 NR Description: Unknown (protein for MGC:63802) [Danio rerio]
  misc_feature (26)..(96): Homolog of NCBI NO: 29250446 NR Description: GLP_39_87477_88058 [Giardia lamblia ATCC 50803]
  misc_feature (14)..(96): Homolog of NCBI NO: 25143299 NR Description: pre-mRNA splicing SR protein related RSR-1 (68.2
  misc_feature (1)..(96): Homolog of NCBI NO: 34784016 NR Description: Unknown (protein for MGC:63802) [Danio rerio]
  misc_feature (14)..(96): Homolog of NCBI NO: 25143299 NR Description: pre-mRNA splicing SR protein related RSR-1 (68.2
  misc_feature (18)..(96): Homolog of NCBI NO: 23274133 NR Description: Similar to serine/arginine repetitive matrix 1
  misc_feature (40)..(96): Homolog of NCBI NO: 25143299 NR Description: pre-mRNA splicing SR protein related RSR-1 (68.2
  misc_feature (14)..(96): Homolog of NCBI NO: 25143299 NR Description: pre-mRNA splicing SR protein related RSR-1 (68.2
  misc_feature (12)..(96): Homolog of NCBI NO: 11095327 NR Description: unknown [Paracoccus pantotrophus]
  misc_feature (26)..(96): Homolog of NCBI NO: 29250446 NR Description: GLP_39_87477_88058 [Giardia lamblia ATCC 50803]
  misc_feature (12)..(96): Homolog of NCBI NO: 11095327 NR Description: unknown [Paracoccus pantotrophus]
  misc_feature (18)..(96): Homolog of NCBI NO: 23274133 NR Description: Similar to serine/arginine repetitive matrix 1
  misc_feature (14)..(96): Homolog of NCBI NO: 25143299 NR Description: pre-mRNA splicing SR protein related RSR-1 (68.2
  misc_feature (40)..(96): Homolog of NCBI NO: 25143299 NR Description: pre-mRNA splicing SR protein related RSR-1 (68.2
KQQRTHLLRISSHPPSQPKPQLAPHRWRPRPRRSPRRRSRRRRSPRLRRRPPGRSRRRRSGSPLASPLPRRAARARGAGRRARRAWRPTRSTSSRC

SEQ ID NO: 10248 - DNA, 1710 bp, Zea mays subsp. mays
  misc_feature (1)..(1710): Ceres Seq. ID no. 13491075
  misc_feature: MA Experiment ID: 108528 Result: Down-regulated in Transcription
  misc_feature: MA Experiment 108528 PARAMETER Experiment Name: Zm_Imbibed_Seeds_P Parameter: Age (day) Value: 5 vs. 2
  misc_feature: MA Experiment 108528 PARAMETER Experiment Name: Zm_Imbibed_Seeds_P Parameter: Organism Value: Zea mays
  misc_feature: MA Experiment 108528 PARAMETER Experiment Name: Zm_Imbibed_Seeds_P Parameter: Plant Line Value: 35A19
  misc_feature: MA Experiment 108528 PARAMETER Experiment Name: Zm_Imbibed_Seeds_P Parameter: Tissue Value: Aerial vs. Embryo
  misc_feature: MA Experiment ID: 108530 Result: Down-regulated in Transcription
  misc_feature: MA Experiment 108530 PARAMETER Experiment Name: Zm_Imbibed_Seeds_P Parameter: Age (day) Value: 6 vs. 2
  misc_feature: MA Experiment 108530 PARAMETER Experiment Name: Zm_Imbibed_Seeds_P Parameter: Organism Value: Zea mays
  misc_feature: MA Experiment 108530 PARAMETER Experiment Name: Zm_Imbibed_Seeds_P Parameter: Plant Line Value: 35A19
  misc_feature: MA Experiment 108530 PARAMETER Experiment Name: Zm_Imbibed_Seeds_P Parameter: Tissue Value: Aerial vs. Embryo
  misc_feature: MA Experiment ID: 108536 Result: Up-regulated in Transcription
  misc_feature: MA Experiment 108536 PARAMETER Experiment Name: Zm_Meristem_P Parameter: Age (day) Value: 8
  misc_feature: MA Experiment 108536 PARAMETER Experiment Name: Zm_Meristem_P Parameter: Organism Value: Zea mays
  misc_feature: MA Experiment 108536 PARAMETER Experiment Name: Zm_Meristem_P Parameter: Plant Line Value: 35A19
  misc_feature: MA Experiment 108536 PARAMETER Experiment Name: Zm_Meristem_P Parameter: Tissue Value: Shoot Meristem vs. Above Shoot Meristem
  misc_feature: MA Experiment ID: 108543 Result: Down-regulated in Transcription
  misc_feature: MA Experiment ID: 108545 Result: Down-regulated in Transcription
  misc_feature: MA Experiment 108545 PARAMETER Experiment Name: Zm_Imbibed_Seeds_P Parameter: Age (day) Value: 3 vs. 2
  misc_feature: MA Experiment 108545 PARAMETER Experiment Name: Zm_Imbibed_Seeds_P Parameter: Organism Value: Zea mays
  misc_feature: MA Experiment 108545 PARAMETER Experiment Name: Zm_Imbibed_Seeds_P Parameter: Plant Line Value: 35A19
  misc_feature: MA Experiment 108545 PARAMETER Experiment Name: Zm_Imbibed_Seeds_P Parameter: Tissue Value: Aerial vs. Embryo
  misc_feature: MA Experiment ID: 108547 Result: Down-regulated in Transcription
  misc_feature: MA Experiment 108547 PARAMETER Experiment Name: Zm_Imbibed_Seeds_P Parameter: Age (day) Value: 4 vs. 2
  misc_feature: MA Experiment 108547 PARAMETER Experiment Name: Zm_Imbibed_Seeds_P Parameter: Organism Value: Zea mays
  misc_feature: MA Experiment 108547 PARAMETER Experiment Name: Zm_Imbibed_Seeds_P Parameter: Plant Line Value: 35A19
  misc_feature: MA Experiment 108547 PARAMETER Experiment Name: Zm_Imbibed_Seeds_P Parameter: Tissue Value: Aerial vs. Embryo
  misc_feature: MA Experiment ID: 108687 Result: Up-regulated in Transcription
  misc_feature: MA Experiment 108687 PARAMETER Experiment Name: Zm_Embryos-Flowers__P Parameter: Tissue Value: Embryo vs. Aerial+
  misc_feature: MA Experiment ID: 20000108 Result: Down-regulated in Transcription
  misc_feature: MA Experiment 20000108 PARAMETER Experiment Name: Zm_Root-Tips_P Parameter: Age (day) Value: 12
  misc_feature: MA Experiment 20000108 PARAMETER Experiment Name: Zm_Root-Tips_P Parameter: Organism Value: Zea mays
  misc_feature: MA Experiment 20000108 PARAMETER Experiment Name: Zm_Root-Tips_P Parameter: Tissue Value: Root tips vs. Root mid region    35
  misc_feature: MA Experiment 20000108 PARAMETER Experiment Name: Zm_Root-Tips_P Parameter: Tissue Value: Root tips vs. Root mid region   Sequence Listing-Misc Features (4)
  misc_feature: MA Experiment ID: 20000478 Result: Up-regulated in Transcription
  misc_feature: MA Experiment 20000478 PARAMETER Experiment Name: Zm_5mM_SA_P Parameter: Age (day) Value: 11
  misc_feature: MA Experiment 20000478 PARAMETER Experiment Name: Zm_5mM_SA_P Parameter: Organism Value: Zea mays
  misc_feature: MA Experiment 20000478 PARAMETER Experiment Name: Zm_5mM_SA_P Parameter: Plant Line Value: 35A19
  misc_feature: MA Experiment 20000478 PARAMETER Experiment Name: Zm_5mM_SA_P Parameter: Timepoint (hr) Value: 72
  misc_feature: MA Experiment 20000478 PARAMETER Experiment Name: Zm_5mM_SA_P Parameter: Tissue Value: Aerial
  misc_feature: MA Experiment 20000478 PARAMETER Experiment Name: Zm_5mM_SA_P Parameter: Treatment Value: 5mM SA vs. No Treatment
  misc_feature: MA Experiment ID: 20000535 Result: Up-regulated in Transcription
  misc_feature: MA Experiment 20000535 PARAMETER Experiment Name: Zm_Hybrid_Seed_Dev_P Parameter: DAP Value: 30 vs. 12
  misc_feature: MA Experiment 20000535 PARAMETER Experiment Name: Zm_Hybrid_Seed_Dev_P Parameter: Organism Value: Zea mays
  misc_feature: MA Experiment 20000535 PARAMETER Experiment Name: Zm_Hybrid_Seed_Dev_P Parameter: Plant Line Value: 35A19
  misc_feature: MA Experiment 20000535 PARAMETER Experiment Name: Zm_Hybrid_Seed_Dev_P Parameter: Tissue Value: Embryo vs. Unfert Floret
gcagaaactctttgcttccgcctggctcgcgatgcttgtttgggtgcgcgggctgcggcgaggtgaggcgacggcggcgccgggcggttgcatggtggccgatggagagtagacggggagggtcgtcggcggcggcggcggaagatgcgggcggggcgatgccgagctttgggccaacgcagcacgccattcgcgcagatgtgaacagcatgcaaccttctcgagttactgactttggggcactggcacagtctgctggattccgaatagaagatcttgctaaccttaatgcaaatgctttgttcaatctgaagccaaattctcatacgattgacaacagtcctctccagtttggaaattacggaaagtctatttcttctcatataaatactacagaagcaacaacagctgcaacaagaattgaccctcagctgtcagcacagcaaacaggagcacaaccaattctggtggcgttaccaactggtaacatggagaattggggagagtcagctatggctgatagccctatgactgacacatctacagatccagacactgatgagaggaaccagatgtttgaacaaggacttgttgctgtccccacagcatctgattctagtgacaaatcaagggacaaactagatcagaagacacttcggcgtcttgcccaaaatcgtgaagctgccaggaaaagccgtttacgaaaaaaggcatacatccaaaaccttgagagtagcagactgaaacttactcagttagagcaagagcttcagcgggctcgtcaacagggtatttttatttcgacatcaggagatcaacctcaatcaacaagtggaaatggagctttggcatttgacatggagtatgcacgctggttggaggagcacaataaacatgtaaatgagttgagggctgcagtcaatgcacatgctggtgataatgatcttcgttgtattgttgatagcattatggtacattacgacgaaattttcaagctcaagggtgtggcagctaaagcagatgtttttcatgtgctgtctgggatgtggaagacccctgctgagagatgtttcatgtggttaggtggcttccggtcatctgagcttcttaagttactggcaggtcacctagagcctcttactgatcagcagcttgttggtatatccaacctgcagcagtcctcccaacaagctgaagatgctctttctcaagggatggaagcattgcaacagtcgcttgcagaaactctagcatctggatccttgggccctgctggaccttctggcaatgttgcaaattacatgggacaaatggcgatggctatgggaaaacttggcactcttgagaactttctacgacaggctgataatctacggctgcaaacacttcaacaaatgcaacgcatcttaactacccgacaatcagcacgagccctactcgcaataagtgactacttctctcggctgcgtgctttgagttctctttggcttgcccgtccaagggaataaattcaattaattcataactaggataatttttttgtactgtttctagtatggccattagtttcttcagaacgctcatgtgtcagtgagatatttggatcatattgtaggccatcatggtttactggacaactttgtaacaattttggagagaaaaaactgagttgtaaatacatctggaataatctaagatcttatgaagggg

SEQ ID NO: 10249 - protein, 501 aa, Zea mays subsp. mays
  peptide (1)..(501): Ceres Seq. ID no. 13491076
  misc_feature (212)..(275): Pfam Name: bZIP transcription factor Pfam Description: bZIP transcription factor
  misc_feature (34)..(501): Homolog of NCBI NO: 422029 NR Description: transcription factor OBF3.2 - maize
  misc_feature (34)..(501): Homolog of NCBI NO: 34909110 NR Description: putative transcription factor HBP-1b [Oryza
  misc_feature (35)..(501): Homolog of NCBI NO: 34921538 NR Description: Transcription factor HBP-1b(c1)
  misc_feature (171)..(501): Homolog of NCBI NO: 422028 NR Description: transcription factor OBF3.1 - maize
  misc_feature (171)..(501): Homolog of NCBI NO: 17025924 NR Description: bZIP transcription factor [Oryza sativa]
  misc_feature (53)..(501): Homolog of NCBI NO: 15148926 NR Description: TGA-type basic leucine zipper protein TGA2.2
  misc_feature (47)..(501): Homolog of NCBI NO: 15148924 NR Description: TGA-type basic leucine zipper protein TGA2.1
  misc_feature (53)..(501): Homolog of NCBI NO: 12230709 NR Description: TGACG-sequence specific DNA-binding protein
  misc_feature (171)..(501): Homolog of NCBI NO: 17025922 NR Description: bZIP transcription factor [Oryza sativa]
  misc_feature (171)..(501): Homolog of NCBI NO: 122772 NR Description: Transcription factor HBP-1b >gi|100809|pir||S15347
RNSLLPPGSRCLFGCAGCGEVRRRRRRAVAWWPMESRRGGSSAAAAEDAGGAMPSFGPTQHAIRADVNSMQPSRVTDFGALAQSAGFRIEDLANLNANALFNLKPNSHTIDNSPLQFGNYGKSISSHINTTEATTAATRIDPQLSAQQTGAQPILVALPTGNMENWGESAMADSPMTDTSTDPDTDERNQMFEQGLVAVPTASDSSDKSRDKLDQKTLRRLAQNREAARKSRLRKKAYIQNLESSRLKLTQLEQELQRARQQGIFISTSGDQPQSTSGNGALAFDMEYARWLEEHNKHVNELRAAVNAHAGDNDLRCIVDSIMVHYDEIFKLKGVAAKADVFHVLSGMWKTPAERCFMWLGGFRSSELLKLLAGHLEPLTDQQLVGISNLQQSSQQAEDALSQGMEALQQSLAETLASGSLGPAGPSGNVANYMGQMAMAMGKLGTLENFLRQADNLRLQTLQQMQRILTTRQSARALLAISDYFSRLRALSSLWLARPRE

SEQ ID NO: 10250 - protein, 468 aa, Zea mays subsp. mays
  peptide (1)..(468): Ceres Seq. ID no. 13491077
  misc_feature (179)..(242): Pfam Name: bZIP transcription factor Pfam Description: bZIP transcription factor
  misc_feature (1)..(468): Homolog of NCBI NO: 422029 NR Description: transcription factor OBF3.2 - maize
  misc_feature (1)..(468): Homolog of NCBI NO: 34909110 NR Description: putative transcription factor HBP-1b [Oryza
  misc_feature (2)..(468): Homolog of NCBI NO: 34921538 NR Description: Transcription factor HBP-1b(c1)
  misc_feature (138)..(468): Homolog of NCBI NO: 422028 NR Description: transcription factor OBF3.1 - maize
  misc_feature (138)..(468): Homolog of NCBI NO: 17025924 NR Description: bZIP transcription factor [Oryza sativa]
  misc_feature (20)..(468): Homolog of NCBI NO: 15148926 NR Description: TGA-type basic leucine zipper protein TGA2.2
  misc_feature (14)..(468): Homolog of NCBI NO: 15148924 NR Description: TGA-type basic leucine zipper protein TGA2.1
  misc_feature (20)..(468): Homolog of NCBI NO: 12230709 NR Description: TGACG-sequence specific DNA-binding protein
  misc_feature (138)..(468): Homolog of NCBI NO: 17025922 NR Description: bZIP transcription factor [Oryza sativa]
  misc_feature (138)..(468): Homolog of NCBI NO: 122772 NR Description: Transcription factor HBP-1b >gi|100809|pir||S15347
MESRRGGSSAAAAEDAGGAMPSFGPTQHAIRADVNSMQPSRVTDFGALAQSAGFRIEDLANLNANALFNLKPNSHTIDNSPLQFGNYGKSISSHINTTEATTAATRIDPQLSAQQTGAQPILVALPTGNMENWGESAMADSPMTDTSTDPDTDERNQMFEQGLVAVPTASDSSDKSRDKLDQKTLRRLAQNREAARKSRLRKKAYIQNLESSRLKLTQLEQELQRARQQGIFISTSGDQPQSTSGNGALAFDMEYARWLEEHNKHVNELRAAVNAHAGDNDLRCIVDSIMVHYDEIFKLKGVAAKADVFHVLSGMWKTPAERCFMWLGGFRSSELLKLLAGHLEPLTDQQLVGISNLQQSSQQAEDALSQGMEALQQSLAETLASGSLGPAGPSGNVANYMGQMAMAMGKLGTLENFLRQADNLRLQTLQQMQRILTTRQSARALLAISDYFSRLRALSSLWLARPRE

SEQ ID NO: 10251 - protein, 449 aa, Zea mays subsp. mays
  peptide (1)..(449): Ceres Seq. ID no. 13491078
  misc_feature (160)..(223): Pfam Name: bZIP transcription factor Pfam Description: bZIP transcription factor
  misc_feature (1)..(449): Homolog of NCBI NO: 422029 NR Description: transcription factor OBF3.2 - maize
  misc_feature (1)..(449): Homolog of NCBI NO: 34909110 NR Description: putative transcription factor HBP-1b [Oryza
  misc_feature (1)..(449): Homolog of NCBI NO: 34921538 NR Description: Transcription factor HBP-1b(c1)
  misc_feature (119)..(449): Homolog of NCBI NO: 422028 NR Description: transcription factor OBF3.1 - maize
  misc_feature (119)..(449): Homolog of NCBI NO: 17025924 NR Description: bZIP transcription factor [Oryza sativa]
  misc_feature (1)..(449): Homolog of NCBI NO: 15148926 NR Description: TGA-type basic leucine zipper protein TGA2.2
  misc_feature (1)..(449): Homolog of NCBI NO: 15148924 NR Description: TGA-type basic leucine zipper protein TGA2.1
  misc_feature (1)..(449): Homolog of NCBI NO: 12230709 NR Description: TGACG-sequence specific DNA-binding protein
  misc_feature (119)..(449): Homolog of NCBI NO: 17025922 NR Description: bZIP transcription factor [Oryza sativa]
  misc_feature (119)..(449): Homolog of NCBI NO: 122772 NR Description: Transcription factor HBP-1b >gi|100809|pir||S15347
MPSFGPTQHAIRADVNSMQPSRVTDFGALAQSAGFRIEDLANLNANALFNLKPNSHTIDNSPLQFGNYGKSISSHINTTEATTAATRIDPQLSAQQTGAQPILVALPTGNMENWGESAMADSPMTDTSTDPDTDERNQMFEQGLVAVPTASDSSDKSRDKLDQKTLRRLAQNREAARKSRLRKKAYIQNLESSRLKLTQLEQELQRARQQGIFISTSGDQPQSTSGNGALAFDMEYARWLEEHNKHVNELRAAVNAHAGDNDLRCIVDSIMVHYDEIFKLKGVAAKADVFHVLSGMWKTPAERCFMWLGGFRSSELLKLLAGHLEPLTDQQLVGISNLQQSSQQAEDALSQGMEALQQSLAETLASGSLGPAGPSGNVANYMGQMAMAMGKLGTLENFLRQADNLRLQTLQQMQRILTTRQSARALLAISDYFSRLRALSSLWLARPRE

SEQ ID NO: 10252 - DNA, 1676 bp, Zea mays subsp. mays
  misc_feature (1)..(1676): Ceres Seq. ID no. 13577775
  misc_feature: MA Experiment ID: 20000535 Result: Up-regulated in Transcription
  misc_feature: MA Experiment 20000535 PARAMETER Experiment Name: Zm_Hybrid_Seed_Dev_P Parameter: DAP Value: 30 vs. 12
  misc_feature: MA Experiment 20000535 PARAMETER Experiment Name: Zm_Hybrid_Seed_Dev_P Parameter: Organism Value: Zea mays
  misc_feature: MA Experiment 20000535 PARAMETER Experiment Name: Zm_Hybrid_Seed_Dev_P Parameter: Plant Line Value: 35A19
  misc_feature: MA Experiment 20000535 PARAMETER Experiment Name: Zm_Hybrid_Seed_Dev_P Parameter: Tissue Value: Embryo vs. Unfert Floret
gctcccatttcaaaacctcttcctcctctcctcgccgcagctcccaccattcccgcagacgccttgtccccttcccagcttcccctcccccaccccgccgcacgtccgcaagccccacgccaccgtcatgtctccgaccaccaccccgccgcccgcgcccgtggcagccccgacctccaagggcgccaagcgcagcctcatgtcctcgctcatggacgccactgcgctgctccgctcctcctctttcaaggaggactcgtacgtcgcggccgcgctcccggcgtccgagctccgcgcgctcgccgacctcaaggcgctgctcgccacccacccggaccccatctccatctggggcgtcccgctgaaccctcgctcccctcccgccgcggcggacgacgccgccccggtcgacgagcgcgccgacgtggtgctcctcaagttcctccgcgcgcgggacttccgcgtccgcgacgcccacgccatggtgctccgctgcgccgcctggcgcgccgagttcggcgccgacgccgtgctggacgaggagctgggcttcaaggacctggagggcatcgtcgcctacatgcacggctgggaccgcgacggccaccccgtctgctacaacgcctacggcgtcttcaaagacagggacatgtacgagcgcgtcttcggcgacggcgaccgcctcgcgcgcttcctccgctggcgcgtccaggtcatggagcgtggcgtgcgcgcgctcaccctgaggcccgggggcgtcaacgccatcatacaggtcaccgacctcaaggacatgccaaagcgggagctcagagccgccagcaaccagatcctctccctcttccaggacaactacccggagatggtagcgcggaaggtgttcattaacgtgccgtggtacttctccgtgctcttctccatgatctcgcccttcctcacggagcgcaccaagagcaagttcgtcatcgcgcgcgagggcaacgtcgccgagacactctacaagttcatccggccggagctggtgcctgtgcagtacggcgggctgagccgcaccggtgacctcgagaacggaccaccgaagccggcgtccgagttcaccatcaagggtggcgagaaggtcttcctggagatcgacggtatcgaggccggtgcaacgataacgtgggatctggtcgtcgggggctgggacctcgagtacggagccgagtacgtgccggcggccgaggacagctacacgctctgcgtggagaagacgaggatggtctcggccaccgccgaggagcccgtgcacaatgccttcacggctagggaagccggcaagatggtgctgtccatagacaattctgggttcccggaagcgcaaggttgccgcctacaggtacttcgtgcgcaagtcgtcggcgtaggcatgctgatgtcttgtggtggtcgtcgcggccggcaccttgccggcaggtagccgcgagggggaggttaacgtggaacaactggtgaagtgtttacttgggcttgtgggatttggtggggagaggtcaagttaggctgtttaattattagtgctataacgacatgcatgtattatgccatatgtagaatataatgtactccgtaagagctgttgcacttttgtcatcaccactgttataaagctaatgatgagttaagttttttgggct

SEQ ID NO: 10253 - protein, 485 aa, Zea mays subsp. mays
  peptide (1)..(485): Ceres Seq. ID no. 13577776
  misc_feature (193)..(353): Pfam Name: CRAL/TRIO domain Pfam Description: CRAL/TRIO domain
  misc_feature (63)..(448): Homolog of NCBI NO: 15230555 NR Description: expressed protein [Arabidopsis thaliana]
  misc_feature (51)..(447): Homolog of NCBI NO: 34907288 NR Description: contains ESTs
  misc_feature (101)..(447): Homolog of NCBI NO: 8894548 NR Description: hypothetical protein [Cicer arietinum]
  misc_feature (48)..(447): Homolog of NCBI NO: 30680992 NR Description: expressed protein [Arabidopsis thaliana]
  misc_feature (48)..(377): Homolog of NCBI NO: 25407487 NR Description: hypothetical protein AT4g09160 [imported] - thaliana >gi|7267559|emb|CAB78040.1| putative protein
  misc_feature (385)..(447): Homolog of NCBI NO: 25407487 NR Description: hypothetical protein AT4g09160 [imported] - thaliana >gi|7267559|emb|CAB78040.1| putative protein
  misc_feature (81)..(447): Homolog of NCBI NO: 15081614 NR Description: At1g72160/T9N14_8 [Arabidopsis thaliana]
  misc_feature (81)..(447): Homolog of NCBI NO: 15218383 NR Description: cytosolic factor -related [Arabidopsis thaliana]
  misc_feature (114)..(449): Homolog of NCBI NO: 18397616 NR Description: expressed protein [Arabidopsis thaliana]
  misc_feature (114)..(449): Homolog of NCBI NO: 14334978 NR Description: unknown protein [Arabidopsis thaliana]
LPFQNLFLLSSPQLPPFPQTPCPLPSFPSPTPPHVRKPHATVMSPTTTPPPAPVAAPTSKGAKRSLMSSLMDATALLRSSSFKEDSYVAAALPASELRALADLKALLATHPDPISIWGVPLNPRSPPAAADDAAPVDERADVVLLKFLRARDFRVRDAHAMVLRCAAWRAEFGADAVLDEELGFKDLEGIVAYMHGWDRDGHPVCYNAYGVFKDRDMYERVFGDGDRLARFLRWRVQVMERGVRALTLRPGGVNAIIQVTDLKDMPKRELRAASNQILSLFQDNYPEMVARKVFINVPWYFSVLFSMISPFLTERTKSKFVIAREGNVAETLYKFIRPELVPVQYGGLSRTGDLENGPPKPASEFTIKGGEKVFLEIDGIEAGATITWDLVVGGWDLEYGAEYVPAAEDSYTLCVEKTRMVSATAEEPVHNAFTAREAGKMVLSIDNSGFPEAQGCRLQVLRAQVVGVGMLMSCGGRRGRHLAGR

SEQ ID NO: 10254 - protein, 443 aa, Zea mays subsp. mays
  peptide (1)..(443): Ceres Seq. ID no. 13577777
  misc_feature (151)..(311): Pfam Name: CRAL/TRIO domain Pfam Description: CRAL/TRIO domain
  misc_feature (21)..(406): Homolog of NCBI NO: 15230555 NR Description: expressed protein [Arabidopsis thaliana]
  misc_feature (9)..(405): Homolog of NCBI NO: 34907288 NR Description: contains ESTs
  misc_feature (59)..(405): Homolog of NCBI NO: 8894548 NR Description: hypothetical protein [Cicer arietinum]
  misc_feature (6)..(405): Homolog of NCBI NO: 30680992 NR Description: expressed protein [Arabidopsis thaliana]
  misc_feature (6)..(335): Homolog of NCBI NO: 25407487 NR Description: hypothetical protein AT4g09160 [imported] - thaliana >gi|7267559|emb|CAB78040.1| putative protein
  misc_feature (343)..(405): Homolog of NCBI NO: 25407487 NR Description: hypothetical protein AT4g09160 [imported] - thaliana >gi|7267559|emb|CAB78040.1| putative protein
  misc_feature (39)..(405): Homolog of NCBI NO: 15081614 NR Description: At1g72160/T9N14_8 [Arabidopsis thaliana]
  misc_feature (39)..(405): Homolog of NCBI NO: 15218383 NR Description: cytosolic factor -related [Arabidopsis thaliana]
  misc_feature (72)..(407): Homolog of NCBI NO: 18397616 NR Description: expressed protein [Arabidopsis thaliana]
  misc_feature (72)..(407): Homolog of NCBI NO: 14334978 NR Description: unknown protein [Arabidopsis thaliana]
MSPTTTPPPAPVAAPTSKGAKRSLMSSLMDATALLRSSSFKEDSYVAAALPASELRALADLKALLATHPDPISIWGVPLNPRSPPAAADDAAPVDERADVVLLKFLRARDFRVRDAHAMVLRCAAWRAEFGADAVLDEELGFKDLEGIVAYMHGWDRDGHPVCYNAYGVFKDRDMYERVFGDGDRLARFLRWRVQVMERGVRALTLRPGGVNAIIQVTDLKDMPKRELRAASNQILSLFQDNYPEMVARKVFINVPWYFSVLFSMISPFLTERTKSKFVIAREGNVAETLYKFIRPELVPVQYGGLSRTGDLENGPPKPASEFTIKGGEKVFLEIDGIEAGATITWDLVVGGWDLEYGAEYVPAAEDSYTLCVEKTRMVSATAEEPVHNAFTAREAGKMVLSIDNSGFPEAQGCRLQVLRAQVVGVGMLMSCGGRRGRHLAGR

SEQ ID NO: 10255 - protein, 419 aa, Zea mays subsp. mays
  peptide (1)..(419): Ceres Seq. ID no. 13577778
  misc_feature (127)..(287): Pfam Name: CRAL/TRIO domain Pfam Description: CRAL/TRIO domain
  misc_feature (1)..(382): Homolog of NCBI NO: 15230555 NR Description: expressed protein [Arabidopsis thaliana]
  misc_feature (1)..(381): Homolog of NCBI NO: 34907288 NR Description: contains ESTs
  misc_feature (35)..(381): Homolog of NCBI NO: 8894548 NR Description: hypothetical protein [Cicer arietinum]
  misc_feature (1)..(381): Homolog of NCBI NO: 30680992 NR Description: expressed protein [Arabidopsis thaliana]
  misc_feature (1)..(311): Homolog of NCBI NO: 25407487 NR Description: hypothetical protein AT4g09160 [imported] - thaliana >gi|7267559|emb|CAB78040.1| putative protein
  misc_feature (319)..(381): Homolog of NCBI NO: 25407487 NR Description: hypothetical protein AT4g09160 [imported] - thaliana >gi|7267559|emb|CAB78040.1| putative protein
  misc_feature (15)..(381): Homolog of NCBI NO: 15081614 NR Description: At1g72160/T9N14_8 [Arabidopsis thaliana]
  misc_feature (15)..(381): Homolog of NCBI NO: 15218383 NR Description: cytosolic factor -related [Arabidopsis thaliana]
  misc_feature (48)..(383): Homolog of NCBI NO: 18397616 NR Description: expressed protein [Arabidopsis thaliana]
  misc_feature (48)..(383): Homolog of NCBI NO: 14334978 NR Description: unknown protein [Arabidopsis thaliana]
MSSLMDATALLRSSSFKEDSYVAAALPASELRALADLKALLATHPDPISIWGVPLNPRSPPAAADDAAPVDERADVVLLKFLRARDFRVRDAHAMVLRCAAWRAEFGADAVLDEELGFKDLEGIVAYMHGWDRDGHPVCYNAYGVFKDRDMYERVFGDGDRLARFLRWRVQVMERGVRALTLRPGGVNAIIQVTDLKDMPKRELRAASNQILSLFQDNYPEMVARKVFINVPWYFSVLFSMISPFLTERTKSKFVIAREGNVAETLYKFIRPELVPVQYGGLSRTGDLENGPPKPASEFTIKGGEKVFLEIDGIEAGATITWDLVVGGWDLEYGAEYVPAAEDSYTLCVEKTRMVSATAEEPVHNAFTAREAGKMVLSIDNSGFPEAQGCRLQVLRAQVVGVGMLMSCGGRRGRHLAGR

SEQ ID NO: 10256 - DNA, 1061 bp, Zea mays subsp. mays
  misc_feature (1)..(1061): Ceres Seq. ID no. 12400713
  misc_feature: MA Experiment ID: 20000478 Result: Down-regulated in Transcription
  misc_feature: MA Experiment 20000478 PARAMETER Experiment Name: Zm_5mM_SA_P Parameter: Age (day) Value: 11
  misc_feature: MA Experiment 20000478 PARAMETER Experiment Name: Zm_5mM_SA_P Parameter: Organism Value: Zea mays
  misc_feature: MA Experiment 20000478 PARAMETER Experiment Name: Zm_5mM_SA_P Parameter: Plant Line Value: 35A19
  misc_feature: MA Experiment 20000478 PARAMETER Experiment Name: Zm_5mM_SA_P Parameter: Timepoint (hr) Value: 72
  misc_feature: MA Experiment 20000478 PARAMETER Experiment Name: Zm_5mM_SA_P Parameter: Tissue Value: Aerial
  misc_feature: MA Experiment 20000478 PARAMETER Experiment Name: Zm_5mM_SA_P Parameter: Treatment Value: 5mM SA vs. No Treatment
attccaaacaggacaccgaatgcacgatcgatcccacaagccgcagccgccggaggctggcgagggcgccggcggcgggaacgtggatcgagtgctcttcaagaacctcgtcgagatggtgccgctcgtcgagtcgctcatggaccggagggtcaactcggcctactcgcgacgcacttcggctagtctacacgccggcgccgcccaagaagggcgagcgaattggaaagtgtcaaattgccacagaggcgtatcggccaaaaagcggagagaccctggcgatgtatccaagaagagcacccctgattctaacggcgacaacggcttggttgtgccattgtctctatcgggtgctgaaaataagcccaaggatgatgttgctgggctgcgcgagcagggtcgattacctgcaaaagaaactgctcgagaaggaggaggcgctgaggtccgcggagagcctcgtgactgagatgaacgcggcatatgcaaccatcgatgaactccgacgcctggtgtctgacaaagaagctttgatcagatctaccaattctcagttgcatgatgcaaagattatgcttgcagacaagcaagcatctgtagagaaactggaatgggaggtaaagatgtcaaataaaaaggtcgaagatcttcaaggagatgtgtcaaatatgggattcgagataagctcgttgatggcatttttcgataaaatttcagagaatctttcaggtgactcttatgatgacacagtaccatcatcatatgaattagaggcaattcaatcaacgagtgaaattgacaagatcgaggtcgacaaaatagagcaggagaggattacctatggtgaagctctcgcggcagcgagagagaaccctgacgaggagcacttgaatatagctgccgaggcaaggtcaaggctgcaggtccttgtactatagtggtggcccccttctaattctagtgtatgtatgataatgttgaactgctgatgtaattttaccttgttggcttgagttgaggcgcttgtgaaatcgttccaggggtaatggaacgagcactgc

SEQ ID NO: 10257 - protein, 311 aa, Zea mays subsp. mays
  peptide (1)..(311): Ceres Seq. ID no. 12400714
  misc_feature (131)..(299): Pfam Name: Tropomyosin Pfam Description: Tropomyosin
  misc_feature (132)..(309): Homolog of NCBI NO: 15241531 NR Description: myosin heavy chain-like protein; protein id: supported by cDNA: gi_13877922, supported by cDNA: gi_1732514
  misc_feature (34)..(311): Homolog of NCBI NO: 19716176 NR Description: TMV-MP30 binding protein 2C [Nicotiana tabacum]
  misc_feature (132)..(309): Homolog of NCBI NO: 1732515 NR Description: myosin heavy chain-like protein [Arabidopsis
SKQDTECTIDPTSRSRRRLARAPAAGTWIECSSRTSSRWCRSSSRSWTGGSTRPTRDALRLVYTPAPPKKGERIGKCQIATEAYRPKSGETLAMYPRRAPLILTATTAWLCHCLYRVLKISPRMMLLGCASRVDYLQKKLLEKEEALRSAESLVTEMNAAYATIDELRRLVSDKEALIRSTNSQLHDAKIMLADKQASVEKLEWEVKMSNKKVEDLQGDVSNMGFEISSLMAFFDKISENLSGDSYDDTVPSSYELEAIQSTSEIDKIEVDKIEQERITYGEALAAARENPDEEHLNIAAEARSRLQVLVL

SEQ ID NO: 10258 - protein, 218 aa, Zea mays subsp. mays
  peptide (1)..(218): Ceres Seq. ID no. 12400715
  misc_feature (38)..(206): Pfam Name: Tropomyosin Pfam Description: Tropomyosin
  misc_feature (39)..(216): Homolog of NCBI NO: 15241531 NR Description: myosin heavy chain-like protein; protein id: supported by cDNA: gi_13877922, supported by cDNA: gi_1732514
  misc_feature (1)..(218): Homolog of NCBI NO: 19716176 NR Description: TMV-MP30 binding protein 2C [Nicotiana tabacum]
  misc_feature (39)..(216): Homolog of NCBI NO: 1732515 NR Description: myosin heavy chain-like protein [Arabidopsis
MYPRRAPLILTATTAWLCHCLYRVLKISPRMMLLGCASRVDYLQKKLLEKEEALRSAESLVTEMNAAYATIDELRRLVSDKEALIRSTNSQLHDAKIMLADKQASVEKLEWEVKMSNKKVEDLQGDVSNMGFEISSLMAFFDKISENLSGDSYDDTVPSSYELEAIQSTSEIDKIEVDKIEQERITYGEALAAARENPDEEHLNIAAEARSRLQVLVL

SEQ ID NO: 10259 - protein, 188 aa, Zea mays subsp. mays
  peptide (1)..(188): Ceres Seq. ID no. 12400716
  misc_feature (8)..(176): Pfam Name: Tropomyosin Pfam Description: Tropomyosin
  misc_feature (9)..(186): Homolog of NCBI NO: 15241531 NR Description: myosin heavy chain-like protein; protein id: supported by cDNA: gi_13877922, supported by cDNA: gi_1732514
  misc_feature (1)..(188): Homolog of NCBI NO: 19716176 NR Description: TMV-MP30 binding protein 2C [Nicotiana tabacum]
  misc_feature (9)..(186): Homolog of NCBI NO: 1732515 NR Description: myosin heavy chain-like protein [Arabidopsis
MMLLGCASRVDYLQKKLLEKEEALRSAESLVTEMNAAYATIDELRRLVSDKEALIRSTNSQLHDAKIMLADKQASVEKLEWEVKMSNKKVEDLQGDVSNMGFEISSLMAFFDKISENLSGDSYDDTVPSSYELEAIQSTSEIDKIEVDKIEQERITYGEALAAARENPDEEHLNIAAEARSRLQVLVL

SEQ ID NO: 10260 - DNA, 841 bp, Zea mays subsp. mays
  misc_feature (1)..(841): Ceres Seq. ID no. 13492216
  misc_feature: MA Experiment ID: 108559 Result: Up-regulated in Transcription
  misc_feature: MA Experiment 108559 PARAMETER Experiment Name: Zm_5mM_NO_P Parameter: Age (day) Value: 8
  misc_feature: MA Experiment 108559 PARAMETER Experiment Name: Zm_5mM_NO_P Parameter: Organism Value: Zea mays
  misc_feature: MA Experiment 108559 PARAMETER Experiment Name: Zm_5mM_NO_P Parameter: Plant Line Value: 35A19
  misc_feature: MA Experiment 108559 PARAMETER Experiment Name: Zm_5mM_NO_P Parameter: Timepoint (hr) Value: 12
  misc_feature: MA Experiment 108559 PARAMETER Experiment Name: Zm_5mM_NO_P Parameter: Tissue Value: Aerial
  misc_feature: MA Experiment 108559 PARAMETER Experiment Name: Zm_5mM_NO_P Parameter: Treatment Value: 5mM NO vs. No Treatment
acatgcgctgacgcgcatcccccccggcgtggcgtgcgctttgatctagctcttcttctcgaatccagcccgaggcctttttcttctgcggtttcatccgtacccatcctgcacacgaagcctagaatagccctcccctgctccgccacctcctcggatcccgaccaccccacccccaccccagacaacaggttgatggaggctaagatgggacgcttcttcgagtccgtgagcaatttcttcaccggaggcgaccacatcccctggtgcgaccgcgacctcatcgccggctgtgaaggagagcttgtcaatgctgcaaatgaggaacagaggaatgaaagccttatgaggttgtcatgggcccttgtgcactccaggcagacagacgatgtaaaccgtggaatcagcatgcttcaagcttctttggataattctgccagtcctctgcagactagggaaaagctgtacttgttggctgttggattctacaggattggcgactactcaaaaagcaggcaacttgcagatcgttgtttggagattcaagcggattggcggcaggccatatcgctgaagaaggcaatagaagataaaattgccaaagatggtctgattggaataggaattgcgacaactgcggtcggacttctggttggtggaattgcagctgctgttgccaggaagaagtgaggtcaatatattggatcggcagctcattgaactaggggagctcccgtctctgtaattccaacttttctgttgttaccttggtgatattacagttgaattgccactctttatatgtacgaagtaatcgtatgataatgataacaccattgtg

SEQ ID NO: 10261 - protein, 229 aa, Zea mays subsp. mays
  peptide (1)..(229): Ceres Seq. ID no. 13492217
  misc_feature (66)..(229): Homolog of NCBI NO: 18410639 NR Description: expressed protein [Arabidopsis thaliana]
  misc_feature (66)..(228): Homolog of NCBI NO: 19386833 NR Description: B1147A04.28 [Oryza sativa (japonica
  misc_feature (66)..(227): Homolog of NCBI NO: 18416852 NR Description: expressed protein [Arabidopsis thaliana] putative protein [Arabidopsis thaliana] unknown protein [Arabidopsis thaliana]
  misc_feature (119)..(229): Homolog of NCBI NO: 27664028 NR Description: similar to RIKEN cDNA 2010003O14 [Mus musculus]
  misc_feature (119)..(229): Homolog of NCBI NO: 7705632 NR Description: CGI-135 protein [Homo sapiens]
  misc_feature (119)..(229): Homolog of NCBI NO: 33112470 NR Description: Tetratricopeptide repeat protein 11 (TPR repeat
  misc_feature (119)..(229): Homolog of NCBI NO: 13384998 NR Description: RIKEN cDNA 2010003O14 [Mus musculus] unnamed protein product [Mus musculus] unnamed protein product [Mus musculus]
  misc_feature (119)..(227): Homolog of NCBI NO: 33391189 NR Description: putative mitochondrial fission protein Tbfis1p
  misc_feature (113)..(224): Homolog of NCBI NO: 6322124 NR Description: Involved in mitochondrial division; Fis1p cerevisiae] >gi|731823|sp|P40515|YIG5_YEAST Hypothetical 17.7 kDa
  misc_feature (119)..(225): Homolog of NCBI NO: 40889302 NR Description: Chain A, Solution Structure Of Human Mitochondria
TCADAHPPRRGVRFDLALLLESSPRPFSSAVSSVPILHTKPRIALPCSATSSDPDHPTPTPDNRLMEAKMGRFFESVSNFFTGGDHIPWCDRDLIAGCEGELVNAANEEQRNESLMRLSWALVHSRQTDDVNRGISMLQASLDNSASPLQTREKLYLLAVGFYRIGDYSKSRQLADRCLEIQADWRQAISLKKAIEDKIAKDGLIGIGIATTAVGLLVGGIAAAVARKK

SEQ ID NO: 10262 - protein, 164 aa, Zea mays subsp. mays
  peptide (1)..(164): Ceres Seq. ID no. 13492218
  misc_feature (54)..(160): Homolog of NCBI NO: 40889302 NR Description: Chain A, Solution Structure Of Human Mitochondria
  misc_feature (1)..(164): Homolog of NCBI NO: 18410639 NR Description: expressed protein [Arabidopsis thaliana]
  misc_feature (1)..(163): Homolog of NCBI NO: 19386833 NR Description: B1147A04.28 [Oryza sativa (japonica
  misc_feature (1)..(162): Homolog of NCBI NO: 18416852 NR Description: expressed protein [Arabidopsis thaliana] putative protein [Arabidopsis thaliana] unknown protein [Arabidopsis thaliana]
  misc_feature (54)..(164): Homolog of NCBI NO: 27664028 NR Description: similar to RIKEN cDNA 2010003O14 [Mus musculus]
  misc_feature (54)..(164): Homolog of NCBI NO: 7705632 NR Description: CGI-135 protein [Homo sapiens]
  misc_feature (54)..(164): Homolog of NCBI NO: 33112470 NR Description: Tetratricopeptide repeat protein 11 (TPR repeat
  misc_feature (54)..(164): Homolog of NCBI NO: 13384998 NR Description: RIKEN cDNA 2010003O14 [Mus musculus] unnamed protein product [Mus musculus] unnamed protein product [Mus musculus]
  misc_feature (54)..(162): Homolog of NCBI NO: 33391189 NR Description: putative mitochondrial fission protein Tbfis1p
  misc_feature (48)..(159): Homolog of NCBI NO: 6322124 NR Description: Involved in mitochondrial division; Fis1p cerevisiae] >gi|731823|sp|P40515|YIG5_YEAST Hypothetical 17.7 kDa
MEAKMGRFFESVSNFFTGGDHIPWCDRDLIAGCEGELVNAANEEQRNESLMRLSWALVHSRQTDDVNRGISMLQASLDNSASPLQTREKLYLLAVGFYRIGDYSKSRQLADRCLEIQADWRQAISLKKAIEDKIAKDGLIGIGIATTAVGLLVGGIAAAVARKK

SEQ ID NO: 10263 - protein, 160 aa, Zea mays subsp. mays
  peptide (1)..(160): Ceres Seq. ID no. 13492219
  misc_feature (1)..(160): Homolog of NCBI NO: 18410639 NR Description: expressed protein [Arabidopsis thaliana]
  misc_feature (1)..(159): Homolog of NCBI NO: 19386833 NR Description: B1147A04.28 [Oryza sativa (japonica
  misc_feature (1)..(158): Homolog of NCBI NO: 18416852 NR Description: expressed protein [Arabidopsis thaliana] putative protein [Arabidopsis thaliana] unknown protein [Arabidopsis thaliana]
  misc_feature (50)..(160): Homolog of NCBI NO: 27664028 NR Description: similar to RIKEN cDNA 2010003O14 [Mus musculus]
  misc_feature (50)..(160): Homolog of NCBI NO: 7705632 NR Description: CGI-135 protein [Homo sapiens]
  misc_feature (50)..(160): Homolog of NCBI NO: 33112470 NR Description: Tetratricopeptide repeat protein 11 (TPR repeat
  misc_feature (50)..(160): Homolog of NCBI NO: 13384998 NR Description: RIKEN cDNA 2010003O14 [Mus musculus] unnamed protein product [Mus musculus] unnamed protein product [Mus musculus]
  misc_feature (50)..(158): Homolog of NCBI NO: 33391189 NR Description: putative mitochondrial fission protein Tbfis1p
  misc_feature (44)..(155): Homolog of NCBI NO: 6322124 NR Description: Involved in mitochondrial division; Fis1p cerevisiae] >gi|731823|sp|P40515|YIG5_YEAST Hypothetical 17.7 kDa
  misc_feature (50)..(156): Homolog of NCBI NO: 40889302 NR Description: Chain A, Solution Structure Of Human Mitochondria
MGRFFESVSNFFTGGDHIPWCDRDLIAGCEGELVNAANEEQRNESLMRLSWALVHSRQTDDVNRGISMLQASLDNSASPLQTREKLYLLAVGFYRIGDYSKSRQLADRCLEIQADWRQAISLKKAIEDKIAKDGLIGIGIATTAVGLLVGGIAAAVARKK

SEQ ID NO: 10264 - DNA, 707 bp, Zea mays subsp. mays
  misc_feature (1)..(707): Ceres Seq. ID no. 12441460
  misc_feature: MA Experiment ID: 108528 Result: Down-regulated in Transcription
  misc_feature: MA Experiment 108528 PARAMETER Experiment Name: Zm_Imbibed_Seeds_P Parameter: Age (day) Value: 5 vs. 2
  misc_feature: MA Experiment 108528 PARAMETER Experiment Name: Zm_Imbibed_Seeds_P Parameter: Organism Value: Zea mays
  misc_feature: MA Experiment 108528 PARAMETER Experiment Name: Zm_Imbibed_Seeds_P Parameter: Plant Line Value: 35A19
  misc_feature: MA Experiment 108528 PARAMETER Experiment Name: Zm_Imbibed_Seeds_P Parameter: Tissue Value: Aerial vs. Embryo
  misc_feature: MA Experiment ID: 108530 Result: Down-regulated in Transcription
  misc_feature: MA Experiment 108530 PARAMETER Experiment Name: Zm_Imbibed_Seeds_P Parameter: Age (day) Value: 6 vs. 2
  misc_feature: MA Experiment 108530 PARAMETER Experiment Name: Zm_Imbibed_Seeds_P Parameter: Organism Value: Zea mays
  misc_feature: MA Experiment 108530 PARAMETER Experiment Name: Zm_Imbibed_Seeds_P Parameter: Plant Line Value: 35A19
  misc_feature: MA Experiment 108530 PARAMETER Experiment Name: Zm_Imbibed_Seeds_P Parameter: Tissue Value: Aerial vs. Embryo
  misc_feature: MA Experiment ID: 108545 Result: Down-regulated in Transcription
  misc_feature: MA Experiment 108545 PARAMETER Experiment Name: Zm_Imbibed_Seeds_P Parameter: Age (day) Value: 3 vs. 2
  misc_feature: MA Experiment 108545 PARAMETER Experiment Name: Zm_Imbibed_Seeds_P Parameter: Organism Value: Zea mays
  misc_feature: MA Experiment 108545 PARAMETER Experiment Name: Zm_Imbibed_Seeds_P Parameter: Plant Line Value: 35A19
  misc_feature: MA Experiment 108545 PARAMETER Experiment Name: Zm_Imbibed_Seeds_P Parameter: Tissue Value: Aerial vs. Embryo
  misc_feature: MA Experiment ID: 108547 Result: Down-regulated in Transcription
  misc_feature: MA Experiment 108547 PARAMETER Experiment Name: Zm_Imbibed_Seeds_P Parameter: Age (day) Value: 4 vs. 2
  misc_feature: MA Experiment 108547 PARAMETER Experiment Name: Zm_Imbibed_Seeds_P Parameter: Organism Value: Zea mays
  misc_feature: MA Experiment 108547 PARAMETER Experiment Name: Zm_Imbibed_Seeds_P Parameter: Plant Line Value: 35A19
  misc_feature: MA Experiment 108547 PARAMETER Experiment Name: Zm_Imbibed_Seeds_P Parameter: Tissue Value: Aerial vs. Embryo
  misc_feature: MA Experiment ID: 108559 Result: Down-regulated in Transcription
  misc_feature: MA Experiment 108559 PARAMETER Experiment Name: Zm_5mM_NO_P Parameter: Age (day) Value: 8
  misc_feature: MA Experiment 108559 PARAMETER Experiment Name: Zm_5mM_NO_P Parameter: Organism Value: Zea mays
  misc_feature: MA Experiment 108559 PARAMETER Experiment Name: Zm_5mM_NO_P Parameter: Plant Line Value: 35A19
  misc_feature: MA Experiment 108559 PARAMETER Experiment Name: Zm_5mM_NO_P Parameter: Timepoint (hr) Value: 12
  misc_feature: MA Experiment 108559 PARAMETER Experiment Name: Zm_5mM_NO_P Parameter: Tissue Value: Aerial
  misc_feature: MA Experiment 108559 PARAMETER Experiment Name: Zm_5mM_NO_P Parameter: Treatment Value: 5mM NO vs. No Treatment
  misc_feature: MA Experiment ID: 20000478 Result: Down-regulated in Transcription
  misc_feature: MA Experiment 20000478 PARAMETER Experiment Name: Zm_5mM_SA_P Parameter: Age (day) Value: 11
  misc_feature: MA Experiment 20000478 PARAMETER Experiment Name: Zm_5mM_SA_P Parameter: Organism Value: Zea mays
  misc_feature: MA Experiment 20000478 PARAMETER Experiment Name: Zm_5mM_SA_P Parameter: Plant Line Value: 35A19
  misc_feature: MA Experiment 20000478 PARAMETER Experiment Name: Zm_5mM_SA_P Parameter: Timepoint (hr) Value: 72
  misc_feature: MA Experiment 20000478 PARAMETER Experiment Name: Zm_5mM_SA_P Parameter: Tissue Value: Aerial
  misc_feature: MA Experiment 20000478 PARAMETER Experiment Name: Zm_5mM_SA_P Parameter: Treatment Value: 5mM SA vs. No Treatment
  misc_feature: MA Experiment ID: 20000479 Result: Down-regulated in Transcription
  misc_feature: MA Experiment 20000479 PARAMETER Experiment Name: Zm_Drought_P Parameter: Age (day) Value: 10
  misc_feature: MA Experiment 20000479 PARAMETER Experiment Name: Zm_Drought_P Parameter: Organism Value: Zea mays
  misc_feature: MA Experiment 20000479 PARAMETER Experiment Name: Zm_Drought_P Parameter: Plant Line Value: 35A19
  misc_feature: MA Experiment 20000479 PARAMETER Experiment Name: Zm_Drought_P Parameter: Timepoint (hr) Value: 48
  misc_feature: MA Experiment 20000479 PARAMETER Experiment Name: Zm_Drought_P Parameter: Tissue Value: Aerial
  misc_feature: MA Experiment 20000479 PARAMETER Experiment Name: Zm_Drought_P Parameter: Treatment Value: Drought vs. No Drought
  misc_feature: MA Experiment ID: 20000480 Result: Down-regulated in Transcription
  misc_feature: MA Experiment 20000480 PARAMETER Experiment Name: Zm_Drought_P Parameter: Age (day) Value: 11
  misc_feature: MA Experiment 20000480 PARAMETER Experiment Name: Zm_Drought_P Parameter: Organism Value: Zea mays
  misc_feature: MA Experiment 20000480 PARAMETER Experiment Name: Zm_Drought_P Parameter: Plant Line Value: 35A19
  misc_feature: MA Experiment 20000480 PARAMETER Experiment Name: Zm_Drought_P Parameter: Timepoint (hr) Value: 72
  misc_feature: MA Experiment 20000480 PARAMETER Experiment Name: Zm_Drought_P Parameter: Tissue Value: Aerial
  misc_feature: MA Experiment 20000480 PARAMETER Experiment Name: Zm_Drought_P Parameter: Treatment Value: Drought vs. No Drought
  misc_feature: MA Experiment ID: 20000535 Result: Down-regulated in Transcription
  misc_feature: MA Experiment 20000535 PARAMETER Experiment Name: Zm_Hybrid_Seed_Dev_P Parameter: DAP Value: 30 vs. 12
  misc_feature: MA Experiment 20000535 PARAMETER Experiment Name: Zm_Hybrid_Seed_Dev_P Parameter: Organism Value: Zea mays
  misc_feature: MA Experiment 20000535 PARAMETER Experiment Name: Zm_Hybrid_Seed_Dev_P Parameter: Plant Line Value: 35A19
  misc_feature: MA Experiment 20000535 PARAMETER Experiment Name: Zm_Hybrid_Seed_Dev_P Parameter: Tissue Value: Embryo vs. Unfert Floret
taatcgaaaaatcaccaccaccccgcggctgcagctcagcagctccagacctcaccagaggcacctaccacaccgcccgccgccgatcccgtcacccgtctcctccccgctgcggagcgtctccagccctgcccggtgcccgcccagatggcaaacgcggcgtcagggatggccgtggacgacgactgcaagcgccggttcctggagctcaaggccaagaggacgcaccgcttcatcatctacaggatcgacgagaagaagaagatggtggtggtggagcaggtgggcaagcccgtgctcggctacgacgacttcgccgccagcctccccgccaacgagtgcaggtacgccatcttcgactacgacttcgtcaccgaggagaactgccagaagagcaagatcttcttcatcgcctggtctcctgacacggcgcgcgtgaggagcaagatgatctacgccagctccaaggagaggttcaagcgggagctggacggcattcaggtggatctccaggccaccgactccgccgaggttggccttgacgtcatccagggccgtgcaagctgaggatgcccagcgatgaactgcccatgccagaggatgtatgagcatcatcagttcagatgagaacttgactgggcgggctatgtaaaaactgcatccaccgcagtgatgaaatcaatctaatcaatctaccacccccttct

SEQ ID NO: 10265 - protein, 145 aa, Zea mays subsp. mays
  peptide (1)..(145): Ceres Seq. ID no. 12441461
NRKITTTPRLQLSSSRPHQRHLPHRPPPIPSPVSSPLRSVSSPARCPPRWQTRRQGWPWTTTASAGSWSSRPRGRTASSSTGSTRRRRWWWWSRWASPCSATTTSPPASPPTSAGTPSSTTTSSPRRTARRARSSSSPGLLTRRA

SEQ ID NO: 10266 - protein, 140 aa, Zea mays subsp. mays
  peptide (1)..(140): Ceres Seq. ID no. 12441462
IEKSPPPRGCSSAAPDLTRGTYHTARRRSRHPSPPRCGASPALPGARPDGKRGVRDGRGRRLQAPVPGAQGQEDAPLHHLQDRREEEDGGGGAGGQARARLRRLRRQPPRQRVQVRHLRLRLRHRGELPEEQDLLHRLVS

SEQ ID NO: 10267 - protein, 139 aa, Zea mays subsp. mays; identical to SEQ ID NO: 4019
  peptide (1)..(139): Ceres Seq. ID no. 12441463
  misc_feature (12)..(139): Pfam Name: Cofilin/tropomyosin-type actin-binding protein Pfam Description: Cofilin/tropomyosin-type actin-binding protein
  misc_feature (12)..(139): Pfam Name: Cofilin/tropomyosin-type actin-binding protein Pfam Description: Cofilin/tropomyosin-type actin-binding protein
  misc_feature (1)..(139): Homolog of NCBI NO: 17366768 NR Description: Actin-depolymerizing factor 1 (ADF 1)
  misc_feature (1)..(139): Homolog of NCBI NO: 30697300 NR Description: actin depolymerizing factor 4 - like protein
  misc_feature (1)..(139): Homolog of NCBI NO: 4185511 NR Description: actin depolymerizing factor 4 [Arabidopsis
  misc_feature (1)..(139): Homolog of NCBI NO: 15231309 NR Description: actin depolymerizing factor 1 (ADF1); protein id: supported by cDNA: 1907., supported by cDNA: gi_1408470, by cDNA: gi_14334961 [Arabidopsis thaliana]
  misc_feature (1)..(139): Homolog of NCBI NO: 38564721 NR Description: putative actin-depolymerizing factor 2
  misc_feature (1)..(139): Homolog of NCBI NO: 30697300 NR Description: actin depolymerizing factor 4 - like protein
  misc_feature (1)..(139): Homolog of NCBI NO: 15231309 NR Description: actin depolymerizing factor 1 (ADF1); protein id: supported by cDNA: 1907., supported by cDNA: gi_1408470, by cDNA: gi_14334961 [Arabidopsis thaliana]
  misc_feature (1)..(137): Homolog of NCBI NO: 18411410 NR Description: putative actin-depolymerizing factor; protein id:
  misc_feature (1)..(138): Homolog of NCBI NO: 231509 NR Description: Actin-depolymerizing factor (ADF)
  misc_feature (1)..(139): Homolog of NCBI NO: 18408116 NR Description: actin depolymerizing factor 2 (ADF2); protein id: supported by cDNA: 99657., supported by cDNA: gi_13877562, by cDNA: gi_1408472, supported by cDNA: gi_14423375 [Arabidopsis
  misc_feature (8)..(139): Homolog of NCBI NO: 30697303 NR Description: actin depolymerizing factor 4 - like protein thaliana] >gi|15215859|gb|AAK91473.1| AT5g59890/mmn10_110 thaliana] >gi|19699262|gb|AAL90997.1| At1g05180/YUP8H12_21
  misc_feature (1)..(138): Homolog of NCBI NO: 17366765 NR Description: Actin-depolymerizing factor 2 (ADF 2)
  misc_feature (1)..(139): Homolog of NCBI NO: 38564721 NR Description: putative actin-depolymerizing factor 2
  misc_feature (1)..(139): Homolog of NCBI NO: 4185511 NR Description: actin depolymerizing factor 4 [Arabidopsis
  misc_feature (1)..(139): Homolog of NCBI NO: 17366768 NR Description: Actin-depolymerizing factor 1 (ADF 1)
  misc_feature (1)..(138): Homolog of NCBI NO: 17366765 NR Description: Actin-depolymerizing factor 2 (ADF 2)
  misc_feature (8)..(139): Homolog of NCBI NO: 30697303 NR Description: actin depolymerizing factor 4 - like protein thaliana] >gi|15215859|gb|AAK91473.1| AT5g59890/mmn10_110 thaliana] >gi|19699262|gb|AAL90997.1| At1g05180/YUP8H12_21
  misc_feature (1)..(139): Homolog of NCBI NO: 18408116 NR Description: actin depolymerizing factor 2 (ADF2); protein id: supported by cDNA: 99657., supported by cDNA: gi_13877562, by cDNA: gi_1408472, supported by cDNA: gi_14423375 [Arabidopsis
  misc_feature (1)..(138): Homolog of NCBI NO: 231509 NR Description: Actin-depolymerizing factor (ADF)
  misc_feature (1)..(137): Homolog of NCBI NO: 18411410 NR Description: putative actin-depolymerizing factor; protein id:

SEQ ID NO: 10268 - DNA, 1919 bp, Zea mays subsp. mays
  misc_feature (1)..(1919): Ceres Seq. ID no. 12386452
  misc_feature: MA Experiment ID: 108526 Result: Up-regulated in Transcription
  misc_feature: MA Experiment 108526 PARAMETER Experiment Name: Zm_5mM_NO_P Parameter: Age (day) Value: 8
  misc_feature: MA Experiment 108526 PARAMETER Experiment Name: Zm_5mM_NO_P Parameter: Organism Value: Zea mays
  misc_feature: MA Experiment 108526 PARAMETER Experiment Name: Zm_5mM_NO_P Parameter: Plant Line Value: 35A19
  misc_feature: MA Experiment 108526 PARAMETER Experiment Name: Zm_5mM_NO_P Parameter: Timepoint (hr) Value: 1
  misc_feature: MA Experiment 108526 PARAMETER Experiment Name: Zm_5mM_NO_P Parameter: Tissue Value: Aerial
  misc_feature: MA Experiment 108526 PARAMETER Experiment Name: Zm_5mM_NO_P Parameter: Treatment Value: 5mM NO vs. No Treatment
  misc_feature: MA Experiment ID: 108527 Result: Up-regulated in Transcription
  misc_feature: MA Experiment 108527 PARAMETER Experiment Name: Zm_5mM_NO_P Parameter: Age (day) Value: 8
  misc_feature: MA Experiment 108527 PARAMETER Experiment Name: Zm_5mM_NO_P Parameter: Organism Value: Zea mays
  misc_feature: MA Experiment 108527 PARAMETER Experiment Name: Zm_5mM_NO_P Parameter: Plant Line Value: 35A19
  misc_feature: MA Experiment 108527 PARAMETER Experiment Name: Zm_5mM_NO_P Parameter: Timepoint (hr) Value: 6
  misc_feature: MA Experiment 108527 PARAMETER Experiment Name: Zm_5mM_NO_P Parameter: Tissue Value: Aerial
  misc_feature: MA Experiment 108527 PARAMETER Experiment Name: Zm_5mM_NO_P Parameter: Treatment Value: 5mM NO vs. No Treatment
  misc_feature: MA Experiment ID: 108528 Result: Up-regulated in Transcription
  misc_feature: MA Experiment 108528 PARAMETER Experiment Name: Zm_Imbibed_Seeds_P Parameter: Age (day) Value: 5 vs. 2
  misc_feature: MA Experiment 108528 PARAMETER Experiment Name: Zm_Imbibed_Seeds_P Parameter: Organism Value: Zea mays
  misc_feature: MA Experiment 108528 PARAMETER Experiment Name: Zm_Imbibed_Seeds_P Parameter: Plant Line Value: 35A19
  misc_feature: MA Experiment 108528 PARAMETER Experiment Name: Zm_Imbibed_Seeds_P Parameter: Tissue Value: Aerial vs. Embryo
  misc_feature: MA Experiment ID: 108529 Result: Up-regulated in Transcription
  misc_feature: MA Experiment 108529 PARAMETER Experiment Name: Zm_Imbibed_Seeds_P Parameter: Age (day) Value: 5 vs. 2
  misc_feature: MA Experiment 108529 PARAMETER Experiment Name: Zm_Imbibed_Seeds_P Parameter: Organism Value: Zea mays
  misc_feature: MA Experiment 108529 PARAMETER Experiment Name: Zm_Imbibed_Seeds_P Parameter: Plant Line Value: 35A19
  misc_feature: MA Experiment 108529 PARAMETER Experiment Name: Zm_Imbibed_Seeds_P Parameter: Tissue Value: Roots vs. Embryo
  misc_feature: MA Experiment ID: 108530 Result: Up-regulated in Transcription
  misc_feature: MA Experiment 108530 PARAMETER Experiment Name: Zm_Imbibed_Seeds_P Parameter: Age (day) Value: 6 vs. 2
  misc_feature: MA Experiment 108530 PARAMETER Experiment Name: Zm_Imbibed_Seeds_P Parameter: Organism Value: Zea mays
  misc_feature: MA Experiment 108530 PARAMETER Experiment Name: Zm_Imbibed_Seeds_P Parameter: Plant Line Value: 35A19
  misc_feature: MA Experiment 108530 PARAMETER Experiment Name: Zm_Imbibed_Seeds_P Parameter: Tissue Value: Aerial vs. Embryo
  misc_feature: MA Experiment ID: 108533 Result: Up-regulated in Transcription
  misc_feature: MA Experiment 108533 PARAMETER Experiment Name: Zm_4deg_Cold_P Parameter: Age (hr) Value: 8
  misc_feature: MA Experiment 108533 PARAMETER Experiment Name: Zm_4deg_Cold_P Parameter: Organism Value: Zea mays
  misc_feature: MA Experiment 108533 PARAMETER Experiment Name: Zm_4deg_Cold_P Parameter: Plant Line Value: 35A19
  misc_feature: MA Experiment 108533 PARAMETER Experiment Name: Zm_4deg_Cold_P Parameter: Temperature (deg C) Value: 4 vs. 22
  misc_feature: MA Experiment 108533 PARAMETER Experiment Name: Zm_4deg_Cold_P Parameter: Timepoint (hr) Value: 1
  misc_feature: MA Experiment 108533 PARAMETER Experiment Name: Zm_4deg_Cold_P Parameter: Tissue Value: Aerial
  misc_feature: MA Experiment ID: 108535 Result: Down-regulated in Transcription
  misc_feature: MA Experiment 108535 PARAMETER Experiment Name: Zm_Meristem_P Parameter: Age (day) Value: 8
  misc_feature: MA Experiment 108535 PARAMETER Experiment Name: Zm_Meristem_P Parameter: Organism Value: Zea mays
  misc_feature: MA Experiment 108535 PARAMETER Experiment Name: Zm_Meristem_P Parameter: Plant Line Value: 35A19
  misc_feature: MA Experiment 108535 PARAMETER Experiment Name: Zm_Meristem_P Parameter: Tissue Value: Root Meristem vs. Above Root Meristem
  misc_feature: MA Experiment ID: 108547 Result: Up-regulated in Transcription
  misc_feature: MA Experiment 108547 PARAMETER Experiment Name: Zm_Imbibed_Seeds_P Parameter: Age (day) Value: 4 vs. 2
  misc_feature: MA Experiment 108547 PARAMETER Experiment Name: Zm_Imbibed_Seeds_P Parameter: Organism Value: Zea mays
  misc_feature: MA Experiment 108547 PARAMETER Experiment Name: Zm_Imbibed_Seeds_P Parameter: Plant Line Value: 35A19
  misc_feature: MA Experiment 108547 PARAMETER Experiment Name: Zm_Imbibed_Seeds_P Parameter: Tissue Value: Aerial vs. Embryo
  misc_feature: MA Experiment ID: 20000532 Result: Up-regulated in Transcription
  misc_feature: MA Experiment 20000532 PARAMETER Experiment Name: Zm_0.001percent_MeJA_P Parameter: Age (day) Value: 10
  misc_feature: MA Experiment 20000532 PARAMETER Experiment Name: Zm_0.001percent_MeJA_P Parameter: Organism Value: Zea mays
  misc_feature: MA Experiment 20000532 PARAMETER Experiment Name: Zm_0.001percent_MeJA_P Parameter: Plant Line Value: 35A19
  misc_feature: MA Experiment 20000532 PARAMETER Experiment Name: Zm_0.001percent_MeJA_P Parameter: Timepoint (hr) Value: 48
  misc_feature: MA Experiment 20000532 PARAMETER Experiment Name: Zm_0.001percent_MeJA_P Parameter: Tissue Value: Aerial
  misc_feature: MA Experiment 20000532 PARAMETER Experiment Name: Zm_0.001percent_MeJA_P Parameter: Treatment Value: 0.001percent MeJA vs. No Treatment
gcacgagaccattacctagaacatcctaatcgaaaactgcccaccgggctcgtctcctcccctggtttctttttcatcactcgtcaccggctcaccgctagttcctttagagaaggtgtacccccaatattccattaccggcccactgacgagagagagagagagagattttggcgtgactatccagagtccccaatcttacacctaaaaactcttctcagctaccggtgcggcatatcgcccctatcggcggcgaacatttgagttctcgcgacgtgtcctcgaggattctgtggtggaagatcggatcttttgctgcgggttccagttgccaaccagagatgtcggctctcctcgatctactgatggggatctttcgccagcagaccctcggcggcgccgccctggagctcgccgcgctggcggcgccgctctcgctcgccgccctcgtcggccttctcatcgggtgggcatggcgcccgaggtgggcgggggtcgtcgtcgtcgacaacgcccaacagatggcgcagctccccgcggcggcggcgcctccggaccgcgccaccgccaccaccaccgcggtggtatctcgcaacgaggcggccgccgtcgtaccgagaactgtggtggctcatgcggcggccgaggacgagcagcagcagctggcggtcaacaccggtgacttgatgcacctctggcggctcgtcgacgagaaggacggtggcccgtcgtggattcacatgatggaccgcaccttaccaaccatgaggtaccaagcctggcggagagacccaccgagtggtccaccacagtaccgcagcagcacaatcttggaagatgcgtcaccagaggttgtgagagatttcttctgggacgacgagttccggatgaacaacagctgggacgacatgcttcttcagcacgagacgctggaggagtgcaccgagactggaaccatggttgtccggtgggtcaggaagttcccgttcttctgcagcgacagggagtacatcataggccgcaggatatgggcgtctgggaagacattttactgtgtgaccaagggtgttcctcgtccctccgttccaagacaaaacaaacctcgccgtgtggacttgtactactctagctggtgcatccgtccagttgagtcgagaaaaggcgacggtgcaatgagtgcatgcgaggtgctcttgttccaccacgaggacatggggattccatgggagatcgcgaagcttggcgtccggcaggggatgtggggctgcgtcaagaggatagagcctggccttcgggcgtaccaggttgggaggaccgccggagaggctgtttccaagtgtgctgccatggcacaggtcaccaccaggttcagtgccgacgagctcgtcatcgcagggccggggcaacacggaggccagttcttcttcgtccggcgacggcgcagaggttgacaaggcgacgaagcactgggcgaacagcatacccaaggttctcatggtcggtggcgctgtggccctggcctgctgcaccttcgacggtgggttgttgaccaaggccgtcatcttcggcactgccaggaggtttgcaggagggccaggaaggcggtaggtacggtgtaacggtggacggaaagatccagcggcacaacacaaaacaagtgttgctgcactgcagcccgctgcgggttaataggttagaaatatagcatttgttacgaggaaacatagaagtattatgcaagaaaaccgctgttagataagaaatacactgctgtgtattagtagttaataacaagagttcttggtttttgtatgtaaccatattgtggatcggatccattgttcttccccatggacactactactaccagtctaccagatcgatgttgaccttgtggcagttgctgcagtttttttttc

SEQ ID NO: 10269 - protein, 369 aa, Zea mays subsp. mays
  peptide (1)..(369): Ceres Seq. ID no. 12386453
  misc_feature (158)..(239): Pfam Name: START domain Pfam Description: START domain
  misc_feature (1)..(351): Homolog of NCBI NO: 38344869 NR Description: OSJNBa0020P07.12 [Oryza sativa (japonica
  misc_feature (110)..(349): Homolog of NCBI NO: 15217736 NR Description: membrane related protein CP5, putative; protein
  misc_feature (110)..(349): Homolog of NCBI NO: 22135902 NR Description: membrane related protein CP5, putative thaliana] >gi|23197608|gb|AAN15331.1| membrane related protein
  misc_feature (23)..(50): Homolog of NCBI NO: 15217736 NR Description: membrane related protein CP5, putative; protein
  misc_feature (23)..(50): Homolog of NCBI NO: 22135902 NR Description: membrane related protein CP5, putative thaliana] >gi|23197608|gb|AAN15331.1| membrane related protein
  misc_feature (110)..(350): Homolog of NCBI NO: 4741929 NR Description: membrane related protein CP5 [Arabidopsis
  misc_feature (23)..(50): Homolog of NCBI NO: 4741929 NR Description: membrane related protein CP5 [Arabidopsis
  misc_feature (95)..(354): Homolog of NCBI NO: 18423599 NR Description: membrane related protein-like; protein id: supported by cDNA: 37644., supported by cDNA: gi_19423949
  misc_feature (33)..(66): Homolog of NCBI NO: 18423599 NR Description: membrane related protein-like; protein id: supported by cDNA: 37644., supported by cDNA: gi_19423949
  misc_feature (95)..(354): Homolog of NCBI NO: 21593272 NR Description: membrane related protein-like [Arabidopsis
MSALLDLLMGIFRQQTLGGAALELAALAAPLSLAALVGLLIGWAWRPRWAGVVVVDNAQQMAQLPAAAAPPDRATATTTAVVSRNEAAAVVPRTVVAHAAAEDEQQQLAVNTGDLMHLWRLVDEKDGGPSWIHMMDRTLPTMRYQAWRRDPPSGPPQYRSSTILEDASPEVVRDFFWDDEFRMNNSWDDMLLQHETLEECTETGTMVVRWVRKFPFFCSDREYIIGRRIWASGKTFYCVTKGVPRPSVPRQNKPRRVDLYYSSWCIRPVESRKGDGAMSACEVLLFHHEDMGIPWEIAKLGVRQGMWGCVKRIEPGLRAYQVGRTAGEAVSKCAAMAQVTTRFSADELVIAGPGQHGGQFFFVRRRRRG

SEQ ID NO: 10270 - protein, 361 aa, Zea mays subsp. mays
  peptide (1)..(361): Ceres Seq. ID no. 12386454
  misc_feature (150)..(231): Pfam Name: START domain Pfam Description: START domain
  misc_feature (1)..(343): Homolog of NCBI NO: 38344869 NR Description: OSJNBa0020P07.12 [Oryza sativa (japonica
  misc_feature (102)..(341): Homolog of NCBI NO: 15217736 NR Description: membrane related protein CP5, putative; protein
  misc_feature (102)..(341): Homolog of NCBI NO: 22135902 NR Description: membrane related protein CP5, putative thaliana] >gi|23197608|gb|AAN15331.1| membrane related protein
  misc_feature (15)..(42): Homolog of NCBI NO: 15217736 NR Description: membrane related protein CP5, putative; protein
  misc_feature (15)..(42): Homolog of NCBI NO: 22135902 NR Description: membrane related protein CP5, putative thaliana] >gi|23197608|gb|AAN15331.1| membrane related protein
  misc_feature (102)..(342): Homolog of NCBI NO: 4741929 NR Description: membrane related protein CP5 [Arabidopsis
  misc_feature (15)..(42): Homolog of NCBI NO: 4741929 NR Description: membrane related protein CP5 [Arabidopsis
  misc_feature (87)..(346): Homolog of NCBI NO: 18423599 NR Description: membrane related protein-like; protein id: supported by cDNA: 37644., supported by cDNA: gi_19423949
  misc_feature (25)..(58): Homolog of NCBI NO: 18423599 NR Description: membrane related protein-like; protein id: supported by cDNA: 37644., supported by cDNA: gi_19423949
  misc_feature (87)..(346): Homolog of NCBI NO: 21593272 NR Description: membrane related protein-like [Arabidopsis
MGIFRQQTLGGAALELAALAAPLSLAALVGLLIGWAWRPRWAGVVVVDNAQQMAQLPAAAAPPDRATATTTAVVSRNEAAAVVPRTVVAHAAAEDEQQQLAVNTGDLMHLWRLVDEKDGGPSWIHMMDRTLPTMRYQAWRRDPPSGPPQYRSSTILEDASPEVVRDFFWDDEFRMNNSWDDMLLQHETLEECTETGTMVVRWVRKFPFFCSDREYIIGRRIWASGKTFYCVTKGVPRPSVPRQNKPRRVDLYYSSWCIRPVESRKGDGAMSACEVLLFHHEDMGIPWEIAKLGVRQGMWGCVKRIEPGLRAYQVGRTAGEAVSKCAAMAQVTTRFSADELVIAGPGQHGGQFFFVRRRRRG

SEQ ID NO: 10271 - protein, 309 aa, Zea mays subsp. mays
  peptide (1)..(309): Ceres Seq. ID no. 12386455
  misc_feature (98)..(179): Pfam Name: START domain Pfam Description: START domain
  misc_feature (1)..(291): Homolog of NCBI NO: 38344869 NR Description: OSJNBa0020P07.12 [Oryza sativa (japonica
  misc_feature (50)..(289): Homolog of NCBI NO: 15217736 NR Description: membrane related protein CP5, putative; protein
  misc_feature (50)..(289): Homolog of NCBI NO: 22135902 NR Description: membrane related protein CP5, putative thaliana] >gi|23197608|gb|AAN15331.1| membrane related protein
  misc_feature (50)..(290): Homolog of NCBI NO: 4741929 NR Description: membrane related protein CP5 [Arabidopsis
  misc_feature (35)..(294): Homolog of NCBI NO: 18423599 NR Description: membrane related protein-like; protein id: supported by cDNA: 37644., supported by cDNA: gi_19423949
  misc_feature (35)..(294): Homolog of NCBI NO: 21593272 NR Description: membrane related protein-like [Arabidopsis
  misc_feature (1)..(294): Homolog of NCBI NO: 10178166 NR Description: membrane related protein-like [Arabidopsis
  misc_feature (40)..(292): Homolog of NCBI NO: 18033654 NR Description: putative nodule membrane protein [Medicago sativa]
  misc_feature (15)..(286): Homolog of NCBI NO: 18414239 NR Description: expressed protein; protein id: At4g14500.1, by cDNA: gi_16226250 [Arabidopsis thaliana] AT4g14500/dl3290w [Arabidopsis thaliana]
  misc_feature (1)..(11): Homolog of NCBI NO: 18414239 NR Description: expressed protein; protein id: At4g14500.1, by cDNA: gi_16226250 [Arabidopsis thaliana] AT4g14500/dl3290w [Arabidopsis thaliana]
MAQLPAAAAPPDRATATTTAVVSRNEAAAVVPRTVVAHAAAEDEQQQLAVNTGDLMHLWRLVDEKDGGPSWIHMMDRTLPTMRYQAWRRDPPSGPPQYRSSTILEDASPEVVRDFFWDDEFRMNNSWDDMLLQHETLEECTETGTMVVRWVRKFPFFCSDREYIIGRRIWASGKTFYCVTKGVPRPSVPRQNKPRRVDLYYSSWCIRPVESRKGDGAMSACEVLLFHHEDMGIPWEIAKLGVRQGMWGCVKRIEPGLRAYQVGRTAGEAVSKCAAMAQVTTRFSADELVIAGPGQHGGQFFFVRRRRRG

SEQ ID NO: 10272 - DNA, 1049 bp, Zea mays subsp. mays
  misc_feature (1)..(1049): Ceres Seq. ID no. 12345528
  misc_feature: MA Experiment ID: 108527 Result: Up-regulated in Transcription
  misc_feature: MA Experiment 108527 PARAMETER Experiment Name: Zm_5mM_NO_P Parameter: Age (day) Value: 8
  misc_feature: MA Experiment 108527 PARAMETER Experiment Name: Zm_5mM_NO_P Parameter: Organism Value: Zea mays
  misc_feature: MA Experiment 108527 PARAMETER Experiment Name: Zm_5mM_NO_P Parameter: Plant Line Value: 35A19
  misc_feature: MA Experiment 108527 PARAMETER Experiment Name: Zm_5mM_NO_P Parameter: Timepoint (hr) Value: 6
  misc_feature: MA Experiment 108527 PARAMETER Experiment Name: Zm_5mM_NO_P Parameter: Tissue Value: Aerial
  misc_feature: MA Experiment 108527 PARAMETER Experiment Name: Zm_5mM_NO_P Parameter: Treatment Value: 5mM NO vs. No Treatment
  misc_feature: MA Experiment ID: 108535 Result: Up-regulated in Transcription
  misc_feature: MA Experiment 108535 PARAMETER Experiment Name: Zm_Meristem_P Parameter: Age (day) Value: 8
  misc_feature: MA Experiment 108535 PARAMETER Experiment Name: Zm_Meristem_P Parameter: Organism Value: Zea mays
  misc_feature: MA Experiment 108535 PARAMETER Experiment Name: Zm_Meristem_P Parameter: Plant Line Value: 35A19
  misc_feature: MA Experiment 108535 PARAMETER Experiment Name: Zm_Meristem_P Parameter: Tissue Value: Root Meristem vs. Above Root Meristem
  misc_feature: MA Experiment ID: 108543 Result: Down-regulated in Transcription
  misc_feature: MA Experiment ID: 108544 Result: Down-regulated in Transcription
  misc_feature: MA Experiment ID: 108547 Result: Down-regulated in Transcription
  misc_feature: MA Experiment 108547 PARAMETER Experiment Name: Zm_Imbibed_Seeds_P Parameter: Age (day) Value: 4 vs. 2
  misc_feature: MA Experiment 108547 PARAMETER Experiment Name: Zm_Imbibed_Seeds_P Parameter: Organism Value: Zea mays
  misc_feature: MA Experiment 108547 PARAMETER Experiment Name: Zm_Imbibed_Seeds_P Parameter: Plant Line Value: 35A19
  misc_feature: MA Experiment 108547 PARAMETER Experiment Name: Zm_Imbibed_Seeds_P Parameter: Tissue Value: Aerial vs. Embryo
  misc_feature: MA Experiment ID: 20000487 Result: Up-regulated in Transcription
  misc_feature: MA Experiment 20000487 PARAMETER Experiment Name: Zm_50mM_NH4NO3_L_to_H_P Parameter: Organism Value: Zea mays
  misc_feature: MA Experiment 20000487 PARAMETER Experiment Name: Zm_50mM_NH4NO3_L_to_H_P Parameter: Timepoint (hr) Value: 4
  misc_feature: MA Experiment 20000487 PARAMETER Experiment Name: Zm_50mM_NH4NO3_L_to_H_P Parameter: Tissue Value: Leaves
  misc_feature: MA Experiment 20000487 PARAMETER Experiment Name: Zm_50mM_NH4NO3_L_to_H_P Parameter: Treatment Value: 50mM NH4NO3 vs. 100mM Mannitol
  misc_feature: MA Experiment ID: 20000488 Result: Up-regulated in Transcription
  misc_feature: MA Experiment 20000488 PARAMETER Experiment Name: Zm_50mM_NH4NO3_L_to_H_P Parameter: Organism Value: Zea mays
  misc_feature: MA Experiment 20000488 PARAMETER Experiment Name: Zm_50mM_NH4NO3_L_to_H_P Parameter: Timepoint (hr) Value: 8
  misc_feature: MA Experiment 20000488 PARAMETER Experiment Name: Zm_50mM_NH4NO3_L_to_H_P Parameter: Tissue Value: Leaves
  misc_feature: MA Experiment 20000488 PARAMETER Experiment Name: Zm_50mM_NH4NO3_L_to_H_P Parameter: Treatment Value: 50mM NH4NO3 vs. 100mM Mannitol
  misc_feature: MA Experiment ID: 20000626 Result: Up-regulated in Transcription
  misc_feature: MA Experiment 20000626 PARAMETER Experiment Name: Zm_Herbicide-Treatments_P Parameter: Timepoint (hr) Value: 12
  misc_feature: MA Experiment 20000626 PARAMETER Experiment Name: Zm_Herbicide-Treatments_P Parameter: Tissue Value: Aerial
  misc_feature: MA Experiment 20000626 PARAMETER Experiment Name: Zm_Herbicide-Treatments_P Parameter: Treatment Value: Roundup vs. No Treatment
aaaaacgctccgttgcctttcctttccccacttccccggctcctgcctcccgccgccgacaccaccaaaaaccctagcagctccaccccgccgccgccgccgccgccatggatgaccctcggatgttcccatcaggatccgacgaccgctccgacgccgaacgccggctgtacaacccgtaccaggacctcaacatgccctacagctaccggacgctctacgacctccccacttcgccggagttcctcttccaggaggaggccctggcgcaacgacgctcgtggggtgagaacctcactttctatacgggcgtcgggtacctctccggcgccgttggcggcgccgtcctgggcctccgcgacgccgccaggggcgctgagcccggggagaccgccaagatccgcgccaaccgcgtgctcaacgcctgcggcagctctggccgccgcgtcgggaatacgctgggcgtcattggcctcatgtacgccgggatcgagagcgccatggtcgcggcccgtgaccgcgacgactggatgaacagcgtcgccgctgggcttggcacgggcacgctcttccgcgccgccaacgggccgcgatccgccgccgtcgcaggcgccctcggtgggatcctagccgccgccgccgcggggggcaagcagctagccaagagatacgtgaatgtcatatgatcgtgttttttttgtggtagcaatgatgagcgaacaatgatatcgtctagtgctctagtagggaaggggtttgccttttctgaaaactagctgagggcttgttcggttctaccccaatccatatggattgaggggtcaaaatcacctccaatccatatcaatcccctccaatccatatggattgaaaataaccgaacaagccctgaatgggaaattttgagcttgcattggaattgcaatgcaacatcgtgcttcaagatgctttagttctgctttgtccttatatgttaagggctagatgaaggtatttttatctccttgtttggatgcacatgtattgtcgtcaatccatttcatgttctc

SEQ ID NO: 10273 - protein, 192 aa, Zea mays subsp. mays
  peptide (1)..(192): Ceres Seq. ID no. 12345529
  misc_feature (54)..(185): Pfam Name: Tim17/Tim22/Tim23 family Pfam Description: Tim17/Tim22/Tim23 family
  misc_feature (54)..(185): Pfam Name: Tim17/Tim22/Tim23 family Pfam Description: Tim17/Tim22/Tim23 family
  misc_feature (54)..(185): Pfam Name: Tim17/Tim22/Tim23 family Pfam Description: Tim17/Tim22/Tim23 family
  misc_feature (54)..(185): Pfam Name: Tim17/Tim22/Tim23 family Pfam Description: Tim17/Tim22/Tim23 family
  misc_feature (1)..(192): Homolog of NCBI NO: 37536126 NR Description: putaive mitochondrial inner membrane protein
  misc_feature (1)..(189): Homolog of NCBI NO: 34902184 NR Description: Putative mitochondrial inner membrane protein
  misc_feature (11)..(191): Homolog of NCBI NO: 15218593 NR Description: inner mitochondrial membrane protein; protein id: supported by cDNA: 6793., supported by cDNA: gi_14596208, by cDNA: gi_18377493, supported by cDNA: gi_603055 [Arabidopsis
  misc_feature (11)..(191): Homolog of NCBI NO: 18394498 NR Description: inner mitochondrial membrane protein, putative; id: At1g17530.1, supported by cDNA: gi_13641345, supported by gi_15010569, supported by cDNA: gi_20147386 [Arabidopsis
  misc_feature (11)..(191): Homolog of NCBI NO: 13641346 NR Description: translocase of inner mitochondrial membrane TIM23
  misc_feature (1)..(189): Homolog of NCBI NO: 34902184 NR Description: Putative mitochondrial inner membrane protein
  misc_feature (11)..(191): Homolog of NCBI NO: 18394498 NR Description: inner mitochondrial membrane protein, putative; id: At1g17530.1, supported by cDNA: gi_13641345, supported by gi_15010569, supported by cDNA: gi_20147386 [Arabidopsis
  misc_feature (11)..(191): Homolog of NCBI NO: 15218593 NR Description: inner mitochondrial membrane protein; protein id: supported by cDNA: 6793., supported by cDNA: gi_14596208, by cDNA: gi_18377493, supported by cDNA: gi_603055 [Arabidopsis
  misc_feature (1)..(189): Homolog of NCBI NO: 34902184 NR Description: Putative mitochondrial inner membrane protein
  misc_feature (1)..(192): Homolog of NCBI NO: 37536126 NR Description: putaive mitochondrial inner membrane protein
  misc_feature (90)..(188): Homolog of NCBI NO: 34394286 NR Description: hypothetical protein [Oryza sativa (japonica
  misc_feature (127)..(189): Homolog of NCBI NO: 12039278 NR Description: putative inner mitochondrial membrane protein
  misc_feature (23)..(187): Homolog of NCBI NO: 19075496 NR Description: putative mitochondrial import inner membrane subunit [Schizosaccharomyces pombe] Probable mitochondrial import inner membrane translocase subunit
  misc_feature (8)..(99): Homolog of NCBI NO: 38344267 NR Description: OSJNBa0005N02.5 [Oryza sativa (japonica
  misc_feature (1)..(191): Homolog of NCBI NO: 15229350 NR Description: putative inner mitochondrial membrane protein; id: At3g04800.1 [Arabidopsis thaliana] putative inner mitochondrial membrane protein [Arabidopsis
  misc_feature (11)..(191): Homolog of NCBI NO: 13641346 NR Description: translocase of inner mitochondrial membrane TIM23
  misc_feature (90)..(188): Homolog of NCBI NO: 34394286 NR Description: hypothetical protein [Oryza sativa (japonica
  misc_feature (127)..(189): Homolog of NCBI NO: 12039278 NR Description: putative inner mitochondrial membrane protein
  misc_feature (23)..(187): Homolog of NCBI NO: 19075496 NR Description: putative mitochondrial import inner membrane subunit [Schizosaccharomyces pombe] Probable mitochondrial import inner membrane translocase subunit
  misc_feature (8)..(99): Homolog of NCBI NO: 38344267 NR Description: OSJNBa0005N02.5 [Oryza sativa (japonica
  misc_feature (1)..(191): Homolog of NCBI NO: 15229350 NR Description: putative inner mitochondrial membrane protein; id: At3g04800.1 [Arabidopsis thaliana] putative inner mitochondrial membrane protein [Arabidopsis
  misc_feature (11)..(191): Homolog of NCBI NO: 13641346 NR Description: translocase of inner mitochondrial membrane TIM23
  misc_feature (11)..(191): Homolog of NCBI NO: 18394498 NR Description: inner mitochondrial membrane protein, putative; id: At1g17530.1, supported by cDNA: gi_13641345, supported by gi_15010569, supported by cDNA: gi_20147386 [Arabidopsis
  misc_feature (11)..(191): Homolog of NCBI NO: 15218593 NR Description: inner mitochondrial membrane protein; protein id: supported by cDNA: 6793., supported by cDNA: gi_14596208, by cDNA: gi_18377493, supported by cDNA: gi_603055 [Arabidopsis
  misc_feature (1)..(189): Homolog of NCBI NO: 34902184 NR Description: Putative mitochondrial inner membrane protein
  misc_feature (1)..(192): Homolog of NCBI NO: 37536126 NR Description: putaive mitochondrial inner membrane protein
  misc_feature (90)..(188): Homolog of NCBI NO: 34394286 NR Description: hypothetical protein [Oryza sativa (japonica
  misc_feature (127)..(189): Homolog of NCBI NO: 12039278 NR Description: putative inner mitochondrial membrane protein
  misc_feature (23)..(187): Homolog of NCBI NO: 19075496 NR Description: putative mitochondrial import inner membrane subunit [Schizosaccharomyces pombe] Probable mitochondrial import inner membrane translocase subunit
  misc_feature (8)..(99): Homolog of NCBI NO: 38344267 NR Description: OSJNBa0005N02.5 [Oryza sativa (japonica
  misc_feature (1)..(191): Homolog of NCBI NO: 15229350 NR Description: putative inner mitochondrial membrane protein; id: At3g04800.1 [Arabidopsis thaliana] putative inner mitochondrial membrane protein [Arabidopsis
  misc_feature (11)..(191): Homolog of NCBI NO: 13641346 NR Description: translocase of inner mitochondrial membrane TIM23
  misc_feature (11)..(191): Homolog of NCBI NO: 18394498 NR Description: inner mitochondrial membrane protein, putative; id: At1g17530.1, supported by cDNA: gi_13641345, supported by gi_15010569, supported by cDNA: gi_20147386 [Arabidopsis
  misc_feature (11)..(191): Homolog of NCBI NO: 15218593 NR Description: inner mitochondrial membrane protein; protein id: supported by cDNA: 6793., supported by cDNA: gi_14596208, by cDNA: gi_18377493, supported by cDNA: gi_603055 [Arabidopsis
  misc_feature (1)..(192): Homolog of NCBI NO: 37536126 NR Description: putaive mitochondrial inner membrane protein
  misc_feature (1)..(191): Homolog of NCBI NO: 15229350 NR Description: putative inner mitochondrial membrane protein; id: At3g04800.1 [Arabidopsis thaliana] putative inner mitochondrial membrane protein [Arabidopsis
  misc_feature (8)..(99): Homolog of NCBI NO: 38344267 NR Description: OSJNBa0005N02.5 [Oryza sativa (japonica
  misc_feature (23)..(187): Homolog of NCBI NO: 19075496 NR Description: putative mitochondrial import inner membrane subunit [Schizosaccharomyces pombe] Probable mitochondrial import inner membrane translocase subunit
  misc_feature (127)..(189): Homolog of NCBI NO: 12039278 NR Description: putative inner mitochondrial membrane protein
  misc_feature (90)..(188): Homolog of NCBI NO: 34394286 NR Description: hypothetical protein [Oryza sativa (japonica
MDDPRMFPSGSDDRSDAERRLYNPYQDLNMPYSYRTLYDLPTSPEFLFQEEALAQRRSWGENLTFYTGVGYLSGAVGGAVLGLRDAARGAEPGETAKIRANRVLNACGSSGRRVGNTLGVIGLMYAGIESAMVAARDRDDWMNSVAAGLGTGTLFRAANGPRSAAVAGALGGILAAAAAGGKQLAKRYVNVI

SEQ ID NO: 10274 - protein, 187 aa, Zea mays subsp. mays
  peptide (1)..(187): Ceres Seq. ID no. 12345530
  misc_feature (49)..(180): Pfam Name: Tim17/Tim22/Tim23 family Pfam Description: Tim17/Tim22/Tim23 family
  misc_feature (49)..(180): Pfam Name: Tim17/Tim22/Tim23 family Pfam Description: Tim17/Tim22/Tim23 family
  misc_feature (49)..(180): Pfam Name: Tim17/Tim22/Tim23 family Pfam Description: Tim17/Tim22/Tim23 family
  misc_feature (49)..(180): Pfam Name: Tim17/Tim22/Tim23 family Pfam Description: Tim17/Tim22/Tim23 family
  misc_feature (1)..(187): Homolog of NCBI NO: 37536126 NR Description: putaive mitochondrial inner membrane protein
  misc_feature (1)..(184): Homolog of NCBI NO: 34902184 NR Description: Putative mitochondrial inner membrane protein
  misc_feature (6)..(186): Homolog of NCBI NO: 15218593 NR Description: inner mitochondrial membrane protein; protein id: supported by cDNA: 6793., supported by cDNA: gi_14596208, by cDNA: gi_18377493, supported by cDNA: gi_603055 [Arabidopsis
  misc_feature (6)..(186): Homolog of NCBI NO: 18394498 NR Description: inner mitochondrial membrane protein, putative; id: At1g17530.1, supported by cDNA: gi_13641345, supported by gi_15010569, supported by cDNA: gi_20147386 [Arabidopsis
  misc_feature (6)..(186): Homolog of NCBI NO: 13641346 NR Description: translocase of inner mitochondrial membrane TIM23
  misc_feature (1)..(184): Homolog of NCBI NO: 34902184 NR Description: Putative mitochondrial inner membrane protein
  misc_feature (6)..(186): Homolog of NCBI NO: 18394498 NR Description: inner mitochondrial membrane protein, putative; id: At1g17530.1, supported by cDNA: gi_13641345, supported by gi_15010569, supported by cDNA: gi_20147386 [Arabidopsis
  misc_feature (1)..(184): Homolog of NCBI NO: 34902184 NR Description: Putative mitochondrial inner membrane protein
  misc_feature (1)..(187): Homolog of NCBI NO: 37536126 NR Description: putaive mitochondrial inner membrane protein
  misc_feature (85)..(183): Homolog of NCBI NO: 34394286 NR Description: hypothetical protein [Oryza sativa (japonica
  misc_feature (85)..(183): Homolog of NCBI NO: 34394286 NR Description: hypothetical protein [Oryza sativa (japonica
  misc_feature (122)..(184): Homolog of NCBI NO: 12039278 NR Description: putative inner mitochondrial membrane protein
  misc_feature (18)..(182): Homolog of NCBI NO: 19075496 NR Description: putative mitochondrial import inner membrane subunit [Schizosaccharomyces pombe] Probable mitochondrial import inner membrane translocase subunit
  misc_feature (3)..(94): Homolog of NCBI NO: 38344267 NR Description: OSJNBa0005N02.5 [Oryza sativa (japonica
  misc_feature (1)..(186): Homolog of NCBI NO: 15229350 NR Description: putative inner mitochondrial membrane protein; id: At3g04800.1 [Arabidopsis thaliana] putative inner mitochondrial membrane protein [Arabidopsis
  misc_feature (6)..(186): Homolog of NCBI NO: 13641346 NR Description: translocase of inner mitochondrial membrane TIM23
  misc_feature (122)..(184): Homolog of NCBI NO: 12039278 NR Description: putative inner mitochondrial membrane protein
  misc_feature (18)..(182): Homolog of NCBI NO: 19075496 NR Description: putative mitochondrial import inner membrane subunit [Schizosaccharomyces pombe] Probable mitochondrial import inner membrane translocase subunit
  misc_feature (3)..(94): Homolog of NCBI NO: 38344267 NR Description: OSJNBa0005N02.5 [Oryza sativa (japonica
  misc_feature (1)..(186): Homolog of NCBI NO: 15229350 NR Description: putative inner mitochondrial membrane protein; id: At3g04800.1 [Arabidopsis thaliana] putative inner mitochondrial membrane protein [Arabidopsis
  misc_feature (6)..(186): Homolog of NCBI NO: 13641346 NR Description: translocase of inner mitochondrial membrane TIM23
  misc_feature (6)..(186): Homolog of NCBI NO: 18394498 NR Description: inner mitochondrial membrane protein, putative; id: At1g17530.1, supported by cDNA: gi_13641345, supported by gi_15010569, supported by cDNA: gi_20147386 [Arabidopsis
  misc_feature (6)..(186): Homolog of NCBI NO: 15218593 NR Description: inner mitochondrial membrane protein; protein id: supported by cDNA: 6793., supported by cDNA: gi_14596208, by cDNA: gi_18377493, supported by cDNA: gi_603055 [Arabidopsis
  misc_feature (1)..(184): Homolog of NCBI NO: 34902184 NR Description: Putative mitochondrial inner membrane protein
  misc_feature (1)..(187): Homolog of NCBI NO: 37536126 NR Description: putaive mitochondrial inner membrane protein
  misc_feature (85)..(183): Homolog of NCBI NO: 34394286 NR Description: hypothetical protein [Oryza sativa (japonica
  misc_feature (122)..(184): Homolog of NCBI NO: 12039278 NR Description: putative inner mitochondrial membrane protein
  misc_feature (18)..(182): Homolog of NCBI NO: 19075496 NR Description: putative mitochondrial import inner membrane subunit [Schizosaccharomyces pombe] Probable mitochondrial import inner membrane translocase subunit
  misc_feature (3)..(94): Homolog of NCBI NO: 38344267 NR Description: OSJNBa0005N02.5 [Oryza sativa (japonica
  misc_feature (1)..(186): Homolog of NCBI NO: 15229350 NR Description: putative inner mitochondrial membrane protein; id: At3g04800.1 [Arabidopsis thaliana] putative inner mitochondrial membrane protein [Arabidopsis
  misc_feature (6)..(186): Homolog of NCBI NO: 13641346 NR Description: translocase of inner mitochondrial membrane TIM23
  misc_feature (6)..(186): Homolog of NCBI NO: 18394498 NR Description: inner mitochondrial membrane protein, putative; id: At1g17530.1, supported by cDNA: gi_13641345, supported by gi_15010569, supported by cDNA: gi_20147386 [Arabidopsis
  misc_feature (6)..(186): Homolog of NCBI NO: 15218593 NR Description: inner mitochondrial membrane protein; protein id: supported by cDNA: 6793., supported by cDNA: gi_14596208, by cDNA: gi_18377493, supported by cDNA: gi_603055 [Arabidopsis
  misc_feature (6)..(186): Homolog of NCBI NO: 15218593 NR Description: inner mitochondrial membrane protein; protein id: supported by cDNA: 6793., supported by cDNA: gi_14596208, by cDNA: gi_18377493, supported by cDNA: gi_603055 [Arabidopsis
  misc_feature (1)..(187): Homolog of NCBI NO: 37536126 NR Description: putaive mitochondrial inner membrane protein
  misc_feature (1)..(186): Homolog of NCBI NO: 15229350 NR Description: putative inner mitochondrial membrane protein; id: At3g04800.1 [Arabidopsis thaliana] putative inner mitochondrial membrane protein [Arabidopsis
  misc_feature (3)..(94): Homolog of NCBI NO: 38344267 NR Description: OSJNBa0005N02.5 [Oryza sativa (japonica
  misc_feature (18)..(182): Homolog of NCBI NO: 19075496 NR Description: putative mitochondrial import inner membrane subunit [Schizosaccharomyces pombe] Probable mitochondrial import inner membrane translocase subunit
  misc_feature (122)..(184): Homolog of NCBI NO: 12039278 NR Description: putative inner mitochondrial membrane protein
  misc_feature (85)..(183): Homolog of NCBI NO: 34394286 NR Description: hypothetical protein [Oryza sativa (japonica
MFPSGSDDRSDAERRLYNPYQDLNMPYSYRTLYDLPTSPEFLFQEEALAQRRSWGENLTFYTGVGYLSGAVGGAVLGLRDAARGAEPGETAKIRANRVLNACGSSGRRVGNTLGVIGLMYAGIESAMVAARDRDDWMNSVAAGLGTGTLFRAANGPRSAAVAGALGGILAAAAAGGKQLAKRYVNVI

SEQ ID NO: 10275 - protein, 177 aa, Zea mays subsp. mays
  peptide (1)..(177): Ceres Seq. ID no. 12345531
  misc_feature (21)..(121): Pfam Name: Mucin-like glycoprotein Pfam Description: Mucin-like glycoprotein
  misc_feature (21)..(121): Pfam Name: Mucin-like glycoprotein Pfam Description: Mucin-like glycoprotein
  misc_feature (21)..(121): Pfam Name: Mucin-like glycoprotein Pfam Description: Mucin-like glycoprotein
  misc_feature (21)..(121): Pfam Name: Mucin-like glycoprotein Pfam Description: Mucin-like glycoprotein
  misc_feature (3)..(177): Homolog of NCBI NO: 27375632 NR Description: blr0521 [Bradyrhizobium japonicum]
  misc_feature (3)..(177): Homolog of NCBI NO: 27375632 NR Description: blr0521 [Bradyrhizobium japonicum]
  misc_feature (3)..(177): Homolog of NCBI NO: 27375632 NR Description: blr0521 [Bradyrhizobium japonicum]
  misc_feature (3)..(177): Homolog of NCBI NO: 27375632 NR Description: blr0521 [Bradyrhizobium japonicum]
  misc_feature (9)..(177): Homolog of NCBI NO: 186396 NR Description: mucin
  misc_feature (9)..(177): Homolog of NCBI NO: 188864 NR Description: mucin
  misc_feature (9)..(177): Homolog of NCBI NO: 186396 NR Description: mucin
  misc_feature (9)..(177): Homolog of NCBI NO: 188864 NR Description: mucin
  misc_feature (9)..(177): Homolog of NCBI NO: 186396 NR Description: mucin
  misc_feature (9)..(177): Homolog of NCBI NO: 188864 NR Description: mucin
  misc_feature (9)..(177): Homolog of NCBI NO: 188864 NR Description: mucin
  misc_feature (9)..(177): Homolog of NCBI NO: 186396 NR Description: mucin
KNAPLPFLSPLPRLLPPAADTTKNPSSSTPPPPPPPWMTLGCSHQDPTTAPTPNAGCTTRTRTSTCPTATGRSTTSPLRRSSSSRRRPWRNDARGVRTSLSIRASGTSPAPLAAPSWASATPPGALSPGRPPRSAPTACSTPAAALAAASGIRWASLASCTPGSRAPWSRPVTATTG

SEQ ID NO: 10276 - DNA, 1049 bp, Zea mays subsp. mays; identical to SEQ ID NO: 10272
  misc_feature (1)..(1049): Ceres Seq. ID no. 12345528
  misc_feature: MA Experiment ID: 108527 Result: Up-regulated in Transcription
  misc_feature: MA Experiment 108527 PARAMETER Experiment Name: Zm_5mM_NO_P Parameter: Age (day) Value: 8
  misc_feature: MA Experiment 108527 PARAMETER Experiment Name: Zm_5mM_NO_P Parameter: Organism Value: Zea mays
  misc_feature: MA Experiment 108527 PARAMETER Experiment Name: Zm_5mM_NO_P Parameter: Plant Line Value: 35A19
  misc_feature: MA Experiment 108527 PARAMETER Experiment Name: Zm_5mM_NO_P Parameter: Timepoint (hr) Value: 6
  misc_feature: MA Experiment 108527 PARAMETER Experiment Name: Zm_5mM_NO_P Parameter: Tissue Value: Aerial
  misc_feature: MA Experiment 108527 PARAMETER Experiment Name: Zm_5mM_NO_P Parameter: Treatment Value: 5mM NO vs. No Treatment
  misc_feature: MA Experiment ID: 108535 Result: Up-regulated in Transcription
  misc_feature: MA Experiment 108535 PARAMETER Experiment Name: Zm_Meristem_P Parameter: Age (day) Value: 8
  misc_feature: MA Experiment 108535 PARAMETER Experiment Name: Zm_Meristem_P Parameter: Organism Value: Zea mays
  misc_feature: MA Experiment 108535 PARAMETER Experiment Name: Zm_Meristem_P Parameter: Plant Line Value: 35A19
  misc_feature: MA Experiment 108535 PARAMETER Experiment Name: Zm_Meristem_P Parameter: Tissue Value: Root Meristem vs. Above Root Meristem
  misc_feature: MA Experiment ID: 108543 Result: Down-regulated in Transcription
  misc_feature: MA Experiment ID: 108544 Result: Down-regulated in Transcription
  misc_feature: MA Experiment ID: 108547 Result: Down-regulated in Transcription
  misc_feature: MA Experiment 108547 PARAMETER Experiment Name: Zm_Imbibed_Seeds_P Parameter: Age (day) Value: 4 vs. 2
  misc_feature: MA Experiment 108547 PARAMETER Experiment Name: Zm_Imbibed_Seeds_P Parameter: Organism Value: Zea mays
  misc_feature: MA Experiment 108547 PARAMETER Experiment Name: Zm_Imbibed_Seeds_P Parameter: Plant Line Value: 35A19
  misc_feature: MA Experiment 108547 PARAMETER Experiment Name: Zm_Imbibed_Seeds_P Parameter: Tissue Value: Aerial vs. Embryo
  misc_feature: MA Experiment ID: 20000487 Result: Up-regulated in Transcription
  misc_feature: MA Experiment 20000487 PARAMETER Experiment Name: Zm_50mM_NH4NO3_L_to_H_P Parameter: Organism Value: Zea mays
  misc_feature: MA Experiment 20000487 PARAMETER Experiment Name: Zm_50mM_NH4NO3_L_to_H_P Parameter: Timepoint (hr) Value: 4
  misc_feature: MA Experiment 20000487 PARAMETER Experiment Name: Zm_50mM_NH4NO3_L_to_H_P Parameter: Tissue Value: Leaves
  misc_feature: MA Experiment 20000487 PARAMETER Experiment Name: Zm_50mM_NH4NO3_L_to_H_P Parameter: Treatment Value: 50mM NH4NO3 vs. 100mM Mannitol
  misc_feature: MA Experiment ID: 20000488 Result: Up-regulated in Transcription
  misc_feature: MA Experiment 20000488 PARAMETER Experiment Name: Zm_50mM_NH4NO3_L_to_H_P Parameter: Organism Value: Zea mays
  misc_feature: MA Experiment 20000488 PARAMETER Experiment Name: Zm_50mM_NH4NO3_L_to_H_P Parameter: Timepoint (hr) Value: 8
  misc_feature: MA Experiment 20000488 PARAMETER Experiment Name: Zm_50mM_NH4NO3_L_to_H_P Parameter: Tissue Value: Leaves
  misc_feature: MA Experiment 20000488 PARAMETER Experiment Name: Zm_50mM_NH4NO3_L_to_H_P Parameter: Treatment Value: 50mM NH4NO3 vs. 100mM Mannitol
  misc_feature: MA Experiment ID: 20000626 Result: Up-regulated in Transcription
  misc_feature: MA Experiment 20000626 PARAMETER Experiment Name: Zm_Herbicide-Treatments_P Parameter: Timepoint (hr) Value: 12
  misc_feature: MA Experiment 20000626 PARAMETER Experiment Name: Zm_Herbicide-Treatments_P Parameter: Tissue Value: Aerial
  misc_feature: MA Experiment 20000626 PARAMETER Experiment Name: Zm_Herbicide-Treatments_P Parameter: Treatment Value: Roundup vs. No Treatment

SEQ ID NO: 10277 - protein, 192 aa, Zea mays subsp. mays; identical to SEQ ID NO: 10273
  peptide (1)..(192): Ceres Seq. ID no. 12345529
  misc_feature (54)..(185): Pfam Name: Tim17/Tim22/Tim23 family Pfam Description: Tim17/Tim22/Tim23 family
  misc_feature (54)..(185): Pfam Name: Tim17/Tim22/Tim23 family Pfam Description: Tim17/Tim22/Tim23 family
  misc_feature (54)..(185): Pfam Name: Tim17/Tim22/Tim23 family Pfam Description: Tim17/Tim22/Tim23 family
  misc_feature (54)..(185): Pfam Name: Tim17/Tim22/Tim23 family Pfam Description: Tim17/Tim22/Tim23 family
  misc_feature (1)..(192): Homolog of NCBI NO: 37536126 NR Description: putaive mitochondrial inner membrane protein
  misc_feature (1)..(189): Homolog of NCBI NO: 34902184 NR Description: Putative mitochondrial inner membrane protein
  misc_feature (11)..(191): Homolog of NCBI NO: 15218593 NR Description: inner mitochondrial membrane protein; protein id: supported by cDNA: 6793., supported by cDNA: gi_14596208, by cDNA: gi_18377493, supported by cDNA: gi_603055 [Arabidopsis
  misc_feature (11)..(191): Homolog of NCBI NO: 18394498 NR Description: inner mitochondrial membrane protein, putative; id: At1g17530.1, supported by cDNA: gi_13641345, supported by gi_15010569, supported by cDNA: gi_20147386 [Arabidopsis
  misc_feature (11)..(191): Homolog of NCBI NO: 13641346 NR Description: translocase of inner mitochondrial membrane TIM23
  misc_feature (1)..(189): Homolog of NCBI NO: 34902184 NR Description: Putative mitochondrial inner membrane protein
  misc_feature (11)..(191): Homolog of NCBI NO: 18394498 NR Description: inner mitochondrial membrane protein, putative; id: At1g17530.1, supported by cDNA: gi_13641345, supported by gi_15010569, supported by cDNA: gi_20147386 [Arabidopsis
  misc_feature (11)..(191): Homolog of NCBI NO: 15218593 NR Description: inner mitochondrial membrane protein; protein id: supported by cDNA: 6793., supported by cDNA: gi_14596208, by cDNA: gi_18377493, supported by cDNA: gi_603055 [Arabidopsis
  misc_feature (1)..(189): Homolog of NCBI NO: 34902184 NR Description: Putative mitochondrial inner membrane protein
  misc_feature (1)..(192): Homolog of NCBI NO: 37536126 NR Description: putaive mitochondrial inner membrane protein
  misc_feature (90)..(188): Homolog of NCBI NO: 34394286 NR Description: hypothetical protein [Oryza sativa (japonica
  misc_feature (127)..(189): Homolog of NCBI NO: 12039278 NR Description: putative inner mitochondrial membrane protein
  misc_feature (23)..(187): Homolog of NCBI NO: 19075496 NR Description: putative mitochondrial import inner membrane subunit [Schizosaccharomyces pombe] Probable mitochondrial import inner membrane translocase subunit
  misc_feature (8)..(99): Homolog of NCBI NO: 38344267 NR Description: OSJNBa0005N02.5 [Oryza sativa (japonica
  misc_feature (1)..(191): Homolog of NCBI NO: 15229350 NR Description: putative inner mitochondrial membrane protein; id: At3g04800.1 [Arabidopsis thaliana] putative inner mitochondrial membrane protein [Arabidopsis
  misc_feature (11)..(191): Homolog of NCBI NO: 13641346 NR Description: translocase of inner mitochondrial membrane TIM23
  misc_feature (90)..(188): Homolog of NCBI NO: 34394286 NR Description: hypothetical protein [Oryza sativa (japonica
  misc_feature (127)..(189): Homolog of NCBI NO: 12039278 NR Description: putative inner mitochondrial membrane protein
  misc_feature (23)..(187): Homolog of NCBI NO: 19075496 NR Description: putative mitochondrial import inner membrane subunit [Schizosaccharomyces pombe] Probable mitochondrial import inner membrane translocase subunit
  misc_feature (8)..(99): Homolog of NCBI NO: 38344267 NR Description: OSJNBa0005N02.5 [Oryza sativa (japonica
  misc_feature (1)..(191): Homolog of NCBI NO: 15229350 NR Description: putative inner mitochondrial membrane protein; id: At3g04800.1 [Arabidopsis thaliana] putative inner mitochondrial membrane protein [Arabidopsis
  misc_feature (11)..(191): Homolog of NCBI NO: 13641346 NR Description: translocase of inner mitochondrial membrane TIM23
  misc_feature (11)..(191): Homolog of NCBI NO: 18394498 NR Description: inner mitochondrial membrane protein, putative; id: At1g17530.1, supported by cDNA: gi_13641345, supported by gi_15010569, supported by cDNA: gi_20147386 [Arabidopsis
  misc_feature (11)..(191): Homolog of NCBI NO: 15218593 NR Description: inner mitochondrial membrane protein; protein id: supported by cDNA: 6793., supported by cDNA: gi_14596208, by cDNA: gi_18377493, supported by cDNA: gi_603055 [Arabidopsis
  misc_feature (1)..(189): Homolog of NCBI NO: 34902184 NR Description: Putative mitochondrial inner membrane protein
  misc_feature (1)..(192): Homolog of NCBI NO: 37536126 NR Description: putaive mitochondrial inner membrane protein
  misc_feature (90)..(188): Homolog of NCBI NO: 34394286 NR Description: hypothetical protein [Oryza sativa (japonica
  misc_feature (127)..(189): Homolog of NCBI NO: 12039278 NR Description: putative inner mitochondrial membrane protein
  misc_feature (23)..(187): Homolog of NCBI NO: 19075496 NR Description: putative mitochondrial import inner membrane subunit [Schizosaccharomyces pombe] Probable mitochondrial import inner membrane translocase subunit
  misc_feature (8)..(99): Homolog of NCBI NO: 38344267 NR Description: OSJNBa0005N02.5 [Oryza sativa (japonica
  misc_feature (1)..(191): Homolog of NCBI NO: 15229350 NR Description: putative inner mitochondrial membrane protein; id: At3g04800.1 [Arabidopsis thaliana] putative inner mitochondrial membrane protein [Arabidopsis
  misc_feature (11)..(191): Homolog of NCBI NO: 13641346 NR Description: translocase of inner mitochondrial membrane TIM23
  misc_feature (11)..(191): Homolog of NCBI NO: 18394498 NR Description: inner mitochondrial membrane protein, putative; id: At1g17530.1, supported by cDNA: gi_13641345, supported by gi_15010569, supported by cDNA: gi_20147386 [Arabidopsis
  misc_feature (11)..(191): Homolog of NCBI NO: 15218593 NR Description: inner mitochondrial membrane protein; protein id: supported by cDNA: 6793., supported by cDNA: gi_14596208, by cDNA: gi_18377493, supported by cDNA: gi_603055 [Arabidopsis
  misc_feature (1)..(192): Homolog of NCBI NO: 37536126 NR Description: putaive mitochondrial inner membrane protein
  misc_feature (1)..(191): Homolog of NCBI NO: 15229350 NR Description: putative inner mitochondrial membrane protein; id: At3g04800.1 [Arabidopsis thaliana] putative inner mitochondrial membrane protein [Arabidopsis
  misc_feature (8)..(99): Homolog of NCBI NO: 38344267 NR Description: OSJNBa0005N02.5 [Oryza sativa (japonica
  misc_feature (23)..(187): Homolog of NCBI NO: 19075496 NR Description: putative mitochondrial import inner membrane subunit [Schizosaccharomyces pombe] Probable mitochondrial import inner membrane translocase subunit
  misc_feature (127)..(189): Homolog of NCBI NO: 12039278 NR Description: putative inner mitochondrial membrane protein
  misc_feature (90)..(188): Homolog of NCBI NO: 34394286 NR Description: hypothetical protein [Oryza sativa (japonica

SEQ ID NO: 10278 - protein, 187 aa, Zea mays subsp. mays; identical to SEQ ID NO: 10274
  peptide (1)..(187): Ceres Seq. ID no. 12345530
  misc_feature (49)..(180): Pfam Name: Tim17/Tim22/Tim23 family Pfam Description: Tim17/Tim22/Tim23 family
  misc_feature (49)..(180): Pfam Name: Tim17/Tim22/Tim23 family Pfam Description: Tim17/Tim22/Tim23 family
  misc_feature (49)..(180): Pfam Name: Tim17/Tim22/Tim23 family Pfam Description: Tim17/Tim22/Tim23 family
  misc_feature (49)..(180): Pfam Name: Tim17/Tim22/Tim23 family Pfam Description: Tim17/Tim22/Tim23 family
  misc_feature (1)..(187): Homolog of NCBI NO: 37536126 NR Description: putaive mitochondrial inner membrane protein
  misc_feature (1)..(184): Homolog of NCBI NO: 34902184 NR Description: Putative mitochondrial inner membrane protein
  misc_feature (6)..(186): Homolog of NCBI NO: 15218593 NR Description: inner mitochondrial membrane protein; protein id: supported by cDNA: 6793., supported by cDNA: gi_14596208, by cDNA: gi_18377493, supported by cDNA: gi_603055 [Arabidopsis
  misc_feature (6)..(186): Homolog of NCBI NO: 18394498 NR Description: inner mitochondrial membrane protein, putative; id: At1g17530.1, supported by cDNA: gi_13641345, supported by gi_15010569, supported by cDNA: gi_20147386 [Arabidopsis
  misc_feature (6)..(186): Homolog of NCBI NO: 13641346 NR Description: translocase of inner mitochondrial membrane TIM23
  misc_feature (1)..(184): Homolog of NCBI NO: 34902184 NR Description: Putative mitochondrial inner membrane protein
  misc_feature (6)..(186): Homolog of NCBI NO: 18394498 NR Description: inner mitochondrial membrane protein, putative; id: At1g17530.1, supported by cDNA: gi_13641345, supported by gi_15010569, supported by cDNA: gi_20147386 [Arabidopsis
  misc_feature (1)..(184): Homolog of NCBI NO: 34902184 NR Description: Putative mitochondrial inner membrane protein
  misc_feature (1)..(187): Homolog of NCBI NO: 37536126 NR Description: putaive mitochondrial inner membrane protein
  misc_feature (85)..(183): Homolog of NCBI NO: 34394286 NR Description: hypothetical protein [Oryza sativa (japonica
  misc_feature (85)..(183): Homolog of NCBI NO: 34394286 NR Description: hypothetical protein [Oryza sativa (japonica
  misc_feature (122)..(184): Homolog of NCBI NO: 12039278 NR Description: putative inner mitochondrial membrane protein
  misc_feature (18)..(182): Homolog of NCBI NO: 19075496 NR Description: putative mitochondrial import inner membrane subunit [Schizosaccharomyces pombe] Probable mitochondrial import inner membrane translocase subunit
  misc_feature (3)..(94): Homolog of NCBI NO: 38344267 NR Description: OSJNBa0005N02.5 [Oryza sativa (japonica
  misc_feature (1)..(186): Homolog of NCBI NO: 15229350 NR Description: putative inner mitochondrial membrane protein; id: At3g04800.1 [Arabidopsis thaliana] putative inner mitochondrial membrane protein [Arabidopsis
  misc_feature (6)..(186): Homolog of NCBI NO: 13641346 NR Description: translocase of inner mitochondrial membrane TIM23
  misc_feature (122)..(184): Homolog of NCBI NO: 12039278 NR Description: putative inner mitochondrial membrane protein
  misc_feature (18)..(182): Homolog of NCBI NO: 19075496 NR Description: putative mitochondrial import inner membrane subunit [Schizosaccharomyces pombe] Probable mitochondrial import inner membrane translocase subunit
  misc_feature (3)..(94): Homolog of NCBI NO: 38344267 NR Description: OSJNBa0005N02.5 [Oryza sativa (japonica
  misc_feature (1)..(186): Homolog of NCBI NO: 15229350 NR Description: putative inner mitochondrial membrane protein; id: At3g04800.1 [Arabidopsis thaliana] putative inner mitochondrial membrane protein [Arabidopsis
  misc_feature (6)..(186): Homolog of NCBI NO: 13641346 NR Description: translocase of inner mitochondrial membrane TIM23
  misc_feature (6)..(186): Homolog of NCBI NO: 18394498 NR Description: inner mitochondrial membrane protein, putative; id: At1g17530.1, supported by cDNA: gi_13641345, supported by gi_15010569, supported by cDNA: gi_20147386 [Arabidopsis
  misc_feature (6)..(186): Homolog of NCBI NO: 15218593 NR Description: inner mitochondrial membrane protein; protein id: supported by cDNA: 6793., supported by cDNA: gi_14596208, by cDNA: gi_18377493, supported by cDNA: gi_603055 [Arabidopsis
  misc_feature (1)..(184): Homolog of NCBI NO: 34902184 NR Description: Putative mitochondrial inner membrane protein
  misc_feature (1)..(187): Homolog of NCBI NO: 37536126 NR Description: putaive mitochondrial inner membrane protein
  misc_feature (85)..(183): Homolog of NCBI NO: 34394286 NR Description: hypothetical protein [Oryza sativa (japonica
  misc_feature (122)..(184): Homolog of NCBI NO: 12039278 NR Description: putative inner mitochondrial membrane protein
  misc_feature (18)..(182): Homolog of NCBI NO: 19075496 NR Description: putative mitochondrial import inner membrane subunit [Schizosaccharomyces pombe] Probable mitochondrial import inner membrane translocase subunit
  misc_feature (3)..(94): Homolog of NCBI NO: 38344267 NR Description: OSJNBa0005N02.5 [Oryza sativa (japonica
  misc_feature (1)..(186): Homolog of NCBI NO: 15229350 NR Description: putative inner mitochondrial membrane protein; id: At3g04800.1 [Arabidopsis thaliana] putative inner mitochondrial membrane protein [Arabidopsis
  misc_feature (6)..(186): Homolog of NCBI NO: 13641346 NR Description: translocase of inner mitochondrial membrane TIM23
  misc_feature (6)..(186): Homolog of NCBI NO: 18394498 NR Description: inner mitochondrial membrane protein, putative; id: At1g17530.1, supported by cDNA: gi_13641345, supported by gi_15010569, supported by cDNA: gi_20147386 [Arabidopsis
  misc_feature (6)..(186): Homolog of NCBI NO: 15218593 NR Description: inner mitochondrial membrane protein; protein id: supported by cDNA: 6793., supported by cDNA: gi_14596208, by cDNA: gi_18377493, supported by cDNA: gi_603055 [Arabidopsis
  misc_feature (6)..(186): Homolog of NCBI NO: 15218593 NR Description: inner mitochondrial membrane protein; protein id: supported by cDNA: 6793., supported by cDNA: gi_14596208, by cDNA: gi_18377493, supported by cDNA: gi_603055 [Arabidopsis
  misc_feature (1)..(187): Homolog of NCBI NO: 37536126 NR Description: putaive mitochondrial inner membrane protein
  misc_feature (1)..(186): Homolog of NCBI NO: 15229350 NR Description: putative inner mitochondrial membrane protein; id: At3g04800.1 [Arabidopsis thaliana] putative inner mitochondrial membrane protein [Arabidopsis
  misc_feature (3)..(94): Homolog of NCBI NO: 38344267 NR Description: OSJNBa0005N02.5 [Oryza sativa (japonica
  misc_feature (18)..(182): Homolog of NCBI NO: 19075496 NR Description: putative mitochondrial import inner membrane subunit [Schizosaccharomyces pombe] Probable mitochondrial import inner membrane translocase subunit
  misc_feature (122)..(184): Homolog of NCBI NO: 12039278 NR Description: putative inner mitochondrial membrane protein
  misc_feature (85)..(183): Homolog of NCBI NO: 34394286 NR Description: hypothetical protein [Oryza sativa (japonica

SEQ ID NO: 10279 - protein, 177 aa, Zea mays subsp. mays; identical to SEQ ID NO: 10275
  peptide (1)..(177): Ceres Seq. ID no. 12345531
  misc_feature (21)..(121): Pfam Name: Mucin-like glycoprotein Pfam Description: Mucin-like glycoprotein
  misc_feature (21)..(121): Pfam Name: Mucin-like glycoprotein Pfam Description: Mucin-like glycoprotein
  misc_feature (21)..(121): Pfam Name: Mucin-like glycoprotein Pfam Description: Mucin-like glycoprotein
  misc_feature (21)..(121): Pfam Name: Mucin-like glycoprotein Pfam Description: Mucin-like glycoprotein
  misc_feature (3)..(177): Homolog of NCBI NO: 27375632 NR Description: blr0521 [Bradyrhizobium japonicum]
  misc_feature (3)..(177): Homolog of NCBI NO: 27375632 NR Description: blr0521 [Bradyrhizobium japonicum]
  misc_feature (3)..(177): Homolog of NCBI NO: 27375632 NR Description: blr0521 [Bradyrhizobium japonicum]
  misc_feature (3)..(177): Homolog of NCBI NO: 27375632 NR Description: blr0521 [Bradyrhizobium japonicum]
  misc_feature (9)..(177): Homolog of NCBI NO: 186396 NR Description: mucin
  misc_feature (9)..(177): Homolog of NCBI NO: 188864 NR Description: mucin
  misc_feature (9)..(177): Homolog of NCBI NO: 186396 NR Description: mucin
  misc_feature (9)..(177): Homolog of NCBI NO: 188864 NR Description: mucin
  misc_feature (9)..(177): Homolog of NCBI NO: 186396 NR Description: mucin
  misc_feature (9)..(177): Homolog of NCBI NO: 188864 NR Description: mucin
  misc_feature (9)..(177): Homolog of NCBI NO: 188864 NR Description: mucin
  misc_feature (9)..(177): Homolog of NCBI NO: 186396 NR Description: mucin

SEQ ID NO: 10280 - DNA, 724 bp, Zea mays subsp. mays
  misc_feature (1)..(724): Ceres Seq. ID no. 12400535
  misc_feature: MA Experiment ID: 108535 Result: Down-regulated in Transcription
  misc_feature: MA Experiment 108535 PARAMETER Experiment Name: Zm_Meristem_P Parameter: Age (day) Value: 8
  misc_feature: MA Experiment 108535 PARAMETER Experiment Name: Zm_Meristem_P Parameter: Organism Value: Zea mays
  misc_feature: MA Experiment 108535 PARAMETER Experiment Name: Zm_Meristem_P Parameter: Plant Line Value: 35A19
  misc_feature: MA Experiment 108535 PARAMETER Experiment Name: Zm_Meristem_P Parameter: Tissue Value: Root Meristem vs. Above Root Meristem
  misc_feature: MA Experiment ID: 20000535 Result: Down-regulated in Transcription
  misc_feature: MA Experiment 20000535 PARAMETER Experiment Name: Zm_Hybrid_Seed_Dev_P Parameter: DAP Value: 30 vs. 12
  misc_feature: MA Experiment 20000535 PARAMETER Experiment Name: Zm_Hybrid_Seed_Dev_P Parameter: Organism Value: Zea mays
  misc_feature: MA Experiment 20000535 PARAMETER Experiment Name: Zm_Hybrid_Seed_Dev_P Parameter: Plant Line Value: 35A19
  misc_feature: MA Experiment 20000535 PARAMETER Experiment Name: Zm_Hybrid_Seed_Dev_P Parameter: Tissue Value: Embryo vs. Unfert Floret
aacataccgcctgtccacctgcgctcttcccgttccccaactgcaagtctgcaacatcctctctctctctctacctgccccgttcctcaccaaacttgtcgccctcgtcgacttgtgagtctcttccgccggcgtcgacgagagctgcgctaggtgatctcgactgcttcctcgccccccatggcgacggcgctcaaatcgttcctgaacagccccgtcggccccaagaccacccacttctggggccctgtcgccaactggggcttcgtcatcgcgggtttggttgacatgaacaagcctcctgaaatgatatctggcaatatgacagcagccatgtgtgtgtattctggactctttatgaggtttgcatggatggtacagccccgaaattatttgcttctagcatgccatgcttccaatgaaagcgtccagctctatcagttatctcgctgggctaggtctcaggggtacctggataagaaagagccagaggccaaacagtaaagagggtatccaacactggagtcatttgttcaataaagaaaatatgctgtggaaaacattcattctgttgccaatgcagttttttttgtatgtttgcaaaatatgctgaggaaatttcatgatacctagcgcagttacaagcgtctgcttacttttatgtgcatttgtcaagacacatttgttttttacattgctgccttcctactatttggcactattt

SEQ ID NO: 10281 - protein, 107 aa, Zea mays subsp. mays
  peptide (1)..(107): Ceres Seq. ID no. 12400536
  misc_feature (1)..(106): Pfam Name: Uncharacterised protein family (UPF0041) Pfam Description: Uncharacterised protein family (UPF0041)
  misc_feature (1)..(106): Homolog of NCBI NO: 15241266 NR Description: putative protein; protein id: At5g20090.1, by cDNA: 17786., supported by cDNA: gi_15028276, supported by gi_15293008, supported by cDNA: gi_19310836 [Arabidopsis
  misc_feature (17)..(90): Homolog of NCBI NO: 4929727 NR Description: CGI-129 protein [Homo sapiens]
  misc_feature (17)..(90): Homolog of NCBI NO: 7706369 NR Description: brain protein 44-like; HSPC040 protein [Homo
  misc_feature (17)..(105): Homolog of NCBI NO: 12852262 NR Description: unnamed protein product [Mus musculus]
  misc_feature (17)..(98): Homolog of NCBI NO: 17554512 NR Description: Uncharacterised protein family (UPF0041) elegans] >gi|2833311|sp|Q21828|YNFD_CAEEL Hypothetical protein in chromosome III >gi|630728|pir||S43605 R07E5.13 protein
  misc_feature (17)..(98): Homolog of NCBI NO: 39591631 NR Description: Hypothetical protein CBG18071 [Caenorhabditis
  misc_feature (17)..(105): Homolog of NCBI NO: 9055178 NR Description: brain protein 44-like; apoptosis-regulating basic
  misc_feature (19)..(105): Homolog of NCBI NO: 20897205 NR Description: RIKEN cDNA 3830411I18 [Mus musculus]
  misc_feature (17)..(95): Homolog of NCBI NO: 20983406 NR Description: similar to Brain protein 44-like protein (Protein
  misc_feature (19)..(107): Homolog of NCBI NO: 34860376 NR Description: similar to brain protein 44-like [Rattus
MATALKSFLNSPVGPKTTHFWGPVANWGFVIAGLVDMNKPPEMISGNMTAAMCVYSGLFMRFAWMVQPRNYLLLACHASNESVQLYQLSRWARSQGYLDKKEPEAKQ

SEQ ID NO: 10282 - protein, 94 aa, Zea mays subsp. mays
  peptide (1)..(94): Ceres Seq. ID no. 12400537
HTACPPALFPFPNCKSATSSLSLYLPRSSPNLSPSSTCESLPPASTRAALGDLDCFLAPHGDGAQIVPEQPRRPQDHPLLGPCRQLGLRHRGFG

SEQ ID NO: 10283 - protein, 71 aa, Zea mays subsp. mays
  peptide (1)..(71): Ceres Seq. ID no. 12400538
  misc_feature (1)..(70): Pfam Name: Uncharacterised protein family (UPF0041) Pfam Description: Uncharacterised protein family (UPF0041)
  misc_feature (1)..(70): Homolog of NCBI NO: 15241266 NR Description: putative protein; protein id: At5g20090.1, by cDNA: 17786., supported by cDNA: gi_15028276, supported by gi_15293008, supported by cDNA: gi_19310836 [Arabidopsis
  misc_feature (1)..(54): Homolog of NCBI NO: 4929727 NR Description: CGI-129 protein [Homo sapiens]
  misc_feature (1)..(54): Homolog of NCBI NO: 7706369 NR Description: brain protein 44-like; HSPC040 protein [Homo
  misc_feature (1)..(69): Homolog of NCBI NO: 12852262 NR Description: unnamed protein product [Mus musculus]
  misc_feature (1)..(62): Homolog of NCBI NO: 17554512 NR Description: Uncharacterised protein family (UPF0041) elegans] >gi|2833311|sp|Q21828|YNFD_CAEEL Hypothetical protein in chromosome III >gi|630728|pir||S43605 R07E5.13 protein
  misc_feature (1)..(62): Homolog of NCBI NO: 39591631 NR Description: Hypothetical protein CBG18071 [Caenorhabditis
  misc_feature (1)..(69): Homolog of NCBI NO: 9055178 NR Description: brain protein 44-like; apoptosis-regulating basic
  misc_feature (1)..(69): Homolog of NCBI NO: 20897205 NR Description: RIKEN cDNA 3830411I18 [Mus musculus]
  misc_feature (1)..(59): Homolog of NCBI NO: 20983406 NR Description: similar to Brain protein 44-like protein (Protein
  misc_feature (1)..(71): Homolog of NCBI NO: 34860376 NR Description: similar to brain protein 44-like [Rattus
MNKPPEMISGNMTAAMCVYSGLFMRFAWMVQPRNYLLLACHASNESVQLYQLSRWARSQGYLDKKEPEAKQ

SEQ ID NO: 10284 - DNA, 540 bp, Zea mays subsp. mays
  misc_feature (1)..(540): Ceres Seq. ID no. 12345401
  misc_feature: MA Experiment ID: 108528 Result: Up-regulated in Transcription
  misc_feature: MA Experiment 108528 PARAMETER Experiment Name: Zm_Imbibed_Seeds_P Parameter: Age (day) Value: 5 vs. 2
  misc_feature: MA Experiment 108528 PARAMETER Experiment Name: Zm_Imbibed_Seeds_P Parameter: Organism Value: Zea mays
  misc_feature: MA Experiment 108528 PARAMETER Experiment Name: Zm_Imbibed_Seeds_P Parameter: Plant Line Value: 35A19
  misc_feature: MA Experiment 108528 PARAMETER Experiment Name: Zm_Imbibed_Seeds_P Parameter: Tissue Value: Aerial vs. Embryo
  misc_feature: MA Experiment ID: 108530 Result: Up-regulated in Transcription
  misc_feature: MA Experiment 108530 PARAMETER Experiment Name: Zm_Imbibed_Seeds_P Parameter: Age (day) Value: 6 vs. 2
  misc_feature: MA Experiment 108530 PARAMETER Experiment Name: Zm_Imbibed_Seeds_P Parameter: Organism Value: Zea mays
  misc_feature: MA Experiment 108530 PARAMETER Experiment Name: Zm_Imbibed_Seeds_P Parameter: Plant Line Value: 35A19
  misc_feature: MA Experiment 108530 PARAMETER Experiment Name: Zm_Imbibed_Seeds_P Parameter: Tissue Value: Aerial vs. Embryo
  misc_feature: MA Experiment ID: 108536 Result: Down-regulated in Transcription
  misc_feature: MA Experiment 108536 PARAMETER Experiment Name: Zm_Meristem_P Parameter: Age (day) Value: 8
  misc_feature: MA Experiment 108536 PARAMETER Experiment Name: Zm_Meristem_P Parameter: Organism Value: Zea mays
  misc_feature: MA Experiment 108536 PARAMETER Experiment Name: Zm_Meristem_P Parameter: Plant Line Value: 35A19
  misc_feature: MA Experiment 108536 PARAMETER Experiment Name: Zm_Meristem_P Parameter: Tissue Value: Shoot Meristem vs. Above Shoot Meristem
  misc_feature: MA Experiment ID: 108544 Result: Up-regulated in Transcription
  misc_feature: MA Experiment ID: 108545 Result: Up-regulated in Transcription
  misc_feature: MA Experiment 108545 PARAMETER Experiment Name: Zm_Imbibed_Seeds_P Parameter: Age (day) Value: 3 vs. 2
  misc_feature: MA Experiment 108545 PARAMETER Experiment Name: Zm_Imbibed_Seeds_P Parameter: Organism Value: Zea mays
  misc_feature: MA Experiment 108545 PARAMETER Experiment Name: Zm_Imbibed_Seeds_P Parameter: Plant Line Value: 35A19
  misc_feature: MA Experiment 108545 PARAMETER Experiment Name: Zm_Imbibed_Seeds_P Parameter: Tissue Value: Aerial vs. Embryo
  misc_feature: MA Experiment ID: 108547 Result: Up-regulated in Transcription
  misc_feature: MA Experiment 108547 PARAMETER Experiment Name: Zm_Imbibed_Seeds_P Parameter: Age (day) Value: 4 vs. 2
  misc_feature: MA Experiment 108547 PARAMETER Experiment Name: Zm_Imbibed_Seeds_P Parameter: Organism Value: Zea mays
  misc_feature: MA Experiment 108547 PARAMETER Experiment Name: Zm_Imbibed_Seeds_P Parameter: Plant Line Value: 35A19
  misc_feature: MA Experiment 108547 PARAMETER Experiment Name: Zm_Imbibed_Seeds_P Parameter: Tissue Value: Aerial vs. Embryo
  misc_feature: MA Experiment ID: 108687 Result: Down-regulated in Transcription
  misc_feature: MA Experiment 108687 PARAMETER Experiment Name: Zm_Embryos-Flowers__P Parameter: Tissue Value: Embryo vs. Aerial+
  misc_feature: MA Experiment ID: 108688 Result: Down-regulated in Transcription
  misc_feature: MA Experiment 108688 PARAMETER Experiment Name: Zm_Embryos-Flowers__P Parameter: Tissue Value: Immature Flowers vs. Aerial+
  misc_feature: MA Experiment ID: 20000480 Result: Down-regulated in Transcription
  misc_feature: MA Experiment 20000480 PARAMETER Experiment Name: Zm_Drought_P Parameter: Age (day) Value: 11
  misc_feature: MA Experiment 20000480 PARAMETER Experiment Name: Zm_Drought_P Parameter: Organism Value: Zea mays
  misc_feature: MA Experiment 20000480 PARAMETER Experiment Name: Zm_Drought_P Parameter: Plant Line Value: 35A19
  misc_feature: MA Experiment 20000480 PARAMETER Experiment Name: Zm_Drought_P Parameter: Timepoint (hr) Value: 72
  misc_feature: MA Experiment 20000480 PARAMETER Experiment Name: Zm_Drought_P Parameter: Tissue Value: Aerial
  misc_feature: MA Experiment 20000480 PARAMETER Experiment Name: Zm_Drought_P Parameter: Treatment Value: Drought vs. No Drought
  misc_feature: MA Experiment ID: 20000488 Result: Up-regulated in Transcription
  misc_feature: MA Experiment 20000488 PARAMETER Experiment Name: Zm_50mM_NH4NO3_L_to_H_P Parameter: Organism Value: Zea mays
  misc_feature: MA Experiment 20000488 PARAMETER Experiment Name: Zm_50mM_NH4NO3_L_to_H_P Parameter: Timepoint (hr) Value: 8
  misc_feature: MA Experiment 20000488 PARAMETER Experiment Name: Zm_50mM_NH4NO3_L_to_H_P Parameter: Tissue Value: Leaves
  misc_feature: MA Experiment 20000488 PARAMETER Experiment Name: Zm_50mM_NH4NO3_L_to_H_P Parameter: Treatment Value: 50mM NH4NO3 vs. 100mM Mannitol
  misc_feature: MA Experiment ID: 20000535 Result: Down-regulated in Transcription
  misc_feature: MA Experiment 20000535 PARAMETER Experiment Name: Zm_Hybrid_Seed_Dev_P Parameter: DAP Value: 30 vs. 12
  misc_feature: MA Experiment 20000535 PARAMETER Experiment Name: Zm_Hybrid_Seed_Dev_P Parameter: Organism Value: Zea mays
  misc_feature: MA Experiment 20000535 PARAMETER Experiment Name: Zm_Hybrid_Seed_Dev_P Parameter: Plant Line Value: 35A19
  misc_feature: MA Experiment 20000535 PARAMETER Experiment Name: Zm_Hybrid_Seed_Dev_P Parameter: Tissue Value: Embryo vs. Unfert Floret
cggggacgttcttaaggttaagccattggcagctttagcaatgattgatgagggagagcttgactggaaaattgtggccatttctttggatgacccgaaagcatctcttgtgaacgacgtggatgatgttgagaagcattttccggggacactgactgccatcagagactggttcagagactacaagatacctgatggaaagcctgccaacaaatttggtctcggcaacaagcccgcaagcaaggaatacgccctgaaggtcattcaagagaccaacgaatcatgggagaaattaaagagaaatattcccgctggagagctctcgttggcctgattttggcccatggaagccaccacattcttttgaactgctttcgtgagcatgtcgttttgtatgctgtgaccatgcttcttcgtttgcattccaaaccttttttacgaactgtttaacaaaaatgatcttgtcggataaataatgattctggtgcgagtttaccagaacggcaaggagtttctcaagtaaatgcagcgtatttttct

SEQ ID NO: 10285 - protein, 110 aa, Zea mays subsp. mays
  peptide (1)..(110): Ceres Seq. ID no. 12345402
  misc_feature (1)..(97): Pfam Name: Inorganic pyrophosphatase Pfam Description: Inorganic pyrophosphatase
  misc_feature (1)..(109): Homolog of NCBI NO: 15242465 NR Description: inorganic pyrophosphatase - like protein; protein At5g09650.1, supported by cDNA: 33506., supported by cDNA: supported by cDNA: gi_19310710 [Arabidopsis thaliana] Arabidopsis
  misc_feature (1)..(109): Homolog of NCBI NO: 21592878 NR Description: inorganic pyrophosphatase-like protein
  misc_feature (1)..(109): Homolog of NCBI NO: 14571671 NR Description: inorganic pyrophosphatase precursor
  misc_feature (1)..(98): Homolog of NCBI NO: 124871 NR Description: INORGANIC PYROPHOSPHATASE (PYROPHOSPHATE
  misc_feature (1)..(98): Homolog of NCBI NO: 124875 NR Description: Inorganic pyrophosphatase (Pyrophosphate
  misc_feature (1)..(98): Homolog of NCBI NO: 1942886 NR Description: Chain A, Acid Anhydride Hydrolase
  misc_feature (1)..(98): Homolog of NCBI NO: 2781300 NR Description: Chain A, Structure Of Inorganic Pyrophosphatase Chain B, Structure Of Inorganic Pyrophosphatase Chain A, Structure Of Inorganic Pyrophosphatase
  misc_feature (1)..(98): Homolog of NCBI NO: 6729690 NR Description: Chain A, The R78k And D117e Active Site Variants Saccharomyces Cerevisiae Soluble Inorganic Pyrophosphatase: Studies And Mechanistic Implications >gi|6729691|pdb|117E|B Chain
  misc_feature (1)..(98): Homolog of NCBI NO: 13787035 NR Description: Chain A, Structure Of Inorganic Pyrophosphatase
  misc_feature (1)..(98): Homolog of NCBI NO: 13787036 NR Description: Chain B, Structure Of Inorganic Pyrophosphatase
GDVLKVKPLAALAMIDEGELDWKIVAISLDDPKASLVNDVDDVEKHFPGTLTAIRDWFRDYKIPDGKPANKFGLGNKPASKEYALKVIQETNESWEKLKRNIPAGELSLA

SEQ ID NO: 10286 - protein, 97 aa, Zea mays subsp. mays
  peptide (1)..(97): Ceres Seq. ID no. 12345403
  misc_feature (1)..(84): Pfam Name: Inorganic pyrophosphatase Pfam Description: Inorganic pyrophosphatase
  misc_feature (1)..(96): Homolog of NCBI NO: 15242465 NR Description: inorganic pyrophosphatase - like protein; protein At5g09650.1, supported by cDNA: 33506., supported by cDNA: supported by cDNA: gi_19310710 [Arabidopsis thaliana] Arabidopsis
  misc_feature (1)..(96): Homolog of NCBI NO: 21592878 NR Description: inorganic pyrophosphatase-like protein
  misc_feature (1)..(96): Homolog of NCBI NO: 14571671 NR Description: inorganic pyrophosphatase precursor
  misc_feature (1)..(85): Homolog of NCBI NO: 124871 NR Description: INORGANIC PYROPHOSPHATASE (PYROPHOSPHATE
  misc_feature (1)..(85): Homolog of NCBI NO: 13787036 NR Description: Chain B, Structure Of Inorganic Pyrophosphatase
  misc_feature (1)..(85): Homolog of NCBI NO: 13787035 NR Description: Chain A, Structure Of Inorganic Pyrophosphatase
  misc_feature (1)..(85): Homolog of NCBI NO: 6729855 NR Description: Chain A, The R78k And D117e Active Site Variants Saccharomyces Cerevisiae Soluble Inorganic Pyrophosphatase: Studies And Mechanistic Implications >gi|6729856|pdb|8PRK|B Chain
  misc_feature (1)..(85): Homolog of NCBI NO: 6729690 NR Description: Chain A, The R78k And D117e Active Site Variants Saccharomyces Cerevisiae Soluble Inorganic Pyrophosphatase: Studies And Mechanistic Implications >gi|6729691|pdb|117E|B Chain
  misc_feature (1)..(85): Homolog of NCBI NO: 6319483 NR Description: pyrophosphate phosphohydrolase, EC 3.6.1.1; the rapid exchange of oxygens of Pi with water.; Ipp1p cerevisiae] >gi|625241|pir||PWBY inorganic diphosphatase (EC
  misc_feature (1)..(85): Homolog of NCBI NO: 3114391 NR Description: Chain A, Refined Structure Of Yeast Inorganic And Its K61r Mutant >gi|3114392|pdb|1HUK|B Chain B, Refined
MIDEGELDWKIVAISLDDPKASLVNDVDDVEKHFPGTLTAIRDWFRDYKIPDGKPANKFGLGNKPASKEYALKVIQETNESWEKLKRNIPAGELSLA

SEQ ID NO: 10287 - protein, 55 aa, Zea mays subsp. mays
  peptide (1)..(55): Ceres Seq. ID no. 12345404
MGEIKEKYSRWRALVGLILAHGSHHILLNCFREHVVLYAVTMLLRLHSKPFLRTV

SEQ ID NO: 10288 - DNA, 1205 bp, Zea mays subsp. mays
  misc_feature (1)..(1205): Ceres Seq. ID no. 12379329
  misc_feature: MA Experiment ID: 108528 Result: Down-regulated in Transcription
  misc_feature: MA Experiment 108528 PARAMETER Experiment Name: Zm_Imbibed_Seeds_P Parameter: Age (day) Value: 5 vs. 2
  misc_feature: MA Experiment 108528 PARAMETER Experiment Name: Zm_Imbibed_Seeds_P Parameter: Organism Value: Zea mays
  misc_feature: MA Experiment 108528 PARAMETER Experiment Name: Zm_Imbibed_Seeds_P Parameter: Plant Line Value: 35A19
  misc_feature: MA Experiment 108528 PARAMETER Experiment Name: Zm_Imbibed_Seeds_P Parameter: Tissue Value: Aerial vs. Embryo
  misc_feature: MA Experiment ID: 108530 Result: Down-regulated in Transcription
  misc_feature: MA Experiment 108530 PARAMETER Experiment Name: Zm_Imbibed_Seeds_P Parameter: Age (day) Value: 6 vs. 2
  misc_feature: MA Experiment 108530 PARAMETER Experiment Name: Zm_Imbibed_Seeds_P Parameter: Organism Value: Zea mays
  misc_feature: MA Experiment 108530 PARAMETER Experiment Name: Zm_Imbibed_Seeds_P Parameter: Plant Line Value: 35A19
  misc_feature: MA Experiment 108530 PARAMETER Experiment Name: Zm_Imbibed_Seeds_P Parameter: Tissue Value: Aerial vs. Embryo
  misc_feature: MA Experiment ID: 108544 Result: Down-regulated in Transcription
  misc_feature: MA Experiment ID: 20000487 Result: Up-regulated in Transcription
  misc_feature: MA Experiment 20000487 PARAMETER Experiment Name: Zm_50mM_NH4NO3_L_to_H_P Parameter: Organism Value: Zea mays
  misc_feature: MA Experiment 20000487 PARAMETER Experiment Name: Zm_50mM_NH4NO3_L_to_H_P Parameter: Timepoint (hr) Value: 4
  misc_feature: MA Experiment 20000487 PARAMETER Experiment Name: Zm_50mM_NH4NO3_L_to_H_P Parameter: Tissue Value: Leaves
  misc_feature: MA Experiment 20000487 PARAMETER Experiment Name: Zm_50mM_NH4NO3_L_to_H_P Parameter: Treatment Value: 50mM NH4NO3 vs. 100mM Mannitol
  misc_feature: MA Experiment ID: 20000488 Result: Up-regulated in Transcription
  misc_feature: MA Experiment 20000488 PARAMETER Experiment Name: Zm_50mM_NH4NO3_L_to_H_P Parameter: Organism Value: Zea mays
  misc_feature: MA Experiment 20000488 PARAMETER Experiment Name: Zm_50mM_NH4NO3_L_to_H_P Parameter: Timepoint (hr) Value: 8
  misc_feature: MA Experiment 20000488 PARAMETER Experiment Name: Zm_50mM_NH4NO3_L_to_H_P Parameter: Tissue Value: Leaves
  misc_feature: MA Experiment 20000488 PARAMETER Experiment Name: Zm_50mM_NH4NO3_L_to_H_P Parameter: Treatment Value: 50mM NH4NO3 vs. 100mM Mannitol
  misc_feature: MA Experiment ID: 20000535 Result: Up-regulated in Transcription
  misc_feature: MA Experiment 20000535 PARAMETER Experiment Name: Zm_Hybrid_Seed_Dev_P Parameter: DAP Value: 30 vs. 12
  misc_feature: MA Experiment 20000535 PARAMETER Experiment Name: Zm_Hybrid_Seed_Dev_P Parameter: Organism Value: Zea mays
  misc_feature: MA Experiment 20000535 PARAMETER Experiment Name: Zm_Hybrid_Seed_Dev_P Parameter: Plant Line Value: 35A19
  misc_feature: MA Experiment 20000535 PARAMETER Experiment Name: Zm_Hybrid_Seed_Dev_P Parameter: Tissue Value: Embryo vs. Unfert Floret
  misc_feature: MA Experiment ID: 20000626 Result: Up-regulated in Transcription
  misc_feature: MA Experiment 20000626 PARAMETER Experiment Name: Zm_Herbicide-Treatments_P Parameter: Timepoint (hr) Value: 12
  misc_feature: MA Experiment 20000626 PARAMETER Experiment Name: Zm_Herbicide-Treatments_P Parameter: Tissue Value: Aerial
  misc_feature: MA Experiment 20000626 PARAMETER Experiment Name: Zm_Herbicide-Treatments_P Parameter: Treatment Value: Roundup vs. No Treatment
  misc_feature: MA Experiment ID: 20000632 Result: Down-regulated in Transcription
  misc_feature: MA Experiment 20000632 PARAMETER Experiment Name: Zm_Herbicide-Treatments_P Parameter: Timepoint (hr) Value: 4
  misc_feature: MA Experiment 20000632 PARAMETER Experiment Name: Zm_Herbicide-Treatments_P Parameter: Tissue Value: Aerial
  misc_feature: MA Experiment 20000632 PARAMETER Experiment Name: Zm_Herbicide-Treatments_P Parameter: Treatment Value: Glean vs. No Treatment
  misc_feature: MA Experiment ID: 20001606 Result: Up-regulated in Transcription
  misc_feature: MA Experiment 20001606 PARAMETER Experiment Name: Zm_50ppm_KNO3_L-to-H_P Parameter: Age (day) Value: 19
  misc_feature: MA Experiment 20001606 PARAMETER Experiment Name: Zm_50ppm_KNO3_L-to-H_P Parameter: Organism Value: Zea mays
  misc_feature: MA Experiment 20001606 PARAMETER Experiment Name: Zm_50ppm_KNO3_L-to-H_P Parameter: Plant Line Value: 35A19
  misc_feature: MA Experiment 20001606 PARAMETER Experiment Name: Zm_50ppm_KNO3_L-to-H_P Parameter: Timepoint (hr) Value: 8
  misc_feature: MA Experiment 20001606 PARAMETER Experiment Name: Zm_50ppm_KNO3_L-to-H_P Parameter: Tissue Value: Shoots
  misc_feature: MA Experiment 20001606 PARAMETER Experiment Name: Zm_50ppm_KNO3_L-to-H_P Parameter: Treatment Value: 50ppm KNO3 vs. 50ppm KCl
agcagacaagggaggggactgagaactgggaagccgacgctccgctcggcaaagcctgaggcggcgacgacgcttgatcgcagcccgactcacaccgtgaggagttcgagggatggctttcgctagtagaattggaaatgcgctcaggagaactttagcgcccacttgctccccactgcttcagccagtaagatgcatgtcctcttccaagctctttgttggaggactttcttttgccaccgacgaaaccactctgaaggatgcattttctgagtttgggaatgtacttgaagctcggatcatcattgatcgggaatcagggaggtcaaggggttttggttttataacttttacatccactgaagaagcctcagctgcaatgacttccatggatggcaaggaacttcaaggacgaaatataagggtgaaccatgccaatgaacgcgctggtgggatacgcgggggtggtggattcggatctggtggtggttatggtggtggaggtggatatcctactggtgggtatggcggtggtggagatagttctggtggtggttatagttctgggggttatgctgccaatggttacggtgttggatctggcagtggcaactacagcaatgcatcaggtggtggatattcaggcagtgatggttacggcaatggagctgccagtggtggttatgctaacaacttgagcagcggatacaacagcaatggtaggtacaataccattggcagttctgatggaaacactggtgggtacaattcgtatcccaacccgtatggtgcaggcaactacaatactggaggttcgagttccagtggtggaaccttaggagagtttggtggtggaggttttggtggcaacaactttgctggaaatgttaccgggggggtttctggcggtggggcaagctatggaggctaacaagccgcaatacaatggcgacgacgacctgctgggcgaaggtttcttcgacaaggaagtggcagagtaaatgagggagcggcgtactcgcacctctcgcactgtgctgcggatctttttttcccccaaactgcatctgatcggtcgtgctaaatggagcaaataaaactttgcttgagctcattaggatatagaacataatcctttgttctttttttattctgtttcagacaaggcacgtatgttattttatccactcagctagcgtagcttt

SEQ ID NO: 10289 - protein, 272 aa, Zea mays subsp. mays
  peptide (1)..(272): Ceres Seq. ID no. 12379330
  misc_feature (34)..(105): Pfam Name: RNA recognition motif. (a.k.a. RRM, RBD, or RNP domain) Pfam Description: RNA recognition motif. (a.k.a. RRM, RBD, or RNP
  misc_feature (1)..(272): Homolog of NCBI NO: 15239505 NR Description: glycine-rich RNA-binding protein; protein id: supported by cDNA: gi_16974555 [Arabidopsis thaliana] contains similarity to RNA binding protein~gene_id:MAF19.4
  misc_feature (1)..(272): Homolog of NCBI NO: 15822705 NR Description: RNA-binding protein precursor [Solanum tuberosum]
  misc_feature (1)..(270): Homolog of NCBI NO: 15221187 NR Description: glycine-rich RNA-binding protein; protein id:
  misc_feature (1)..(239): Homolog of NCBI NO: 1084415 NR Description: RNA-binding protein - wood tobacco
  misc_feature (1)..(240): Homolog of NCBI NO: 15822703 NR Description: RNA-binding protein precursor [Nicotiana tabacum]
  misc_feature (99)..(272): Homolog of NCBI NO: 33416839 NR Description: Unknown (protein for MGC:66127) [Danio rerio]
  misc_feature (113)..(272): Homolog of NCBI NO: 33416839 NR Description: Unknown (protein for MGC:66127) [Danio rerio]
  misc_feature (33)..(118): Homolog of NCBI NO: 33416839 NR Description: Unknown (protein for MGC:66127) [Danio rerio]
  misc_feature (95)..(272): Homolog of NCBI NO: 1710626 NR Description: Heterogeneous nuclear ribonucleoprotein A3
  misc_feature (33)..(118): Homolog of NCBI NO: 1710626 NR Description: Heterogeneous nuclear ribonucleoprotein A3
MAFASRIGNALRRTLAPTCSPLLQPVRCMSSSKLFVGGLSFATDETTLKDAFSEFGNVLEARIIIDRESGRSRGFGFITFTSTEEASAAMTSMDGKELQGRNIRVNHANERAGGIRGGGGFGSGGGYGGGGGYPTGGYGGGGDSSGGGYSSGGYAANGYGVGSGSGNYSNASGGGYSGSDGYGNGAASGGYANNLSSGYNSNGRYNTIGSSDGNTGGYNSYPNPYGAGNYNTGGSSSSGGTLGEFGGGGFGGNNFAGNVTGGVSGGGASYGG

SEQ ID NO: 10290 - protein, 244 aa, Zea mays subsp. mays
  peptide (1)..(244): Ceres Seq. ID no. 12379331
  misc_feature (6)..(77): Pfam Name: RNA recognition motif. (a.k.a. RRM, RBD, or RNP domain) Pfam Description: RNA recognition motif. (a.k.a. RRM, RBD, or RNP
  misc_feature (1)..(244): Homolog of NCBI NO: 15239505 NR Description: glycine-rich RNA-binding protein; protein id: supported by cDNA: gi_16974555 [Arabidopsis thaliana] contains similarity to RNA binding protein~gene_id:MAF19.4
  misc_feature (1)..(244): Homolog of NCBI NO: 15822705 NR Description: RNA-binding protein precursor [Solanum tuberosum]
  misc_feature (1)..(242): Homolog of NCBI NO: 15221187 NR Description: glycine-rich RNA-binding protein; protein id:
  misc_feature (1)..(211): Homolog of NCBI NO: 1084415 NR Description: RNA-binding protein - wood tobacco
  misc_feature (1)..(212): Homolog of NCBI NO: 15822703 NR Description: RNA-binding protein precursor [Nicotiana tabacum]
  misc_feature (71)..(244): Homolog of NCBI NO: 33416839 NR Description: Unknown (protein for MGC:66127) [Danio rerio]
  misc_feature (85)..(244): Homolog of NCBI NO: 33416839 NR Description: Unknown (protein for MGC:66127) [Danio rerio]
  misc_feature (5)..(90): Homolog of NCBI NO: 33416839 NR Description: Unknown (protein for MGC:66127) [Danio rerio]
  misc_feature (67)..(244): Homolog of NCBI NO: 1710626 NR Description: Heterogeneous nuclear ribonucleoprotein A3
  misc_feature (5)..(90): Homolog of NCBI NO: 1710626 NR Description: Heterogeneous nuclear ribonucleoprotein A3
MSSSKLFVGGLSFATDETTLKDAFSEFGNVLEARIIIDRESGRSRGFGFITFTSTEEASAAMTSMDGKELQGRNIRVNHANERAGGIRGGGGFGSGGGYGGGGGYPTGGYGGGGDSSGGGYSSGGYAANGYGVGSGSGNYSNASGGGYSGSDGYGNGAASGGYANNLSSGYNSNGRYNTIGSSDGNTGGYNSYPNPYGAGNYNTGGSSSSGGTLGEFGGGGFGGNNFAGNVTGGVSGGGASYGG

SEQ ID NO: 10291 - protein, 183 aa, Zea mays subsp. mays
  peptide (1)..(183): Ceres Seq. ID no. 12379332
  misc_feature (24)..(165): Pfam Name: Dehydrin Pfam Description: Dehydrin
  misc_feature (1)..(183): Homolog of NCBI NO: 15239505 NR Description: glycine-rich RNA-binding protein; protein id: supported by cDNA: gi_16974555 [Arabidopsis thaliana] contains similarity to RNA binding protein~gene_id:MAF19.4
  misc_feature (1)..(183): Homolog of NCBI NO: 15822705 NR Description: RNA-binding protein precursor [Solanum tuberosum]
  misc_feature (1)..(181): Homolog of NCBI NO: 15221187 NR Description: glycine-rich RNA-binding protein; protein id:
  misc_feature (1)..(150): Homolog of NCBI NO: 1084415 NR Description: RNA-binding protein - wood tobacco
  misc_feature (1)..(151): Homolog of NCBI NO: 15822703 NR Description: RNA-binding protein precursor [Nicotiana tabacum]
  misc_feature (10)..(183): Homolog of NCBI NO: 33416839 NR Description: Unknown (protein for MGC:66127) [Danio rerio]
  misc_feature (24)..(183): Homolog of NCBI NO: 33416839 NR Description: Unknown (protein for MGC:66127) [Danio rerio]
  misc_feature (1)..(29): Homolog of NCBI NO: 33416839 NR Description: Unknown (protein for MGC:66127) [Danio rerio]
  misc_feature (6)..(183): Homolog of NCBI NO: 1710626 NR Description: Heterogeneous nuclear ribonucleoprotein A3
  misc_feature (1)..(29): Homolog of NCBI NO: 1710626 NR Description: Heterogeneous nuclear ribonucleoprotein A3
MTSMDGKELQGRNIRVNHANERAGGIRGGGGFGSGGGYGGGGGYPTGGYGGGGDSSGGGYSSGGYAANGYGVGSGSGNYSNASGGGYSGSDGYGNGAASGGYANNLSSGYNSNGRYNTIGSSDGNTGGYNSYPNPYGAGNYNTGGSSSSGGTLGEFGGGGFGGNNFAGNVTGGVSGGGASYGG

SEQ ID NO: 10292 - DNA, 724 bp, Zea mays subsp. mays
  misc_feature (1)..(724): Ceres Seq. ID no. 14308548
  misc_feature: MA Experiment ID: 108522 Result: Up-regulated in Transcription
  misc_feature: MA Experiment 108522 PARAMETER Experiment Name: Zm_42deg_Heat_P Parameter: Age (day) Value: 8
  misc_feature: MA Experiment 108522 PARAMETER Experiment Name: Zm_42deg_Heat_P Parameter: Organism Value: Zea mays
  misc_feature: MA Experiment 108522 PARAMETER Experiment Name: Zm_42deg_Heat_P Parameter: Plant Line Value: 35A19
  misc_feature: MA Experiment 108522 PARAMETER Experiment Name: Zm_42deg_Heat_P Parameter: Temperature (deg C) Value: 42 vs. 22
  misc_feature: MA Experiment 108522 PARAMETER Experiment Name: Zm_42deg_Heat_P Parameter: Timepoint (hr) Value: 1
  misc_feature: MA Experiment 108522 PARAMETER Experiment Name: Zm_42deg_Heat_P Parameter: Tissue Value: Aerial
cgtggtgtgccacagatcaccgtgtgctttgacatcgacgccaacggcatcctgaacgtgtctgccgaggacaagacaacggggcagaagaacaagatcacaatcaccaacgacaagggccgtctctccaaggaggagatcgagaagatggttcaggacgctgagaagtacaagtctgaggatgaggagcacaagaagaaggtggaggccaagaactcgctggagaactactcctacaacatgcgcaacacgatcaaggacgagaagattgcgtccaagctgccggccgatgacaagaagaagatcgaggacgccatcgacgcggccatcagctggctggacgccaaccagctcgccgaggcggacgagttcgaggacaagatgaaggagctggagagcctctgcaaccccatcatcgccaagatgtaccagggcgcgggtgaagacatgggcggcgctggcggcatggacgaggacgcccctgccggcagcggcggccctggccccaagatcgaggaggtggactaagcggtttgttgtcagtcttgagtgtgctgcagttgctggctggcccagttgctgccgagagttatcgtcagttggtgcggtgtgtccgcttaaactttatttgtggttggttggtacttttgtggtggttatttttttggacctcgtgatagtcggtcggttcaatgttatcgcggctactggcaaaccttaagtg

SEQ ID NO: 10293 - protein, 175 aa, Zea mays subsp. mays
  peptide (1)..(175): Ceres Seq. ID no. 14308549
  misc_feature (1)..(144): Pfam Name: Hsp70 protein Pfam Description: Hsp70 protein
  misc_feature (1)..(175): Homolog of NCBI NO: 629844 NR Description: dnaK-type molecular chaperone hsp70.5 - maize
  misc_feature (1)..(175): Homolog of NCBI NO: 629843 NR Description: dnaK-type molecular chaperone hsp70.4 - maize
  misc_feature (1)..(175): Homolog of NCBI NO: 34908140 NR Description: putative HSP70 [Oryza sativa (japonica
  misc_feature (1)..(175): Homolog of NCBI NO: 3962377 NR Description: heat shock protein 70 [Arabidopsis thaliana]
  misc_feature (1)..(175): Homolog of NCBI NO: 15230534 NR Description: heat shock protein hsp70 [Arabidopsis thaliana]
  misc_feature (1)..(175): Homolog of NCBI NO: 2827002 NR Description: HSP70 [Triticum aestivum]
  misc_feature (1)..(175): Homolog of NCBI NO: 29124135 NR Description: heat shock protein cognate 70 [Oryza sativa
  misc_feature (1)..(175): Homolog of NCBI NO: 3986110 NR Description: heat shock protein 70 cognate [Salix gilgiana]
  misc_feature (1)..(175): Homolog of NCBI NO: 1076746 NR Description: dnaK-type molecular chaperone hsp70 - rice
  misc_feature (1)..(175): Homolog of NCBI NO: 21664287 NR Description: heat shock protein 70 [Oryza sativa (indica
RGVPQITVCFDIDANGILNVSAEDKTTGQKNKITITNDKGRLSKEEIEKMVQDAEKYKSEDEEHKKKVEAKNSLENYSYNMRNTIKDEKIASKLPADDKKKIEDAIDAAISWLDANQLAEADEFEDKMKELESLCNPIIAKMYQGAGEDMGGAGGMDEDAPAGSGGPGPKIEEVD

SEQ ID NO: 10294 - protein, 126 aa, Zea mays subsp. mays; identical to SEQ ID NO: 3128
  peptide (1)..(126): Ceres Seq. ID no. 14308550
  misc_feature (1)..(95): Pfam Name: Hsp70 protein Pfam Description: Hsp70 protein
  misc_feature (1)..(126): Homolog of NCBI NO: 629844 NR Description: dnaK-type molecular chaperone hsp70.5 - maize
  misc_feature (1)..(126): Homolog of NCBI NO: 629843 NR Description: dnaK-type molecular chaperone hsp70.4 - maize
  misc_feature (1)..(126): Homolog of NCBI NO: 34908140 NR Description: putative HSP70 [Oryza sativa (japonica
  misc_feature (1)..(126): Homolog of NCBI NO: 3962377 NR Description: heat shock protein 70 [Arabidopsis thaliana]
  misc_feature (1)..(126): Homolog of NCBI NO: 15230534 NR Description: heat shock protein hsp70 [Arabidopsis thaliana]
  misc_feature (1)..(126): Homolog of NCBI NO: 2827002 NR Description: HSP70 [Triticum aestivum]
  misc_feature (1)..(126): Homolog of NCBI NO: 29124135 NR Description: heat shock protein cognate 70 [Oryza sativa
  misc_feature (1)..(126): Homolog of NCBI NO: 3986110 NR Description: heat shock protein 70 cognate [Salix gilgiana]
  misc_feature (1)..(126): Homolog of NCBI NO: 1076746 NR Description: dnaK-type molecular chaperone hsp70 - rice
  misc_feature (1)..(126): Homolog of NCBI NO: 21664287 NR Description: heat shock protein 70 [Oryza sativa (indica

SEQ ID NO: 10295 - protein, 95 aa, Zea mays subsp. mays
  peptide (1)..(95): Ceres Seq. ID no. 14308551
  misc_feature (1)..(64): Pfam Name: Hsp70 protein Pfam Description: Hsp70 protein
  misc_feature (1)..(95): Homolog of NCBI NO: 629844 NR Description: dnaK-type molecular chaperone hsp70.5 - maize
  misc_feature (1)..(95): Homolog of NCBI NO: 629843 NR Description: dnaK-type molecular chaperone hsp70.4 - maize
  misc_feature (1)..(95): Homolog of NCBI NO: 34908140 NR Description: putative HSP70 [Oryza sativa (japonica
  misc_feature (1)..(95): Homolog of NCBI NO: 3962377 NR Description: heat shock protein 70 [Arabidopsis thaliana]
  misc_feature (1)..(95): Homolog of NCBI NO: 15230534 NR Description: heat shock protein hsp70 [Arabidopsis thaliana]
  misc_feature (1)..(95): Homolog of NCBI NO: 2827002 NR Description: HSP70 [Triticum aestivum]
  misc_feature (1)..(95): Homolog of NCBI NO: 29124135 NR Description: heat shock protein cognate 70 [Oryza sativa
  misc_feature (1)..(95): Homolog of NCBI NO: 3986110 NR Description: heat shock protein 70 cognate [Salix gilgiana]
  misc_feature (1)..(95): Homolog of NCBI NO: 1076746 NR Description: dnaK-type molecular chaperone hsp70 - rice
  misc_feature (1)..(95): Homolog of NCBI NO: 21664287 NR Description: heat shock protein 70 [Oryza sativa (indica
MRNTIKDEKIASKLPADDKKKIEDAIDAAISWLDANQLAEADEFEDKMKELESLCNPIIAKMYQGAGEDMGGAGGMDEDAPAGSGGPGPKIEEVD

SEQ ID NO: 10296 - DNA, 1069 bp, Zea mays subsp. mays; identical to SEQ ID NO: 3894
  misc_feature (1)..(1069): Ceres Seq. ID no. 12403740
  misc_feature: MA Experiment ID: 108504 Result: Up-regulated in Transcription
  misc_feature: MA Experiment 108504 PARAMETER Experiment Name: Zm_Drought_P Parameter: Age (day) Value: 8
  misc_feature: MA Experiment 108504 PARAMETER Experiment Name: Zm_Drought_P Parameter: Organism Value: Zea mays
  misc_feature: MA Experiment 108504 PARAMETER Experiment Name: Zm_Drought_P Parameter: Plant Line Value: 35A19
  misc_feature: MA Experiment 108504 PARAMETER Experiment Name: Zm_Drought_P Parameter: Timepoint (hr) Value: 12
  misc_feature: MA Experiment 108504 PARAMETER Experiment Name: Zm_Drought_P Parameter: Tissue Value: Aerial
  misc_feature: MA Experiment 108504 PARAMETER Experiment Name: Zm_Drought_P Parameter: Treatment Value: Drought vs. No Drought
  misc_feature: MA Experiment ID: 108522 Result: Up-regulated in Transcription
  misc_feature: MA Experiment 108522 PARAMETER Experiment Name: Zm_42deg_Heat_P Parameter: Age (day) Value: 8
  misc_feature: MA Experiment 108522 PARAMETER Experiment Name: Zm_42deg_Heat_P Parameter: Organism Value: Zea mays
  misc_feature: MA Experiment 108522 PARAMETER Experiment Name: Zm_42deg_Heat_P Parameter: Plant Line Value: 35A19
  misc_feature: MA Experiment 108522 PARAMETER Experiment Name: Zm_42deg_Heat_P Parameter: Temperature (deg C) Value: 42 vs. 22
  misc_feature: MA Experiment 108522 PARAMETER Experiment Name: Zm_42deg_Heat_P Parameter: Timepoint (hr) Value: 1
  misc_feature: MA Experiment 108522 PARAMETER Experiment Name: Zm_42deg_Heat_P Parameter: Tissue Value: Aerial
  misc_feature: MA Experiment ID: 108523 Result: Up-regulated in Transcription
  misc_feature: MA Experiment 108523 PARAMETER Experiment Name: Zm_42deg_Heat_P Parameter: Age (day) Value: 8
  misc_feature: MA Experiment 108523 PARAMETER Experiment Name: Zm_42deg_Heat_P Parameter: Organism Value: Zea mays
  misc_feature: MA Experiment 108523 PARAMETER Experiment Name: Zm_42deg_Heat_P Parameter: Plant Line Value: 35A19
  misc_feature: MA Experiment 108523 PARAMETER Experiment Name: Zm_42deg_Heat_P Parameter: Temperature (deg C) Value: 42 vs. 22
  misc_feature: MA Experiment 108523 PARAMETER Experiment Name: Zm_42deg_Heat_P Parameter: Timepoint (hr) Value: 6
  misc_feature: MA Experiment 108523 PARAMETER Experiment Name: Zm_42deg_Heat_P Parameter: Tissue Value: Aerial
  misc_feature: MA Experiment ID: 108542 Result: Up-regulated in Transcription
  misc_feature: MA Experiment 108542 PARAMETER Experiment Name: Zm_150mM_NaCl_P Parameter: Age (day) Value: 8
  misc_feature: MA Experiment 108542 PARAMETER Experiment Name: Zm_150mM_NaCl_P Parameter: Organism Value: Zea mays
  misc_feature: MA Experiment 108542 PARAMETER Experiment Name: Zm_150mM_NaCl_P Parameter: Plant Line Value: 35A19
  misc_feature: MA Experiment 108542 PARAMETER Experiment Name: Zm_150mM_NaCl_P Parameter: Timepoint (hr) Value: 6
  misc_feature: MA Experiment 108542 PARAMETER Experiment Name: Zm_150mM_NaCl_P Parameter: Tissue Value: Aerial
  misc_feature: MA Experiment 108542 PARAMETER Experiment Name: Zm_150mM_NaCl_P Parameter: Treatment Value: 150mM NaCl vs. No Treatment
  misc_feature: MA Experiment ID: 108556 Result: Up-regulated in Transcription
  misc_feature: MA Experiment 108556 PARAMETER Experiment Name: Zm_Drought_P Parameter: Age (day) Value: 9
  misc_feature: MA Experiment 108556 PARAMETER Experiment Name: Zm_Drought_P Parameter: Organism Value: Zea mays
  misc_feature: MA Experiment 108556 PARAMETER Experiment Name: Zm_Drought_P Parameter: Plant Line Value: 35A19
  misc_feature: MA Experiment 108556 PARAMETER Experiment Name: Zm_Drought_P Parameter: Timepoint (hr) Value: 24
  misc_feature: MA Experiment 108556 PARAMETER Experiment Name: Zm_Drought_P Parameter: Tissue Value: Aerial
  misc_feature: MA Experiment 108556 PARAMETER Experiment Name: Zm_Drought_P Parameter: Treatment Value: Drought vs. No Drought
  misc_feature: MA Experiment ID: 108597 Result: Up-regulated in Transcription
  misc_feature: MA Experiment 108597 PARAMETER Experiment Name: Zm_100uM_ABA_P Parameter: Age (day) Value: 9
  misc_feature: MA Experiment 108597 PARAMETER Experiment Name: Zm_100uM_ABA_P Parameter: Organism Value: Zea mays
  misc_feature: MA Experiment 108597 PARAMETER Experiment Name: Zm_100uM_ABA_P Parameter: Plant Line Value: 35A19
  misc_feature: MA Experiment 108597 PARAMETER Experiment Name: Zm_100uM_ABA_P Parameter: Timepoint (hr) Value: 24
  misc_feature: MA Experiment 108597 PARAMETER Experiment Name: Zm_100uM_ABA_P Parameter: Tissue Value: Aerial
  misc_feature: MA Experiment 108597 PARAMETER Experiment Name: Zm_100uM_ABA_P Parameter: Treatment Value: 100uM ABA vs. No Treatment
  misc_feature: MA Experiment ID: 108689 Result: Up-regulated in Transcription
  misc_feature: MA Experiment 108689 PARAMETER Experiment Name: Zm_Drought_Roots_P Parameter: Age (day) Value: 9
  misc_feature: MA Experiment 108689 PARAMETER Experiment Name: Zm_Drought_Roots_P Parameter: Organism Value: Zea mays
  misc_feature: MA Experiment 108689 PARAMETER Experiment Name: Zm_Drought_Roots_P Parameter: Plant Line Value: 35A19
  misc_feature: MA Experiment 108689 PARAMETER Experiment Name: Zm_Drought_Roots_P Parameter: Timepoint (hr) Value: 24
  misc_feature: MA Experiment 108689 PARAMETER Experiment Name: Zm_Drought_Roots_P Parameter: Tissue Value: Roots
  misc_feature: MA Experiment 108689 PARAMETER Experiment Name: Zm_Drought_Roots_P Parameter: Treatment Value: Drought vs. No Drought
  misc_feature: MA Experiment ID: 20000477 Result: Up-regulated in Transcription
  misc_feature: MA Experiment 20000477 PARAMETER Experiment Name: Zm_5mM_SA_P Parameter: Age (day) Value: 10
  misc_feature: MA Experiment 20000477 PARAMETER Experiment Name: Zm_5mM_SA_P Parameter: Organism Value: Zea mays
  misc_feature: MA Experiment 20000477 PARAMETER Experiment Name: Zm_5mM_SA_P Parameter: Plant Line Value: 35A19
  misc_feature: MA Experiment 20000477 PARAMETER Experiment Name: Zm_5mM_SA_P Parameter: Timepoint (hr) Value: 48
  misc_feature: MA Experiment 20000477 PARAMETER Experiment Name: Zm_5mM_SA_P Parameter: Tissue Value: Aerial
  misc_feature: MA Experiment 20000477 PARAMETER Experiment Name: Zm_5mM_SA_P Parameter: Treatment Value: 5mM SA vs. No Treatment
  misc_feature: MA Experiment ID: 20000478 Result: Up-regulated in Transcription
  misc_feature: MA Experiment 20000478 PARAMETER Experiment Name: Zm_5mM_SA_P Parameter: Age (day) Value: 11
  misc_feature: MA Experiment 20000478 PARAMETER Experiment Name: Zm_5mM_SA_P Parameter: Organism Value: Zea mays
  misc_feature: MA Experiment 20000478 PARAMETER Experiment Name: Zm_5mM_SA_P Parameter: Plant Line Value: 35A19
  misc_feature: MA Experiment 20000478 PARAMETER Experiment Name: Zm_5mM_SA_P Parameter: Timepoint (hr) Value: 72
  misc_feature: MA Experiment 20000478 PARAMETER Experiment Name: Zm_5mM_SA_P Parameter: Tissue Value: Aerial
  misc_feature: MA Experiment 20000478 PARAMETER Experiment Name: Zm_5mM_SA_P Parameter: Treatment Value: 5mM SA vs. No Treatment
  misc_feature: MA Experiment ID: 20000479 Result: Up-regulated in Transcription
  misc_feature: MA Experiment 20000479 PARAMETER Experiment Name: Zm_Drought_P Parameter: Age (day) Value: 10
  misc_feature: MA Experiment 20000479 PARAMETER Experiment Name: Zm_Drought_P Parameter: Organism Value: Zea mays
  misc_feature: MA Experiment 20000479 PARAMETER Experiment Name: Zm_Drought_P Parameter: Plant Line Value: 35A19
  misc_feature: MA Experiment 20000479 PARAMETER Experiment Name: Zm_Drought_P Parameter: Timepoint (hr) Value: 48
  misc_feature: MA Experiment 20000479 PARAMETER Experiment Name: Zm_Drought_P Parameter: Tissue Value: Aerial
  misc_feature: MA Experiment 20000479 PARAMETER Experiment Name: Zm_Drought_P Parameter: Treatment Value: Drought vs. No Drought
  misc_feature: MA Experiment ID: 20000480 Result: Up-regulated in Transcription
  misc_feature: MA Experiment 20000480 PARAMETER Experiment Name: Zm_Drought_P Parameter: Age (day) Value: 11
  misc_feature: MA Experiment 20000480 PARAMETER Experiment Name: Zm_Drought_P Parameter: Organism Value: Zea mays
  misc_feature: MA Experiment 20000480 PARAMETER Experiment Name: Zm_Drought_P Parameter: Plant Line Value: 35A19
  misc_feature: MA Experiment 20000480 PARAMETER Experiment Name: Zm_Drought_P Parameter: Timepoint (hr) Value: 72
  misc_feature: MA Experiment 20000480 PARAMETER Experiment Name: Zm_Drought_P Parameter: Tissue Value: Aerial
  misc_feature: MA Experiment 20000480 PARAMETER Experiment Name: Zm_Drought_P Parameter: Treatment Value: Drought vs. No Drought
  misc_feature: MA Experiment ID: 20000534 Result: Up-regulated in Transcription
  misc_feature: MA Experiment 20000534 PARAMETER Experiment Name: Zm_Hybrid_Pollen_P Parameter: Age (day) Value: 8
  misc_feature: MA Experiment 20000534 PARAMETER Experiment Name: Zm_Hybrid_Pollen_P Parameter: Organism Value: Zea mays
  misc_feature: MA Experiment 20000534 PARAMETER Experiment Name: Zm_Hybrid_Pollen_P Parameter: Plant Line Value: 35A19
  misc_feature: MA Experiment 20000534 PARAMETER Experiment Name: Zm_Hybrid_Pollen_P Parameter: Tissue Value: Pollen vs. Aerial

SEQ ID NO: 10297 - protein, 244 aa, Zea mays subsp. mays; identical to SEQ ID NO: 3895
  peptide (1)..(244): Ceres Seq. ID no. 12403741
  misc_feature (9)..(98): Pfam Name: MtN3/saliva family Pfam Description: MtN3/saliva family
  misc_feature (1)..(225): Homolog of NCBI NO: 18421965 NR Description: putative protein; protein id: At5g40260.1, by cDNA: 11922. [Arabidopsis thaliana] contains similarity to MtN3 [Arabidopsis thaliana]
  misc_feature (1)..(194): Homolog of NCBI NO: 10177463 NR Description: contains similarity to MtN3
  misc_feature (39)..(217): Homolog of NCBI NO: 431154 NR Description: ORF [Lilium longiflorum]
  misc_feature (1)..(244): Homolog of NCBI NO: 34912454 NR Description: P0681B11.31 [Oryza sativa (japonica
  misc_feature (1)..(225): Homolog of NCBI NO: 21592355 NR Description: contains similarity to nodulin MtN3 protein
  misc_feature (8)..(219): Homolog of NCBI NO: 18413388 NR Description: putative protein; protein id: At4g10850.1, by cDNA: 33161. [Arabidopsis thaliana] contains similarity to Medicago truncatula MtN3 (GB:Y08726)
  misc_feature (1)..(225): Homolog of NCBI NO: 18405611 NR Description: Expressed protein; protein id: At3g28007.1, by cDNA: 22745., supported by cDNA: gi_16226221 [Arabidopsis >gi|16226222|gb|AAL16107.1|AF428275_1 unknown protein
  misc_feature (1)..(244): Homolog of NCBI NO: 34912462 NR Description: MtN3-like protein [Oryza sativa (japonica
  misc_feature (8)..(243): Homolog of NCBI NO: 15219732 NR Description: hypothetical protein; protein id: At1g66770.1 thaliana] >gi|12597757|gb|AAG60070.1|AC013288_4 hypothetical
  misc_feature (39)..(225): Homolog of NCBI NO: 11994120 NR Description: contains similarity to nodulin MtN3

SEQ ID NO: 10298 - protein, 201 aa, Zea mays subsp. mays; identical to SEQ ID NO: 3896
  peptide (1)..(201): Ceres Seq. ID no. 12403742

SEQ ID NO: 10299 - protein, 190 aa, Zea mays subsp. mays; identical to SEQ ID NO: 3897
  peptide (1)..(190): Ceres Seq. ID no. 12403743
  misc_feature (1)..(190): Homolog of NCBI NO: 34912462 NR Description: MtN3-like protein [Oryza sativa (japonica
  misc_feature (1)..(190): Homolog of NCBI NO: 34912454 NR Description: P0681B11.31 [Oryza sativa (japonica
  misc_feature (1)..(171): Homolog of NCBI NO: 18405611 NR Description: Expressed protein; protein id: At3g28007.1, by cDNA: 22745., supported by cDNA: gi_16226221 [Arabidopsis >gi|16226222|gb|AAL16107.1|AF428275_1 unknown protein
  misc_feature (1)..(171): Homolog of NCBI NO: 21592355 NR Description: contains similarity to nodulin MtN3 protein
  misc_feature (1)..(165): Homolog of NCBI NO: 18413388 NR Description: putative protein; protein id: At4g10850.1, by cDNA: 33161. [Arabidopsis thaliana] contains similarity to Medicago truncatula MtN3 (GB:Y08726)
  misc_feature (1)..(171): Homolog of NCBI NO: 18421965 NR Description: putative protein; protein id: At5g40260.1, by cDNA: 11922. [Arabidopsis thaliana] contains similarity to MtN3 [Arabidopsis thaliana]
  misc_feature (1)..(140): Homolog of NCBI NO: 10177463 NR Description: contains similarity to MtN3
  misc_feature (1)..(163): Homolog of NCBI NO: 431154 NR Description: ORF [Lilium longiflorum]
  misc_feature (1)..(189): Homolog of NCBI NO: 15219732 NR Description: hypothetical protein; protein id: At1g66770.1 thaliana] >gi|12597757|gb|AAG60070.1|AC013288_4 hypothetical
  misc_feature (1)..(171): Homolog of NCBI NO: 11994120 NR Description: contains similarity to nodulin MtN3

SEQ ID NO: 10300 - DNA, 1181 bp, Zea mays subsp. mays
  misc_feature (1)..(1181): Ceres Seq. ID no. 12364890
  misc_feature: MA Experiment ID: 108527 Result: Down-regulated in Transcription
  misc_feature: MA Experiment 108527 PARAMETER Experiment Name: Zm_5mM_NO_P Parameter: Age (day) Value: 8
  misc_feature: MA Experiment 108527 PARAMETER Experiment Name: Zm_5mM_NO_P Parameter: Organism Value: Zea mays
  misc_feature: MA Experiment 108527 PARAMETER Experiment Name: Zm_5mM_NO_P Parameter: Plant Line Value: 35A19
  misc_feature: MA Experiment 108527 PARAMETER Experiment Name: Zm_5mM_NO_P Parameter: Timepoint (hr) Value: 6
  misc_feature: MA Experiment 108527 PARAMETER Experiment Name: Zm_5mM_NO_P Parameter: Tissue Value: Aerial
  misc_feature: MA Experiment 108527 PARAMETER Experiment Name: Zm_5mM_NO_P Parameter: Treatment Value: 5mM NO vs. No Treatment
attgttcactgggaggaccaactagataattcatcatggctatcatactttacaagcagccaatgccgatccttatggacatatgttacaccaccaagaggcaagagcctctcgctcgctaccaatgcgcacgtcacaccgtggtctccttcgccgccgccgccgcgtcgtcatccacccacttggcgtgccacagcgccgaccgcctccggggcagcatggacccgacacagctggcgagagtggcgcggaacttggcgtccccggggcggagcatggcgggcagtggcagcctgctgaccccgcgcgcggcgcaggcctcgtaacgcggcacgatgcgcgtggccagcgcgtangagaagtactcggggaagtcgtacagctcgtcggcgcggcgggccatggcgcccaggaggtagtccgcctnnagccggntgtttccctccacgccgtacccgaagagcgcggggaagcggcgcgccatggagcgggcggcgcgcgccggcaggcccagcgactcgaggaactcgagccgcggcagcagcttgccctccacggagaaggatagcaggtcggcgcggcggtgcaggtcgggcacgccgagcgcgcgcaggaagtagagcgtgggccgcagccgcgccgccacgggagagacgagcaggcgcgggcgccgccggagcacgcgcgggaggtcggcctcggcgacgcccgcctcctccgtgaggaaccggagcgcggcctcgacggcctccgcggacacggacagcagctccgggcacatccccgccgcgcgccggaggtcggcgggcggcacgcccgcctcgagcagnncctgcnnnngngcccgcggccacgggcggcgacggcagcacgggctccggcgccgcgggcgggagacccggggccgcgaggctggtgggcctggtccgcagcnngacggcgacgacgcgtagcctgntgcggcgcggcgccgccggcctgggcccagattccatgccctcgtgccctagcagggccagggcggtgcgggtggcggccatagtccccgtcgctcgcaggtttctctttttctctgtagtggtgaggcgtaaagaggataagggtgtgagatggatctggtcgaaccaccgcacgggcacgagtagtggtggtctcgagaaatgtctaaaaaggtgtttttt

SEQ ID NO: 10301 - protein, 161 aa, Zea mays subsp. mays
  peptide (1)..(161): Ceres Seq. ID no. 12364891
  misc_feature (92)..(92): Xaa is any aa, unknown or other
  misc_feature (115)..(115): Xaa is any aa, unknown or other
  misc_feature (116)..(116): Xaa is any aa, unknown or other
  misc_feature (118)..(118): Xaa is any aa, unknown or other
MLHHQEARASRSLPMRTSHRGLLRRRRRVVIHPLGVPQRRPPPGQHGPDTAGESGAELGVPGAEHGGQWQPADPARGAGLVTRHDARGQRVXEVLGEVVQLVGAAGHGAQEVVRXXPXVSLHAVPEERGEAARHGAGGARRQAQRLEELEPRQQLALHGEG

SEQ ID NO: 10302 - protein, 147 aa, Zea mays subsp. mays
  peptide (1)..(147): Ceres Seq. ID no. 12364892
  misc_feature (78)..(78): Xaa is any aa, unknown or other
  misc_feature (101)..(101): Xaa is any aa, unknown or other
  misc_feature (102)..(102): Xaa is any aa, unknown or other
  misc_feature (104)..(104): Xaa is any aa, unknown or other
MRTSHRGLLRRRRRVVIHPLGVPQRRPPPGQHGPDTAGESGAELGVPGAEHGGQWQPADPARGAGLVTRHDARGQRVXEVLGEVVQLVGAAGHGAQEVVRXXPXVSLHAVPEERGEAARHGAGGARRQAQRLEELEPRQQLALHGEG

SEQ ID NO: 10303 - protein, 99 aa, Zea mays subsp. mays
  peptide (1)..(99): Ceres Seq. ID no. 12364893
  misc_feature (55)..(99): Homolog of NCBI NO: 29247944 NR Description: GLP_26_54603_52153 [Giardia lamblia ATCC 50803]
  misc_feature (49)..(99): Homolog of NCBI NO: 29829093 NR Description: putative translation initiation factor IF-2
  misc_feature (47)..(99): Homolog of NCBI NO: 29247944 NR Description: GLP_26_54603_52153 [Giardia lamblia ATCC 50803]
  misc_feature (52)..(99): Homolog of NCBI NO: 23106243 NR Description: hypothetical protein [Azotobacter vinelandii]
  misc_feature (43)..(99): Homolog of NCBI NO: 22960029 NR Description: hypothetical protein [Rhodobacter sphaeroides]
  misc_feature (31)..(99): Homolog of NCBI NO: 6690017 NR Description: NTR [Herpesvirus papio]
  misc_feature (49)..(99): Homolog of NCBI NO: 22957039 NR Description: hypothetical protein [Rhodobacter sphaeroides]
  misc_feature (47)..(99): Homolog of NCBI NO: 13559031 NR Description: bA11M20.1 (TATA box binding protein
  misc_feature (56)..(99): Homolog of NCBI NO: 2498095 NR Description: 5E5 ANTIGEN >gi|1085558|pir||JC4163 DNA-binding
  misc_feature (31)..(67): Homolog of NCBI NO: 93144 NR Description: hypothetical protein - suid herpesvirus 1 (strain
  misc_feature (55)..(99): Homolog of NCBI NO: 29247944 NR Description: GLP_26_54603_52153 [Giardia lamblia ATCC 50803]
  misc_feature (49)..(99): Homolog of NCBI NO: 29829093 NR Description: putative translation initiation factor IF-2
  misc_feature (47)..(99): Homolog of NCBI NO: 29247944 NR Description: GLP_26_54603_52153 [Giardia lamblia ATCC 50803]
  misc_feature (52)..(99): Homolog of NCBI NO: 23106243 NR Description: hypothetical protein [Azotobacter vinelandii]
  misc_feature (43)..(99): Homolog of NCBI NO: 22960029 NR Description: hypothetical protein [Rhodobacter sphaeroides]
  misc_feature (31)..(99): Homolog of NCBI NO: 6690017 NR Description: NTR [Herpesvirus papio]
  misc_feature (49)..(99): Homolog of NCBI NO: 22957039 NR Description: hypothetical protein [Rhodobacter sphaeroides]
  misc_feature (47)..(99): Homolog of NCBI NO: 13559031 NR Description: bA11M20.1 (TATA box binding protein
  misc_feature (56)..(99): Homolog of NCBI NO: 2498095 NR Description: 5E5 ANTIGEN >gi|1085558|pir||JC4163 DNA-binding
  misc_feature (31)..(67): Homolog of NCBI NO: 93144 NR Description: hypothetical protein - suid herpesvirus 1 (strain
IVHWEDQLDNSSWLSYFTSSQCRSLWTYVTPPRGKSLSLATNAHVTPWSPSPPPPRRHPPTWRATAPTASGAAWTRHSWREWRGTWRPRGGAWRAVAAC

SEQ ID NO: 10304 - DNA, 1441 bp, Zea mays subsp. mays
  misc_feature (1)..(1441): Ceres Seq. ID no. 12383271
  misc_feature: MA Experiment ID: 108527 Result: Down-regulated in Transcription
  misc_feature: MA Experiment 108527 PARAMETER Experiment Name: Zm_5mM_NO_P Parameter: Age (day) Value: 8
  misc_feature: MA Experiment 108527 PARAMETER Experiment Name: Zm_5mM_NO_P Parameter: Organism Value: Zea mays
  misc_feature: MA Experiment 108527 PARAMETER Experiment Name: Zm_5mM_NO_P Parameter: Plant Line Value: 35A19
  misc_feature: MA Experiment 108527 PARAMETER Experiment Name: Zm_5mM_NO_P Parameter: Timepoint (hr) Value: 6
  misc_feature: MA Experiment 108527 PARAMETER Experiment Name: Zm_5mM_NO_P Parameter: Tissue Value: Aerial
  misc_feature: MA Experiment 108527 PARAMETER Experiment Name: Zm_5mM_NO_P Parameter: Treatment Value: 5mM NO vs. No Treatment
  misc_feature: MA Experiment ID: 108528 Result: Up-regulated in Transcription
  misc_feature: MA Experiment 108528 PARAMETER Experiment Name: Zm_Imbibed_Seeds_P Parameter: Age (day) Value: 5 vs. 2
  misc_feature: MA Experiment 108528 PARAMETER Experiment Name: Zm_Imbibed_Seeds_P Parameter: Organism Value: Zea mays
  misc_feature: MA Experiment 108528 PARAMETER Experiment Name: Zm_Imbibed_Seeds_P Parameter: Plant Line Value: 35A19
  misc_feature: MA Experiment 108528 PARAMETER Experiment Name: Zm_Imbibed_Seeds_P Parameter: Tissue Value: Aerial vs. Embryo
  misc_feature: MA Experiment ID: 108529 Result: Up-regulated in Transcription
  misc_feature: MA Experiment 108529 PARAMETER Experiment Name: Zm_Imbibed_Seeds_P Parameter: Age (day) Value: 5 vs. 2
  misc_feature: MA Experiment 108529 PARAMETER Experiment Name: Zm_Imbibed_Seeds_P Parameter: Organism Value: Zea mays
  misc_feature: MA Experiment 108529 PARAMETER Experiment Name: Zm_Imbibed_Seeds_P Parameter: Plant Line Value: 35A19
  misc_feature: MA Experiment 108529 PARAMETER Experiment Name: Zm_Imbibed_Seeds_P Parameter: Tissue Value: Roots vs. Embryo
  misc_feature: MA Experiment ID: 108530 Result: Up-regulated in Transcription
  misc_feature: MA Experiment 108530 PARAMETER Experiment Name: Zm_Imbibed_Seeds_P Parameter: Age (day) Value: 6 vs. 2
  misc_feature: MA Experiment 108530 PARAMETER Experiment Name: Zm_Imbibed_Seeds_P Parameter: Organism Value: Zea mays
  misc_feature: MA Experiment 108530 PARAMETER Experiment Name: Zm_Imbibed_Seeds_P Parameter: Plant Line Value: 35A19
  misc_feature: MA Experiment 108530 PARAMETER Experiment Name: Zm_Imbibed_Seeds_P Parameter: Tissue Value: Aerial vs. Embryo
  misc_feature: MA Experiment ID: 108534 Result: Down-regulated in Transcription
  misc_feature: MA Experiment 108534 PARAMETER Experiment Name: Zm_4deg_Cold_P Parameter: Age (hr) Value: 8
  misc_feature: MA Experiment 108534 PARAMETER Experiment Name: Zm_4deg_Cold_P Parameter: Organism Value: Zea mays
  misc_feature: MA Experiment 108534 PARAMETER Experiment Name: Zm_4deg_Cold_P Parameter: Plant Line Value: 35A19
  misc_feature: MA Experiment 108534 PARAMETER Experiment Name: Zm_4deg_Cold_P Parameter: Temperature (deg C) Value: 4 vs. 22
  misc_feature: MA Experiment 108534 PARAMETER Experiment Name: Zm_4deg_Cold_P Parameter: Timepoint (hr) Value: 6
  misc_feature: MA Experiment 108534 PARAMETER Experiment Name: Zm_4deg_Cold_P Parameter: Tissue Value: Aerial
  misc_feature: MA Experiment ID: 108535 Result: Down-regulated in Transcription
  misc_feature: MA Experiment 108535 PARAMETER Experiment Name: Zm_Meristem_P Parameter: Age (day) Value: 8
  misc_feature: MA Experiment 108535 PARAMETER Experiment Name: Zm_Meristem_P Parameter: Organism Value: Zea mays
  misc_feature: MA Experiment 108535 PARAMETER Experiment Name: Zm_Meristem_P Parameter: Plant Line Value: 35A19
  misc_feature: MA Experiment 108535 PARAMETER Experiment Name: Zm_Meristem_P Parameter: Tissue Value: Root Meristem vs. Above Root Meristem
  misc_feature: MA Experiment ID: 108540 Result: Down-regulated in Transcription
  misc_feature: MA Experiment 108540 PARAMETER Experiment Name: Zm_20percent_PEG_P Parameter: Age (day) Value: 8
  misc_feature: MA Experiment 108540 PARAMETER Experiment Name: Zm_20percent_PEG_P Parameter: Organism Value: Zea mays
  misc_feature: MA Experiment 108540 PARAMETER Experiment Name: Zm_20percent_PEG_P Parameter: Plant Line Value: 35A19
  misc_feature: MA Experiment 108540 PARAMETER Experiment Name: Zm_20percent_PEG_P Parameter: Timepoint (hr) Value: 6
  misc_feature: MA Experiment 108540 PARAMETER Experiment Name: Zm_20percent_PEG_P Parameter: Tissue Value: Aerial
  misc_feature: MA Experiment 108540 PARAMETER Experiment Name: Zm_20percent_PEG_P Parameter: Treatment Value: 20percent PEG vs. No Treatment
  misc_feature: MA Experiment ID: 108545 Result: Up-regulated in Transcription
  misc_feature: MA Experiment 108545 PARAMETER Experiment Name: Zm_Imbibed_Seeds_P Parameter: Age (day) Value: 3 vs. 2
  misc_feature: MA Experiment 108545 PARAMETER Experiment Name: Zm_Imbibed_Seeds_P Parameter: Organism Value: Zea mays
  misc_feature: MA Experiment 108545 PARAMETER Experiment Name: Zm_Imbibed_Seeds_P Parameter: Plant Line Value: 35A19
  misc_feature: MA Experiment 108545 PARAMETER Experiment Name: Zm_Imbibed_Seeds_P Parameter: Tissue Value: Aerial vs. Embryo
  misc_feature: MA Experiment ID: 108546 Result: Up-regulated in Transcription
  misc_feature: MA Experiment 108546 PARAMETER Experiment Name: Zm_Imbibed_Seeds_P Parameter: Age (day) Value: 3 vs. 2
  misc_feature: MA Experiment 108546 PARAMETER Experiment Name: Zm_Imbibed_Seeds_P Parameter: Organism Value: Zea mays
  misc_feature: MA Experiment 108546 PARAMETER Experiment Name: Zm_Imbibed_Seeds_P Parameter: Plant Line Value: 35A19
  misc_feature: MA Experiment 108546 PARAMETER Experiment Name: Zm_Imbibed_Seeds_P Parameter: Tissue Value: Roots vs. Embryo
  misc_feature: MA Experiment ID: 108547 Result: Up-regulated in Transcription
  misc_feature: MA Experiment 108547 PARAMETER Experiment Name: Zm_Imbibed_Seeds_P Parameter: Age (day) Value: 4 vs. 2
  misc_feature: MA Experiment 108547 PARAMETER Experiment Name: Zm_Imbibed_Seeds_P Parameter: Organism Value: Zea mays
  misc_feature: MA Experiment 108547 PARAMETER Experiment Name: Zm_Imbibed_Seeds_P Parameter: Plant Line Value: 35A19
  misc_feature: MA Experiment 108547 PARAMETER Experiment Name: Zm_Imbibed_Seeds_P Parameter: Tissue Value: Aerial vs. Embryo
  misc_feature: MA Experiment ID: 108559 Result: Down-regulated in Transcription
  misc_feature: MA Experiment 108559 PARAMETER Experiment Name: Zm_5mM_NO_P Parameter: Age (day) Value: 8
  misc_feature: MA Experiment 108559 PARAMETER Experiment Name: Zm_5mM_NO_P Parameter: Organism Value: Zea mays
  misc_feature: MA Experiment 108559 PARAMETER Experiment Name: Zm_5mM_NO_P Parameter: Plant Line Value: 35A19
  misc_feature: MA Experiment 108559 PARAMETER Experiment Name: Zm_5mM_NO_P Parameter: Timepoint (hr) Value: 12
  misc_feature: MA Experiment 108559 PARAMETER Experiment Name: Zm_5mM_NO_P Parameter: Tissue Value: Aerial
  misc_feature: MA Experiment 108559 PARAMETER Experiment Name: Zm_5mM_NO_P Parameter: Treatment Value: 5mM NO vs. No Treatment
  misc_feature: MA Experiment ID: 108597 Result: Down-regulated in Transcription
  misc_feature: MA Experiment 108597 PARAMETER Experiment Name: Zm_100uM_ABA_P Parameter: Age (day) Value: 9
  misc_feature: MA Experiment 108597 PARAMETER Experiment Name: Zm_100uM_ABA_P Parameter: Organism Value: Zea mays
  misc_feature: MA Experiment 108597 PARAMETER Experiment Name: Zm_100uM_ABA_P Parameter: Plant Line Value: 35A19
  misc_feature: MA Experiment 108597 PARAMETER Experiment Name: Zm_100uM_ABA_P Parameter: Timepoint (hr) Value: 24
  misc_feature: MA Experiment 108597 PARAMETER Experiment Name: Zm_100uM_ABA_P Parameter: Tissue Value: Aerial
  misc_feature: MA Experiment 108597 PARAMETER Experiment Name: Zm_100uM_ABA_P Parameter: Treatment Value: 100uM ABA vs. No Treatment
  misc_feature: MA Experiment ID: 20000108 Result: Down-regulated in Transcription
  misc_feature: MA Experiment 20000108 PARAMETER Experiment Name: Zm_Root-Tips_P Parameter: Age (day) Value: 12
  misc_feature: MA Experiment 20000108 PARAMETER Experiment Name: Zm_Root-Tips_P Parameter: Organism Value: Zea mays
  misc_feature: MA Experiment 20000108 PARAMETER Experiment Name: Zm_Root-Tips_P Parameter: Tissue Value: Root tips vs. Root mid region    35
  misc_feature: MA Experiment 20000108 PARAMETER Experiment Name: Zm_Root-Tips_P Parameter: Tissue Value: Root tips vs. Root mid region   Sequence Listing-Misc Features (4)
atcccctcagtcctcagtccctcacacactcactatacactgctctgctgcagcaagaaggaagaagctagcgcctccctagctctcgttgtcagcaatggccaccaccgccgcgtccagcctcctcaagtcctccttcgcgggctcccggctcccttcggccacgcgcaccaccaccccgtcgtccgtggccgtggccaccccgcgcgccggcggcggccccatccgcgcgtccatctcctcccccaacccgccctacgacctgacgtccttccggttcagccccatcaaggagtccatcgtgtcccgcgagatgacccggcgctacatgacggacatgatcacccacgccgacaccgacgtggtgatcgtgggcgccgggtccgcgggcctgtcctgcgcgtacgagctgtccaaggaccccaccgtgagcgtcgccatcgtggagcagtccgtgtccccgggcggcggcgcgtggctgggcgggcagctgttctcggccatggtggtgcgcaggccggcgcacctgttcctggacgagctgggcgtgggctacgacgaggccgaggactacgtggtggtcaagcacgcggcgctgttcacgtccaccgtgatgagccggctcctggcgcggcccaacgtgaagctgttcaacgccgtggcggtggaggacctgatcgtgcggcgggggcgcgtcggcggcgtggtcaccaactgggcgctcgtgtccatgaaccacgacacgcagtcgtgcatggaccccaacgtgatggaggccaaggtggtggtcagctcctgcggccacgacgggcccttcggcgccaccggcgtcaagaggctccaggacatcggcatgatcagcgccgtgcccgggatgaaggcgctcgacatgaacgccgccgaggacgagatcgtgcgcctcacgcgcgaggtcgtgcccggcatgatcgtcaccgggatggaggtcgccgagatcgacggcgccccgaggatgggcccgacgttcggcgccatgatgatctccggccagaaggcggcgcacctggcgctgaaggcactgggcaggcccaacgccgtggacgggaccatccccgaggtgtcgccggcgctgcgcgaggagttcgtgattgcatccaaggacgacgaggtcgtggacgcctgagcgagcatccacgcgccagcatgcaagcagcgtcttatctgggccggcgccatcacggggtttcttcttttaatctgggactttgttgttgttggacgaatgaattcccttcgatcggttagctttaatctgtctcgttagtgtgtcgtgttcgtgtagcaccatgccacagctacgccatgccgtgtgctctgtcacgtgggggccactcgtggggtctcctgctgctgtcagaacgaataagagaagatggaattgtggtgaaaaaaaaaaaaaaaa

SEQ ID NO: 10305 - protein, 427 aa, Zea mays subsp. mays
  peptide (1)..(427): Ceres Seq. ID no. 12383272
  misc_feature (156)..(380): Pfam Name: HlyD family secretion protein Pfam Description: HlyD family secretion protein
  misc_feature (62)..(407): Homolog of NCBI NO: 23018055 NR Description: hypothetical protein [Thermobifida fusca]
  misc_feature (106)..(404): Homolog of NCBI NO: 22958051 NR Description: hypothetical protein [Rhodobacter sphaeroides]
  misc_feature (134)..(337): Homolog of NCBI NO: 17569267 NR Description: Putative nuclear protein, nematode specific
IPSVLSPSHTHYTLLCCSKKEEASASLALVVSNGHHRRVQPPQVLLRGLPAPFGHAHHHPVVRGRGHPARRRRPHPRVHLLPQPALRPDVLPVQPHQGVHRVPRDDPALHDGHDHPRRHRRGDRGRRVRGPVLRVRAVQGPHRERRHRGAVRVPGRRRVAGRAAVLGHGGAQAGAPVPGRAGRGLRRGRGLRGGQARGAVHVHRDEPAPGAAQREAVQRRGGGGPDRAAGARRRRGHQLGARVHEPRHAVVHGPQRDGGQGGGQLLRPRRALRRHRRQEAPGHRHDQRRARDEGARHERRRGRDRAPHARGRARHDRHRDGGRRDRRRPEDGPDVRRHDDLRPEGGAPGAEGTGQAQRRGRDHPRGVAGAARGVRDCIQGRRGRGRLSEHPRASMQAASYLGRRHHGVSSFNLGLCCCWTNEFPSIG

SEQ ID NO: 10306 - protein, 354 aa, Zea mays subsp. mays
  peptide (1)..(354): Ceres Seq. ID no. 12383273
  misc_feature (60)..(303): Pfam Name: Thi4 family Pfam Description: Thi4 family
  misc_feature (1)..(354): Homolog of NCBI NO: 2501190 NR Description: Thiazole biosynthetic enzyme 1-2, chloroplast
  misc_feature (1)..(354): Homolog of NCBI NO: 2501189 NR Description: Thiazole biosynthetic enzyme 1-1, chloroplast
  misc_feature (1)..(354): Homolog of NCBI NO: 27261025 NR Description: putative thiamine biosynthetic enzyme [Oryza
  misc_feature (1)..(354): Homolog of NCBI NO: 6094476 NR Description: Thiazole biosynthetic enzyme, chloroplast
MATTAASSLLKSSFAGSRLPSATRTTTPSSVAVATPRAGGGPIRASISSPNPPYDLTSFRFSPIKESIVSREMTRRYMTDMITHADTDVVIVGAGSAGLSCAYELSKDPTVSVAIVEQSVSPGGGAWLGGQLFSAMVVRRPAHLFLDELGVGYDEAEDYVVVKHAALFTSTVMSRLLARPNVKLFNAVAVEDLIVRRGRVGGVVTNWALVSMNHDTQSCMDPNVMEAKVVVSSCGHDGPFGATGVKRLQDIGMISAVPGMKALDMNAAEDEIVRLTREVVPGMIVTGMEVAEIDGAPRMGPTFGAMMISGQKAAHLALKALGRPNAVDGTIPEVSPALREEFVIASKDDEVVDA

SEQ ID NO: 10307 - protein, 282 aa, Zea mays subsp. mays
  peptide (1)..(282): Ceres Seq. ID no. 12383274
  misc_feature (1)..(231): Pfam Name: Thi4 family Pfam Description: Thi4 family
  misc_feature (1)..(282): Homolog of NCBI NO: 2501190 NR Description: Thiazole biosynthetic enzyme 1-2, chloroplast
  misc_feature (1)..(282): Homolog of NCBI NO: 2501189 NR Description: Thiazole biosynthetic enzyme 1-1, chloroplast
  misc_feature (1)..(282): Homolog of NCBI NO: 27261025 NR Description: putative thiamine biosynthetic enzyme [Oryza
  misc_feature (1)..(282): Homolog of NCBI NO: 6094476 NR Description: Thiazole biosynthetic enzyme, chloroplast
MTRRYMTDMITHADTDVVIVGAGSAGLSCAYELSKDPTVSVAIVEQSVSPGGGAWLGGQLFSAMVVRRPAHLFLDELGVGYDEAEDYVVVKHAALFTSTVMSRLLARPNVKLFNAVAVEDLIVRRGRVGGVVTNWALVSMNHDTQSCMDPNVMEAKVVVSSCGHDGPFGATGVKRLQDIGMISAVPGMKALDMNAAEDEIVRLTREVVPGMIVTGMEVAEIDGAPRMGPTFGAMMISGQKAAHLALKALGRPNAVDGTIPEVSPALREEFVIASKDDEVVDA

SEQ ID NO: 10308 - DNA, 1687 bp, Zea mays subsp. mays
  misc_feature (1)..(1687): Ceres Seq. ID no. 12345075
  misc_feature: MA Experiment ID: 108523 Result: Up-regulated in Transcription
  misc_feature: MA Experiment 108523 PARAMETER Experiment Name: Zm_42deg_Heat_P Parameter: Age (day) Value: 8
  misc_feature: MA Experiment 108523 PARAMETER Experiment Name: Zm_42deg_Heat_P Parameter: Organism Value: Zea mays
  misc_feature: MA Experiment 108523 PARAMETER Experiment Name: Zm_42deg_Heat_P Parameter: Plant Line Value: 35A19
  misc_feature: MA Experiment 108523 PARAMETER Experiment Name: Zm_42deg_Heat_P Parameter: Temperature (deg C) Value: 42 vs. 22
  misc_feature: MA Experiment 108523 PARAMETER Experiment Name: Zm_42deg_Heat_P Parameter: Timepoint (hr) Value: 6
  misc_feature: MA Experiment 108523 PARAMETER Experiment Name: Zm_42deg_Heat_P Parameter: Tissue Value: Aerial
gctccacgtcacgacgccgcatctaaccctccggcgactcatcgccggcgagccggtccgccacgccatagcctcgtcctgaagcgcacttaatcctacgtctcgttcctctctcgcccccggtaccctccataggcatgggaatggggtctgcgagagggggcgcagggggatggctccccggcgagcggtggcggcgggtcatcttcctcgctctggcggccgtctcgttcctcatctcactcatactcctcttcctatccgcgccgcgtctccgcctcccaagtgtcgtcctgccttacaccaccgcttccgcttctgccgtccgccgcgggcccggcgagccgccctgcctggtgtacctgctgaccggcgcgcgcggcgacgggcgccgcctcctcaggctcctcctcgcggtttaccacccgcgcaaccggtacgtgctccacctctccgccgacgcgccagacgacgagcgcctgagcctcgccaccggggtcgtcgccgcggcgcccgccgtgggagcattcgagaacgtggttattattggcaatcccaccgccgggacgcccgtggggtcctccggactcgcccggcacgctccgcgctgcggccgtgctgctccggctccacgctgactgggactggttcctcaccctcaatgccgccgactaccccctcgtcacacaggatgacctgattcatgtcctttcttctgtcccaagggatcttaacttcattgaccacaccggtgacgttggatcaaaagaacctgagaaagttcaacaaattatagtcgatgctggaatttacttgtcagggaggaccaacttctttcgaggaacacagaaacgagcagctcctgaggcttttaagttctttacaggttctccatgggtcatattaaaccggcaatttatagagtactgcattcttgcttgggagaatctccctaggattcttctcatgtacttcaacaatgtaatacaacctcaggaagggtatttccagacagtcatctgcaactcactggacttccgtaatttcactgtgaacaatgacttgaggttcatggtgcaagatgattccgctcagaaaaagtcccttttcacgagcagggaacattatggtcacatggtggatagtggggcacccttcgcaaggccgtttcaggagaatgatcctctgctggaccagatcgacggcaatatactcaagcgttggagccatggacagttcctggtgcttggtgcacaggaaggaagaggtggttcagtgatccatgttcccagtggggcgatgtgaatgttttgagaccaggtcctcaagcagtgatgttgcaccaatatgtaaatcggaccttagaagaagcaaagtctagcagcaattcatgcaggcggtagcagcattggcgtctagaacctcatgtcccatggttgaaagctttgagctttttccgcttatccactaagggttctccactctgctgaataaatagctgccacatgtctaagctgaaacaagcactcgtcgcacctggaacaaagccatggagggatgttcttttctgatattttcatgatgactatcatagtcacggatcaggagtttcactttggtctgtgattaatctgtgcaatccccatatttggctcatataacacttccaggcgctgataataggctg

SEQ ID NO: 10309 - protein, 175 aa, Zea mays subsp. mays
  peptide (1)..(175): Ceres Seq. ID no. 12345076
  misc_feature (1)..(166): Homolog of NCBI NO: 15219287 NR Description: arginine/serine-rich protein, putative; protein At1g16610.1, supported by cDNA: gi_15027956, supported by cDNA:
  misc_feature (1)..(166): Homolog of NCBI NO: 15027957 NR Description: putative arginine/serine-rich protein
  misc_feature (1)..(152): Homolog of NCBI NO: 29247944 NR Description: GLP_26_54603_52153 [Giardia lamblia ATCC 50803]
MAPRRAVAAGHLPRSGGRLVPHLTHTPLPIRAASPPPKCRPALHHRFRFCRPPRARRAALPGVPADRRARRRAPPPQAPPRGLPPAQPVRAPPLRRRARRRAPEPRHRGRRRGARRGSIRERGYYWQSHRRDARGVLRTRPARSALRPCCSGSTLTGTGSSPSMPPTTPSSHRMT

SEQ ID NO: 10310 - protein, 166 aa, Zea mays subsp. mays
  peptide (1)..(166): Ceres Seq. ID no. 12345077
  misc_feature (75)..(152): Pfam Name: Core-2/I-Branching enzyme Pfam Description: Core-2/I-Branching enzyme
  misc_feature (25)..(152): Homolog of NCBI NO: 34895394 NR Description: P0445D12.4 [Oryza sativa (japonica
  misc_feature (28)..(152): Homolog of NCBI NO: 18409754 NR Description: N-acetylglucosaminyltransferase family enzyme family); protein id: At1g71070.1, supported by cDNA:
  misc_feature (67)..(137): Homolog of NCBI NO: 15242199 NR Description: N-acetylglucosaminyltransferase family enzyme family); protein id: At5g15050.1, supported by cDNA: supported by cDNA: gi_16209673 [Arabidopsis thaliana]
  misc_feature (57)..(152): Homolog of NCBI NO: 32489778 NR Description: OSJNBb0018A10.9 [Oryza sativa (japonica
  misc_feature (70)..(155): Homolog of NCBI NO: 15242532 NR Description: N-acetylglucosaminyltransferase family
  misc_feature (69)..(152): Homolog of NCBI NO: 15218824 NR Description: N-acetylglucosaminyltransferase family enzyme family); protein id: At1g03520.1, supported by cDNA: supported by cDNA: gi_20465790 [Arabidopsis thaliana] thaliana
  misc_feature (69)..(152): Homolog of NCBI NO: 15236287 NR Description: N-acetylglucosaminyltransferase family
  misc_feature (70)..(152): Homolog of NCBI NO: 15229570 NR Description: hypothetical protein; protein id: At3g24040.1 thaliana] >gi|9294673|dbj|BAB03022.1|
  misc_feature (32)..(152): Homolog of NCBI NO: 18404468 NR Description: N-acetylglucosaminyltransferase family enzyme family); protein id: At2g37585.1 [Arabidopsis thaliana]
  misc_feature (71)..(152): Homolog of NCBI NO: 7485441 NR Description: probable RING zinc finger protein [imported] -
MGMGSARGGAGGWLPGERWRRVIFLALAAVSFLISLILLFLSAPRLRLPSVVLPYTTASASAVRRGPGEPPCLVYLLTGARGDGRRLLRLLLAVYHPRNRYVLHLSADAPDDERLSLATGVVAAAPAVGAFENVVIIGNPTAGTPVGSSGLARHAPRCGRAAPAPR

SEQ ID NO: 10311 - protein, 164 aa, Zea mays subsp. mays
  peptide (1)..(164): Ceres Seq. ID no. 12345078
  misc_feature (73)..(150): Pfam Name: Core-2/I-Branching enzyme Pfam Description: Core-2/I-Branching enzyme
  misc_feature (23)..(150): Homolog of NCBI NO: 34895394 NR Description: P0445D12.4 [Oryza sativa (japonica
  misc_feature (26)..(150): Homolog of NCBI NO: 18409754 NR Description: N-acetylglucosaminyltransferase family enzyme family); protein id: At1g71070.1, supported by cDNA:
  misc_feature (65)..(135): Homolog of NCBI NO: 15242199 NR Description: N-acetylglucosaminyltransferase family enzyme family); protein id: At5g15050.1, supported by cDNA: supported by cDNA: gi_16209673 [Arabidopsis thaliana]
  misc_feature (55)..(150): Homolog of NCBI NO: 32489778 NR Description: OSJNBb0018A10.9 [Oryza sativa (japonica
  misc_feature (68)..(153): Homolog of NCBI NO: 15242532 NR Description: N-acetylglucosaminyltransferase family
  misc_feature (67)..(150): Homolog of NCBI NO: 15218824 NR Description: N-acetylglucosaminyltransferase family enzyme family); protein id: At1g03520.1, supported by cDNA: supported by cDNA: gi_20465790 [Arabidopsis thaliana] thaliana
  misc_feature (67)..(150): Homolog of NCBI NO: 15236287 NR Description: N-acetylglucosaminyltransferase family
  misc_feature (68)..(150): Homolog of NCBI NO: 15229570 NR Description: hypothetical protein; protein id: At3g24040.1 thaliana] >gi|9294673|dbj|BAB03022.1|
  misc_feature (30)..(150): Homolog of NCBI NO: 18404468 NR Description: N-acetylglucosaminyltransferase family enzyme family); protein id: At2g37585.1 [Arabidopsis thaliana]
  misc_feature (69)..(150): Homolog of NCBI NO: 7485441 NR Description: probable RING zinc finger protein [imported] -
MGSARGGAGGWLPGERWRRVIFLALAAVSFLISLILLFLSAPRLRLPSVVLPYTTASASAVRRGPGEPPCLVYLLTGARGDGRRLLRLLLAVYHPRNRYVLHLSADAPDDERLSLATGVVAAAPAVGAFENVVIIGNPTAGTPVGSSGLARHAPRCGRAAPAPR

SEQ ID NO: 10312 - DNA, 774 bp, Zea mays subsp. mays
  misc_feature (1)..(774): Ceres Seq. ID no. 12367092
  misc_feature: MA Experiment ID: 108529 Result: Up-regulated in Transcription
  misc_feature: MA Experiment 108529 PARAMETER Experiment Name: Zm_Imbibed_Seeds_P Parameter: Age (day) Value: 5 vs. 2
  misc_feature: MA Experiment 108529 PARAMETER Experiment Name: Zm_Imbibed_Seeds_P Parameter: Organism Value: Zea mays
  misc_feature: MA Experiment 108529 PARAMETER Experiment Name: Zm_Imbibed_Seeds_P Parameter: Plant Line Value: 35A19
  misc_feature: MA Experiment 108529 PARAMETER Experiment Name: Zm_Imbibed_Seeds_P Parameter: Tissue Value: Roots vs. Embryo
  misc_feature: MA Experiment ID: 108534 Result: Down-regulated in Transcription
  misc_feature: MA Experiment 108534 PARAMETER Experiment Name: Zm_4deg_Cold_P Parameter: Age (hr) Value: 8
  misc_feature: MA Experiment 108534 PARAMETER Experiment Name: Zm_4deg_Cold_P Parameter: Organism Value: Zea mays
  misc_feature: MA Experiment 108534 PARAMETER Experiment Name: Zm_4deg_Cold_P Parameter: Plant Line Value: 35A19
  misc_feature: MA Experiment 108534 PARAMETER Experiment Name: Zm_4deg_Cold_P Parameter: Temperature (deg C) Value: 4 vs. 22
  misc_feature: MA Experiment 108534 PARAMETER Experiment Name: Zm_4deg_Cold_P Parameter: Timepoint (hr) Value: 6
  misc_feature: MA Experiment 108534 PARAMETER Experiment Name: Zm_4deg_Cold_P Parameter: Tissue Value: Aerial
  misc_feature: MA Experiment ID: 108535 Result: Down-regulated in Transcription
  misc_feature: MA Experiment 108535 PARAMETER Experiment Name: Zm_Meristem_P Parameter: Age (day) Value: 8
  misc_feature: MA Experiment 108535 PARAMETER Experiment Name: Zm_Meristem_P Parameter: Organism Value: Zea mays
  misc_feature: MA Experiment 108535 PARAMETER Experiment Name: Zm_Meristem_P Parameter: Plant Line Value: 35A19
  misc_feature: MA Experiment 108535 PARAMETER Experiment Name: Zm_Meristem_P Parameter: Tissue Value: Root Meristem vs. Above Root Meristem
  misc_feature: MA Experiment ID: 108556 Result: Up-regulated in Transcription
  misc_feature: MA Experiment 108556 PARAMETER Experiment Name: Zm_Drought_P Parameter: Age (day) Value: 9
  misc_feature: MA Experiment 108556 PARAMETER Experiment Name: Zm_Drought_P Parameter: Organism Value: Zea mays
  misc_feature: MA Experiment 108556 PARAMETER Experiment Name: Zm_Drought_P Parameter: Plant Line Value: 35A19
  misc_feature: MA Experiment 108556 PARAMETER Experiment Name: Zm_Drought_P Parameter: Timepoint (hr) Value: 24
  misc_feature: MA Experiment 108556 PARAMETER Experiment Name: Zm_Drought_P Parameter: Tissue Value: Aerial
  misc_feature: MA Experiment 108556 PARAMETER Experiment Name: Zm_Drought_P Parameter: Treatment Value: Drought vs. No Drought
  misc_feature: MA Experiment ID: 20000108 Result: Down-regulated in Transcription
  misc_feature: MA Experiment 20000108 PARAMETER Experiment Name: Zm_Root-Tips_P Parameter: Age (day) Value: 12
  misc_feature: MA Experiment 20000108 PARAMETER Experiment Name: Zm_Root-Tips_P Parameter: Organism Value: Zea mays
  misc_feature: MA Experiment 20000108 PARAMETER Experiment Name: Zm_Root-Tips_P Parameter: Tissue Value: Root tips vs. Root mid region    35
  misc_feature: MA Experiment 20000108 PARAMETER Experiment Name: Zm_Root-Tips_P Parameter: Tissue Value: Root tips vs. Root mid region   Sequence Listing-Misc Features (4)
  misc_feature: MA Experiment ID: 20000479 Result: Up-regulated in Transcription
  misc_feature: MA Experiment 20000479 PARAMETER Experiment Name: Zm_Drought_P Parameter: Age (day) Value: 10
  misc_feature: MA Experiment 20000479 PARAMETER Experiment Name: Zm_Drought_P Parameter: Organism Value: Zea mays
  misc_feature: MA Experiment 20000479 PARAMETER Experiment Name: Zm_Drought_P Parameter: Plant Line Value: 35A19
  misc_feature: MA Experiment 20000479 PARAMETER Experiment Name: Zm_Drought_P Parameter: Timepoint (hr) Value: 48
  misc_feature: MA Experiment 20000479 PARAMETER Experiment Name: Zm_Drought_P Parameter: Tissue Value: Aerial
  misc_feature: MA Experiment 20000479 PARAMETER Experiment Name: Zm_Drought_P Parameter: Treatment Value: Drought vs. No Drought
  misc_feature: MA Experiment ID: 20001608 Result: Down-regulated in Transcription
  misc_feature: MA Experiment 20001608 PARAMETER Experiment Name: Zm_50ppm_KNO3_L-to-H_P Parameter: Age (day) Value: 21
  misc_feature: MA Experiment 20001608 PARAMETER Experiment Name: Zm_50ppm_KNO3_L-to-H_P Parameter: Organism Value: Zea mays
  misc_feature: MA Experiment 20001608 PARAMETER Experiment Name: Zm_50ppm_KNO3_L-to-H_P Parameter: Plant Line Value: 35A19
  misc_feature: MA Experiment 20001608 PARAMETER Experiment Name: Zm_50ppm_KNO3_L-to-H_P Parameter: Timepoint (hr) Value: 48
  misc_feature: MA Experiment 20001608 PARAMETER Experiment Name: Zm_50ppm_KNO3_L-to-H_P Parameter: Tissue Value: Shoots
  misc_feature: MA Experiment 20001608 PARAMETER Experiment Name: Zm_50ppm_KNO3_L-to-H_P Parameter: Treatment Value: 50ppm KNO3 vs. 50ppm KCl
agtcatcatgactcactaagcactgtccttcctgatcccaccgcggtctccttccgcgacacgcgcacacgccacagcgcattcgcgtacgtcaacggacgtcgaacccatcgcccatgggaggagggcacgaggagcaggagggtggcggcgcaaaggccgggggctactcctccggtctcccgccgtcggagccgccgcaggagtacgggtacggcacgttccagggccctcggcatcctcccgtcgggttcccgcagcctgccccgcctcccgggttcggcggcggcggcggctaccacaaccagcaacagccgtacgcgcacgcggagacgtactacgcccaggggtaccaggccgtgccaggctatggtcctgttgctgaaggaagacctgtgagaatgaggcgtctcccatgttgtggcctcggcttaggctggtgcctgttcattgctgggtttttccttgctgccattccatggtacattggggctttcgttctgatatgcgtgcgggtacatgaccaccgagagaaaccaggatatgttgcttgcacaattgctgccgttgttgctgccgttgccatattcctgggggtaactaagggaacacacgtgtggtgaattgcttccagagaaggcaatggatttatacttgtatagtatctgtgtgtattaaaagtgtggagcgacatcgagatgctcttatgacttatgttcatacatattctactttgtaatgaaattttagatgtagtaatgcaccgtctgcttc

SEQ ID NO: 10313 - protein, 168 aa, Zea mays subsp. mays
  peptide (1)..(168): Ceres Seq. ID no. 12367093
  misc_feature (4)..(168): Homolog of NCBI NO: 18394436 NR Description: expressed protein; protein id: At1g17080.1, by cDNA: gi_15010587, supported by cDNA: gi_20453322 [Arabidopsis
  misc_feature (4)..(168): Homolog of NCBI NO: 21554011 NR Description: unknown [Arabidopsis thaliana]
  misc_feature (4)..(168): Homolog of NCBI NO: 18404524 NR Description: expressed protein; protein id: At1g53560.1, by cDNA: 19263., supported by cDNA: gi_20466665 [Arabidopsis >gi|25372875|pir||F96575 hypothetical protein F22G10.10
  misc_feature (30)..(168): Homolog of NCBI NO: 21593837 NR Description: 60S ribosomal protein L18A, putative [Arabidopsis
  misc_feature (30)..(168): Homolog of NCBI NO: 18397305 NR Description: 60S ribosomal protein L18A, putative; protein id:
  misc_feature (30)..(149): Homolog of NCBI NO: 25518134 NR Description: probable 60S ribosomal protein L18A - Arabidopsis >gi|12324168|gb|AAG52055.1|AC022455_9 60S ribosomal protein L18A,
  misc_feature (48)..(168): Homolog of NCBI NO: 18400450 NR Description: Expressed protein; protein id: At3g14595.1,
  misc_feature (48)..(168): Homolog of NCBI NO: 21554784 NR Description: unknown [Arabidopsis thaliana]
MGGGHEEQEGGGAKAGGYSSGLPPSEPPQEYGYGTFQGPRHPPVGFPQPAPPPGFGGGGGYHNQQQPYAHAETYYAQGYQAVPGYGPVAEGRPVRMRRLPCCGLGLGWCLFIAGFFLAAIPWYIGAFVLICVRVHDHREKPGYVACTIAAVVAAVAIFLGVTKGTHVW

SEQ ID NO: 10314 - protein, 132 aa, Zea mays subsp. mays
  peptide (1)..(132): Ceres Seq. ID no. 12367094
SHHDSLSTVLPDPTAVSFRDTRTRHSAFAYVNGRRTHRPWEEGTRSRRVAAQRPGATPPVSRRRSRRRSTGTARSRALGILPSGSRSLPRLPGSAAAAATTTSNSRTRTRRRTTPRGTRPCQAMVLLLKEDL

SEQ ID NO: 10315 - DNA, 1051 bp, Zea mays subsp. mays; identical to SEQ ID NO: 10154
  misc_feature (1)..(1051): Ceres Seq. ID no. 12544505
  misc_feature: MA Experiment ID: 108523 Result: Up-regulated in Transcription
  misc_feature: MA Experiment 108523 PARAMETER Experiment Name: Zm_42deg_Heat_P Parameter: Age (day) Value: 8
  misc_feature: MA Experiment 108523 PARAMETER Experiment Name: Zm_42deg_Heat_P Parameter: Organism Value: Zea mays
  misc_feature: MA Experiment 108523 PARAMETER Experiment Name: Zm_42deg_Heat_P Parameter: Plant Line Value: 35A19
  misc_feature: MA Experiment 108523 PARAMETER Experiment Name: Zm_42deg_Heat_P Parameter: Temperature (deg C) Value: 42 vs. 22
  misc_feature: MA Experiment 108523 PARAMETER Experiment Name: Zm_42deg_Heat_P Parameter: Timepoint (hr) Value: 6
  misc_feature: MA Experiment 108523 PARAMETER Experiment Name: Zm_42deg_Heat_P Parameter: Tissue Value: Aerial
  misc_feature: MA Experiment ID: 108533 Result: Down-regulated in Transcription
  misc_feature: MA Experiment 108533 PARAMETER Experiment Name: Zm_4deg_Cold_P Parameter: Age (hr) Value: 8
  misc_feature: MA Experiment 108533 PARAMETER Experiment Name: Zm_4deg_Cold_P Parameter: Organism Value: Zea mays
  misc_feature: MA Experiment 108533 PARAMETER Experiment Name: Zm_4deg_Cold_P Parameter: Plant Line Value: 35A19
  misc_feature: MA Experiment 108533 PARAMETER Experiment Name: Zm_4deg_Cold_P Parameter: Temperature (deg C) Value: 4 vs. 22
  misc_feature: MA Experiment 108533 PARAMETER Experiment Name: Zm_4deg_Cold_P Parameter: Timepoint (hr) Value: 1
  misc_feature: MA Experiment 108533 PARAMETER Experiment Name: Zm_4deg_Cold_P Parameter: Tissue Value: Aerial
  misc_feature: MA Experiment ID: 108543 Result: Up-regulated in Transcription
  misc_feature: MA Experiment ID: 20000477 Result: Down-regulated in Transcription
  misc_feature: MA Experiment 20000477 PARAMETER Experiment Name: Zm_5mM_SA_P Parameter: Age (day) Value: 10
  misc_feature: MA Experiment 20000477 PARAMETER Experiment Name: Zm_5mM_SA_P Parameter: Organism Value: Zea mays
  misc_feature: MA Experiment 20000477 PARAMETER Experiment Name: Zm_5mM_SA_P Parameter: Plant Line Value: 35A19
  misc_feature: MA Experiment 20000477 PARAMETER Experiment Name: Zm_5mM_SA_P Parameter: Timepoint (hr) Value: 48
  misc_feature: MA Experiment 20000477 PARAMETER Experiment Name: Zm_5mM_SA_P Parameter: Tissue Value: Aerial
  misc_feature: MA Experiment 20000477 PARAMETER Experiment Name: Zm_5mM_SA_P Parameter: Treatment Value: 5mM SA vs. No Treatment
  misc_feature: MA Experiment ID: 20000534 Result: Down-regulated in Transcription
  misc_feature: MA Experiment 20000534 PARAMETER Experiment Name: Zm_Hybrid_Pollen_P Parameter: Age (day) Value: 8
  misc_feature: MA Experiment 20000534 PARAMETER Experiment Name: Zm_Hybrid_Pollen_P Parameter: Organism Value: Zea mays
  misc_feature: MA Experiment 20000534 PARAMETER Experiment Name: Zm_Hybrid_Pollen_P Parameter: Plant Line Value: 35A19
  misc_feature: MA Experiment 20000534 PARAMETER Experiment Name: Zm_Hybrid_Pollen_P Parameter: Tissue Value: Pollen vs. Aerial

SEQ ID NO: 10316 - protein, 210 aa, Zea mays subsp. mays; identical to SEQ ID NO: 10155
  peptide (1)..(210): Ceres Seq. ID no. 12544506
  misc_feature (12)..(208): Homolog of NCBI NO: 32489696 NR Description: OSJNBb0004G23.9 [Oryza sativa (japonica
  misc_feature (1)..(205): Homolog of NCBI NO: 7406663 NR Description: putative ripening-related protein [Vitis vinifera]
  misc_feature (1)..(210): Homolog of NCBI NO: 112717 NR Description: 21 KD PROTEIN PRECURSOR (1.2 PROTEIN)
  misc_feature (13)..(210): Homolog of NCBI NO: 15241799 NR Description: ripening-related protein - like; protein id: supported by cDNA: 9669., supported by cDNA: gi_14423453,
  misc_feature (13)..(210): Homolog of NCBI NO: 21618088 NR Description: ripening-related protein-like [Arabidopsis
  misc_feature (14)..(205): Homolog of NCBI NO: 18407657 NR Description: expressed protein; protein id: At1g62770.1, by cDNA: 93927. [Arabidopsis thaliana]
  misc_feature (14)..(205): Homolog of NCBI NO: 21618013 NR Description: putative ripening-related protein [Arabidopsis
  misc_feature (34)..(204): Homolog of NCBI NO: 18394174 NR Description: expressed protein; protein id: At1g14890.1, by cDNA: 33355., supported by cDNA: gi_17529115 [Arabidopsis
  misc_feature (13)..(205): Homolog of NCBI NO: 15234547 NR Description: putative protein; protein id: At4g12390.1, by cDNA: 27615., supported by cDNA: gi_15450853, supported by
  misc_feature (24)..(205): Homolog of NCBI NO: 7488727 NR Description: 21K protein precursor - alfalfa
  misc_feature (12)..(208): Homolog of NCBI NO: 32489696 NR Description: OSJNBb0004G23.9 [Oryza sativa (japonica
  misc_feature (1)..(205): Homolog of NCBI NO: 7406663 NR Description: putative ripening-related protein [Vitis vinifera]
  misc_feature (1)..(210): Homolog of NCBI NO: 112717 NR Description: 21 KD PROTEIN PRECURSOR (1.2 PROTEIN)
  misc_feature (13)..(210): Homolog of NCBI NO: 15241799 NR Description: ripening-related protein - like; protein id: supported by cDNA: 9669., supported by cDNA: gi_14423453,
  misc_feature (13)..(210): Homolog of NCBI NO: 21618088 NR Description: ripening-related protein-like [Arabidopsis
  misc_feature (14)..(205): Homolog of NCBI NO: 18407657 NR Description: expressed protein; protein id: At1g62770.1, by cDNA: 93927. [Arabidopsis thaliana]
  misc_feature (14)..(205): Homolog of NCBI NO: 21618013 NR Description: putative ripening-related protein [Arabidopsis
  misc_feature (34)..(204): Homolog of NCBI NO: 18394174 NR Description: expressed protein; protein id: At1g14890.1, by cDNA: 33355., supported by cDNA: gi_17529115 [Arabidopsis
  misc_feature (13)..(205): Homolog of NCBI NO: 15234547 NR Description: putative protein; protein id: At4g12390.1, by cDNA: 27615., supported by cDNA: gi_15450853, supported by
  misc_feature (24)..(205): Homolog of NCBI NO: 7488727 NR Description: 21K protein precursor - alfalfa

SEQ ID NO: 10317 - protein, 121 aa, Zea mays subsp. mays; identical to SEQ ID NO: 10156
  peptide (1)..(121): Ceres Seq. ID no. 12544507
  misc_feature (75)..(121): Homolog of NCBI NO: 5821145 NR Description: RNA binding protein [Homo sapiens]
  misc_feature (75)..(121): Homolog of NCBI NO: 5821143 NR Description: RNA binding protein [Homo sapiens]
  misc_feature (75)..(121): Homolog of NCBI NO: 6649242 NR Description: splicing coactivator subunit SRm300 [Homo sapiens]
  misc_feature (75)..(121): Homolog of NCBI NO: 19923466 NR Description: splicing coactivator subunit SRm300; RNA binding
  misc_feature (26)..(121): Homolog of NCBI NO: 5821151 NR Description: RNA binding protein [Homo sapiens]
  misc_feature (26)..(121): Homolog of NCBI NO: 6634015 NR Description: KIAA0324 protein [Homo sapiens]
  misc_feature (26)..(121): Homolog of NCBI NO: 7512967 NR Description: hypothetical protein KIAA0324 - human (fragment)
  misc_feature (26)..(121): Homolog of NCBI NO: 6649242 NR Description: splicing coactivator subunit SRm300 [Homo sapiens]
  misc_feature (26)..(121): Homolog of NCBI NO: 19923466 NR Description: splicing coactivator subunit SRm300; RNA binding
  misc_feature (75)..(121): Homolog of NCBI NO: 5821145 NR Description: RNA binding protein [Homo sapiens]
  misc_feature (75)..(121): Homolog of NCBI NO: 5821143 NR Description: RNA binding protein [Homo sapiens]
  misc_feature (75)..(121): Homolog of NCBI NO: 6649242 NR Description: splicing coactivator subunit SRm300 [Homo sapiens]
  misc_feature (75)..(121): Homolog of NCBI NO: 19923466 NR Description: splicing coactivator subunit SRm300; RNA binding
  misc_feature (26)..(121): Homolog of NCBI NO: 5821151 NR Description: RNA binding protein [Homo sapiens]
  misc_feature (26)..(121): Homolog of NCBI NO: 6634015 NR Description: KIAA0324 protein [Homo sapiens]
  misc_feature (26)..(121): Homolog of NCBI NO: 7512967 NR Description: hypothetical protein KIAA0324 - human (fragment)
  misc_feature (26)..(121): Homolog of NCBI NO: 6649242 NR Description: splicing coactivator subunit SRm300 [Homo sapiens]
  misc_feature (26)..(121): Homolog of NCBI NO: 19923466 NR Description: splicing coactivator subunit SRm300; RNA binding

SEQ ID NO: 10318 - DNA, 982 bp, Zea mays subsp. mays
  misc_feature (1)..(982): Ceres Seq. ID no. 12594984
  misc_feature: MA Experiment ID: 108543 Result: Up-regulated in Transcription
  misc_feature: MA Experiment ID: 20000535 Result: Down-regulated in Transcription
  misc_feature: MA Experiment 20000535 PARAMETER Experiment Name: Zm_Hybrid_Seed_Dev_P Parameter: DAP Value: 30 vs. 12
  misc_feature: MA Experiment 20000535 PARAMETER Experiment Name: Zm_Hybrid_Seed_Dev_P Parameter: Organism Value: Zea mays
  misc_feature: MA Experiment 20000535 PARAMETER Experiment Name: Zm_Hybrid_Seed_Dev_P Parameter: Plant Line Value: 35A19
  misc_feature: MA Experiment 20000535 PARAMETER Experiment Name: Zm_Hybrid_Seed_Dev_P Parameter: Tissue Value: Embryo vs. Unfert Floret
aaaggaaactcactcccactttactcctatccactgcggcctggacgcgtgcgagaggcttgaccaagcagcagcagcagcagcagcgatggcgcctctgaagctgtacgggatgccgctgtcccccaacgtggtgcgcgtggccaccgtgctcaacgagaagggcctcgacttcgagatcgtccccgtcgacctcaccaccggcgcccacaagcagcccgacttcctcaccctcaaccctttcggccagatcccggctctcgtcgacggagacgaagtcctcttcgagtcccgcgcgatcaaccggtacatcgccagcaagtacgcgtcagggcacggacctgctccccgcgacggcgtcggcggcgaagctggaggtgtggctggaggtggagtcgcaccacttctacccgaacgcatcgccgctggtgttccagctgctcgtgaggccgctcctgggcggcgcccccgacgcggcggtggtggagaagcacgcggagcagctcgccaaggtgctcgacgtgtacgaggcgcacctggcccgcaacaagtaccctcgccggggacaagttcacgctcgccgacgccaaccacgcgtcctacctgctctacctcagcaagacccccaaggccgggctcgtcgccgcccgcccccacgtcaaggcctggtgggaggccatcgccgcccgccccgcgttccagaagaccgtcgccgccatccccttgcccccgccgccctcctcctcggcttgacctcgccttgcgctgcctgggtcgcggatgcgtcggagccccgagtcgaataaaagaggccgcatcctgtcttgcatttgctgctgcgccatgtgctataacagcctgtgtaataaacactgttgctttcgtgtgtgttcattgccttttggttggttggtccttgcatatcctactagtgctgatctttttgtgaagcttggattggatggacgcgttttcttcgccg

SEQ ID NO: 10319 - protein, 315 aa, Zea mays subsp. mays
  peptide (1)..(315): Ceres Seq. ID no. 12594985
  misc_feature (176)..(248): Pfam Name: Extensin-like region Pfam Description: Extensin-like region
  misc_feature (30)..(110): Homolog of NCBI NO: 25287127 NR Description: glutathione transferase (EC 2.5.1.18) III(b) - maize >gi|4468794|emb|CAB38119.1| Glutathione transferase
  misc_feature (30)..(110): Homolog of NCBI NO: 25287128 NR Description: glutathione transferase (EC 2.5.1.18) III(a) - maize >gi|4468792|emb|CAB38118.1| Glutathione transferase
  misc_feature (31)..(110): Homolog of NCBI NO: 3891593 NR Description: Structure Of Glutathione S-Transferase Iii In Apo
  misc_feature (33)..(118): Homolog of NCBI NO: 34907162 NR Description: putative glutathione S-transferase [Oryza sativa
  misc_feature (33)..(118): Homolog of NCBI NO: 11177843 NR Description: putative glutathione S-transferase OsGSTF4 [Oryza
  misc_feature (30)..(116): Homolog of NCBI NO: 23504745 NR Description: glutathione transferase F5 [Triticum aestivum]
  misc_feature (30)..(110): Homolog of NCBI NO: 1170090 NR Description: GLUTATHIONE S-TRANSFERASE III (GST-III) (GST
  misc_feature (33)..(108): Homolog of NCBI NO: 18150415 NR Description: glutathione S-transferase [Allium cepa]
  misc_feature (30)..(248): Homolog of NCBI NO: 66616 NR Description: glutathione transferase (EC 2.5.1.18) III
  misc_feature (30)..(107): Homolog of NCBI NO: 5923877 NR Description: glutathione S-transferase [Triticum aestivum]
KETHSHFTPIHCGLDACERLDQAAAAAAAMAPLKLYGMPLSPNVVRVATVLNEKGLDFEIVPVDLTTGAHKQPDFLTLNPFGQIPALVDGDEVLFESRAINRYIASKYASGHGPAPRDGVGGEAGGVAGGGVAPLLPERIAAGVPAAREAAPGRRPRRGGGGEARGAARQGARRVRGAPGPQQVPSPGTSSRSPTPTTRPTCSTSARPPRPGSSPPAPTSRPGGRPSPPAPRSRRPSPPSPCPRRPPPRLDLALRCLGRGCVGAPSRIKEAASCLAFAAAPCAITACVINTVAFVCVHCLLVGWSLHILLVLIFL

SEQ ID NO: 10320 - protein, 286 aa, Zea mays subsp. mays
  peptide (1)..(286): Ceres Seq. ID no. 12594986
  misc_feature (147)..(219): Pfam Name: Extensin-like region Pfam Description: Extensin-like region
  misc_feature (1)..(81): Homolog of NCBI NO: 25287127 NR Description: glutathione transferase (EC 2.5.1.18) III(b) - maize >gi|4468794|emb|CAB38119.1| Glutathione transferase
  misc_feature (1)..(81): Homolog of NCBI NO: 25287128 NR Description: glutathione transferase (EC 2.5.1.18) III(a) - maize >gi|4468792|emb|CAB38118.1| Glutathione transferase
  misc_feature (2)..(81): Homolog of NCBI NO: 3891593 NR Description: Structure Of Glutathione S-Transferase Iii In Apo
  misc_feature (4)..(89): Homolog of NCBI NO: 34907162 NR Description: putative glutathione S-transferase [Oryza sativa
  misc_feature (4)..(89): Homolog of NCBI NO: 11177843 NR Description: putative glutathione S-transferase OsGSTF4 [Oryza
  misc_feature (1)..(87): Homolog of NCBI NO: 23504745 NR Description: glutathione transferase F5 [Triticum aestivum]
  misc_feature (1)..(81): Homolog of NCBI NO: 1170090 NR Description: GLUTATHIONE S-TRANSFERASE III (GST-III) (GST
  misc_feature (4)..(79): Homolog of NCBI NO: 18150415 NR Description: glutathione S-transferase [Allium cepa]
  misc_feature (1)..(219): Homolog of NCBI NO: 66616 NR Description: glutathione transferase (EC 2.5.1.18) III
  misc_feature (1)..(78): Homolog of NCBI NO: 5923877 NR Description: glutathione S-transferase [Triticum aestivum]
MAPLKLYGMPLSPNVVRVATVLNEKGLDFEIVPVDLTTGAHKQPDFLTLNPFGQIPALVDGDEVLFESRAINRYIASKYASGHGPAPRDGVGGEAGGVAGGGVAPLLPERIAAGVPAAREAAPGRRPRRGGGGEARGAARQGARRVRGAPGPQQVPSPGTSSRSPTPTTRPTCSTSARPPRPGSSPPAPTSRPGGRPSPPAPRSRRPSPPSPCPRRPPPRLDLALRCLGRGCVGAPSRIKEAASCLAFAAAPCAITACVINTVAFVCVHCLLVGWSLHILLVLIFL

SEQ ID NO: 10321 - protein, 278 aa, Zea mays subsp. mays
  peptide (1)..(278): Ceres Seq. ID no. 12594987
  misc_feature (139)..(211): Pfam Name: Extensin-like region Pfam Description: Extensin-like region
  misc_feature (1)..(81): Homolog of NCBI NO: 11177843 NR Description: putative glutathione S-transferase OsGSTF4 [Oryza
  misc_feature (1)..(79): Homolog of NCBI NO: 23504745 NR Description: glutathione transferase F5 [Triticum aestivum]
  misc_feature (1)..(73): Homolog of NCBI NO: 1170090 NR Description: GLUTATHIONE S-TRANSFERASE III (GST-III) (GST
  misc_feature (1)..(73): Homolog of NCBI NO: 25287127 NR Description: glutathione transferase (EC 2.5.1.18) III(b) - maize >gi|4468794|emb|CAB38119.1| Glutathione transferase
  misc_feature (1)..(73): Homolog of NCBI NO: 3891593 NR Description: Structure Of Glutathione S-Transferase Iii In Apo
  misc_feature (1)..(81): Homolog of NCBI NO: 34907162 NR Description: putative glutathione S-transferase [Oryza sativa
  misc_feature (1)..(73): Homolog of NCBI NO: 25287128 NR Description: glutathione transferase (EC 2.5.1.18) III(a) - maize >gi|4468792|emb|CAB38118.1| Glutathione transferase
  misc_feature (1)..(71): Homolog of NCBI NO: 18150415 NR Description: glutathione S-transferase [Allium cepa]
  misc_feature (1)..(211): Homolog of NCBI NO: 66616 NR Description: glutathione transferase (EC 2.5.1.18) III
  misc_feature (1)..(70): Homolog of NCBI NO: 5923877 NR Description: glutathione S-transferase [Triticum aestivum]
MPLSPNVVRVATVLNEKGLDFEIVPVDLTTGAHKQPDFLTLNPFGQIPALVDGDEVLFESRAINRYIASKYASGHGPAPRDGVGGEAGGVAGGGVAPLLPERIAAGVPAAREAAPGRRPRRGGGGEARGAARQGARRVRGAPGPQQVPSPGTSSRSPTPTTRPTCSTSARPPRPGSSPPAPTSRPGGRPSPPAPRSRRPSPPSPCPRRPPPRLDLALRCLGRGCVGAPSRIKEAASCLAFAAAPCAITACVINTVAFVCVHCLLVGWSLHILLVLIFL

SEQ ID NO: 10322 - DNA, 1175 bp, Zea mays subsp. mays
  misc_feature (1)..(1175): Ceres Seq. ID no. 12350898
  misc_feature: MA Experiment ID: 108504 Result: Up-regulated in Transcription
  misc_feature: MA Experiment 108504 PARAMETER Experiment Name: Zm_Drought_P Parameter: Age (day) Value: 8
  misc_feature: MA Experiment 108504 PARAMETER Experiment Name: Zm_Drought_P Parameter: Organism Value: Zea mays
  misc_feature: MA Experiment 108504 PARAMETER Experiment Name: Zm_Drought_P Parameter: Plant Line Value: 35A19
  misc_feature: MA Experiment 108504 PARAMETER Experiment Name: Zm_Drought_P Parameter: Timepoint (hr) Value: 12
  misc_feature: MA Experiment 108504 PARAMETER Experiment Name: Zm_Drought_P Parameter: Tissue Value: Aerial
  misc_feature: MA Experiment 108504 PARAMETER Experiment Name: Zm_Drought_P Parameter: Treatment Value: Drought vs. No Drought
  misc_feature: MA Experiment ID: 108513 Result: Up-regulated in Transcription
  misc_feature: MA Experiment 108513 PARAMETER Experiment Name: Zm_100uM_ABA_P Parameter: Age (day) Value: 8
  misc_feature: MA Experiment 108513 PARAMETER Experiment Name: Zm_100uM_ABA_P Parameter: Organism Value: Zea mays
  misc_feature: MA Experiment 108513 PARAMETER Experiment Name: Zm_100uM_ABA_P Parameter: Plant Line Value: 35A19
  misc_feature: MA Experiment 108513 PARAMETER Experiment Name: Zm_100uM_ABA_P Parameter: Timepoint (hr) Value: 6
  misc_feature: MA Experiment 108513 PARAMETER Experiment Name: Zm_100uM_ABA_P Parameter: Tissue Value: Aerial
  misc_feature: MA Experiment 108513 PARAMETER Experiment Name: Zm_100uM_ABA_P Parameter: Treatment Value: 100uM ABA vs. No Treatment
  misc_feature: MA Experiment ID: 108526 Result: Up-regulated in Transcription
  misc_feature: MA Experiment 108526 PARAMETER Experiment Name: Zm_5mM_NO_P Parameter: Age (day) Value: 8
  misc_feature: MA Experiment 108526 PARAMETER Experiment Name: Zm_5mM_NO_P Parameter: Organism Value: Zea mays
  misc_feature: MA Experiment 108526 PARAMETER Experiment Name: Zm_5mM_NO_P Parameter: Plant Line Value: 35A19
  misc_feature: MA Experiment 108526 PARAMETER Experiment Name: Zm_5mM_NO_P Parameter: Timepoint (hr) Value: 1
  misc_feature: MA Experiment 108526 PARAMETER Experiment Name: Zm_5mM_NO_P Parameter: Tissue Value: Aerial
  misc_feature: MA Experiment 108526 PARAMETER Experiment Name: Zm_5mM_NO_P Parameter: Treatment Value: 5mM NO vs. No Treatment
  misc_feature: MA Experiment ID: 108527 Result: Up-regulated in Transcription
  misc_feature: MA Experiment 108527 PARAMETER Experiment Name: Zm_5mM_NO_P Parameter: Age (day) Value: 8
  misc_feature: MA Experiment 108527 PARAMETER Experiment Name: Zm_5mM_NO_P Parameter: Organism Value: Zea mays
  misc_feature: MA Experiment 108527 PARAMETER Experiment Name: Zm_5mM_NO_P Parameter: Plant Line Value: 35A19
  misc_feature: MA Experiment 108527 PARAMETER Experiment Name: Zm_5mM_NO_P Parameter: Timepoint (hr) Value: 6
  misc_feature: MA Experiment 108527 PARAMETER Experiment Name: Zm_5mM_NO_P Parameter: Tissue Value: Aerial
  misc_feature: MA Experiment 108527 PARAMETER Experiment Name: Zm_5mM_NO_P Parameter: Treatment Value: 5mM NO vs. No Treatment
  misc_feature: MA Experiment ID: 108540 Result: Up-regulated in Transcription
  misc_feature: MA Experiment 108540 PARAMETER Experiment Name: Zm_20percent_PEG_P Parameter: Age (day) Value: 8
  misc_feature: MA Experiment 108540 PARAMETER Experiment Name: Zm_20percent_PEG_P Parameter: Organism Value: Zea mays
  misc_feature: MA Experiment 108540 PARAMETER Experiment Name: Zm_20percent_PEG_P Parameter: Plant Line Value: 35A19
  misc_feature: MA Experiment 108540 PARAMETER Experiment Name: Zm_20percent_PEG_P Parameter: Timepoint (hr) Value: 6
  misc_feature: MA Experiment 108540 PARAMETER Experiment Name: Zm_20percent_PEG_P Parameter: Tissue Value: Aerial
  misc_feature: MA Experiment 108540 PARAMETER Experiment Name: Zm_20percent_PEG_P Parameter: Treatment Value: 20percent PEG vs. No Treatment
  misc_feature: MA Experiment ID: 108542 Result: Up-regulated in Transcription
  misc_feature: MA Experiment 108542 PARAMETER Experiment Name: Zm_150mM_NaCl_P Parameter: Age (day) Value: 8
  misc_feature: MA Experiment 108542 PARAMETER Experiment Name: Zm_150mM_NaCl_P Parameter: Organism Value: Zea mays
  misc_feature: MA Experiment 108542 PARAMETER Experiment Name: Zm_150mM_NaCl_P Parameter: Plant Line Value: 35A19
  misc_feature: MA Experiment 108542 PARAMETER Experiment Name: Zm_150mM_NaCl_P Parameter: Timepoint (hr) Value: 6
  misc_feature: MA Experiment 108542 PARAMETER Experiment Name: Zm_150mM_NaCl_P Parameter: Tissue Value: Aerial
  misc_feature: MA Experiment 108542 PARAMETER Experiment Name: Zm_150mM_NaCl_P Parameter: Treatment Value: 150mM NaCl vs. No Treatment
  misc_feature: MA Experiment ID: 108544 Result: Up-regulated in Transcription
  misc_feature: MA Experiment ID: 108556 Result: Up-regulated in Transcription
  misc_feature: MA Experiment 108556 PARAMETER Experiment Name: Zm_Drought_P Parameter: Age (day) Value: 9
  misc_feature: MA Experiment 108556 PARAMETER Experiment Name: Zm_Drought_P Parameter: Organism Value: Zea mays
  misc_feature: MA Experiment 108556 PARAMETER Experiment Name: Zm_Drought_P Parameter: Plant Line Value: 35A19
  misc_feature: MA Experiment 108556 PARAMETER Experiment Name: Zm_Drought_P Parameter: Timepoint (hr) Value: 24
  misc_feature: MA Experiment 108556 PARAMETER Experiment Name: Zm_Drought_P Parameter: Tissue Value: Aerial
  misc_feature: MA Experiment 108556 PARAMETER Experiment Name: Zm_Drought_P Parameter: Treatment Value: Drought vs. No Drought
  misc_feature: MA Experiment ID: 108559 Result: Up-regulated in Transcription
  misc_feature: MA Experiment 108559 PARAMETER Experiment Name: Zm_5mM_NO_P Parameter: Age (day) Value: 8
  misc_feature: MA Experiment 108559 PARAMETER Experiment Name: Zm_5mM_NO_P Parameter: Organism Value: Zea mays
  misc_feature: MA Experiment 108559 PARAMETER Experiment Name: Zm_5mM_NO_P Parameter: Plant Line Value: 35A19
  misc_feature: MA Experiment 108559 PARAMETER Experiment Name: Zm_5mM_NO_P Parameter: Timepoint (hr) Value: 12
  misc_feature: MA Experiment 108559 PARAMETER Experiment Name: Zm_5mM_NO_P Parameter: Tissue Value: Aerial
  misc_feature: MA Experiment 108559 PARAMETER Experiment Name: Zm_5mM_NO_P Parameter: Treatment Value: 5mM NO vs. No Treatment
  misc_feature: MA Experiment ID: 20000477 Result: Up-regulated in Transcription
  misc_feature: MA Experiment 20000477 PARAMETER Experiment Name: Zm_5mM_SA_P Parameter: Age (day) Value: 10
  misc_feature: MA Experiment 20000477 PARAMETER Experiment Name: Zm_5mM_SA_P Parameter: Organism Value: Zea mays
  misc_feature: MA Experiment 20000477 PARAMETER Experiment Name: Zm_5mM_SA_P Parameter: Plant Line Value: 35A19
  misc_feature: MA Experiment 20000477 PARAMETER Experiment Name: Zm_5mM_SA_P Parameter: Timepoint (hr) Value: 48
  misc_feature: MA Experiment 20000477 PARAMETER Experiment Name: Zm_5mM_SA_P Parameter: Tissue Value: Aerial
  misc_feature: MA Experiment 20000477 PARAMETER Experiment Name: Zm_5mM_SA_P Parameter: Treatment Value: 5mM SA vs. No Treatment
  misc_feature: MA Experiment ID: 20000478 Result: Up-regulated in Transcription
  misc_feature: MA Experiment 20000478 PARAMETER Experiment Name: Zm_5mM_SA_P Parameter: Age (day) Value: 11
  misc_feature: MA Experiment 20000478 PARAMETER Experiment Name: Zm_5mM_SA_P Parameter: Organism Value: Zea mays
  misc_feature: MA Experiment 20000478 PARAMETER Experiment Name: Zm_5mM_SA_P Parameter: Plant Line Value: 35A19
  misc_feature: MA Experiment 20000478 PARAMETER Experiment Name: Zm_5mM_SA_P Parameter: Timepoint (hr) Value: 72
  misc_feature: MA Experiment 20000478 PARAMETER Experiment Name: Zm_5mM_SA_P Parameter: Tissue Value: Aerial
  misc_feature: MA Experiment 20000478 PARAMETER Experiment Name: Zm_5mM_SA_P Parameter: Treatment Value: 5mM SA vs. No Treatment
  misc_feature: MA Experiment ID: 20000479 Result: Up-regulated in Transcription
  misc_feature: MA Experiment 20000479 PARAMETER Experiment Name: Zm_Drought_P Parameter: Age (day) Value: 10
  misc_feature: MA Experiment 20000479 PARAMETER Experiment Name: Zm_Drought_P Parameter: Organism Value: Zea mays
  misc_feature: MA Experiment 20000479 PARAMETER Experiment Name: Zm_Drought_P Parameter: Plant Line Value: 35A19
  misc_feature: MA Experiment 20000479 PARAMETER Experiment Name: Zm_Drought_P Parameter: Timepoint (hr) Value: 48
  misc_feature: MA Experiment 20000479 PARAMETER Experiment Name: Zm_Drought_P Parameter: Tissue Value: Aerial
  misc_feature: MA Experiment 20000479 PARAMETER Experiment Name: Zm_Drought_P Parameter: Treatment Value: Drought vs. No Drought
  misc_feature: MA Experiment ID: 20000480 Result: Up-regulated in Transcription
  misc_feature: MA Experiment 20000480 PARAMETER Experiment Name: Zm_Drought_P Parameter: Age (day) Value: 11
  misc_feature: MA Experiment 20000480 PARAMETER Experiment Name: Zm_Drought_P Parameter: Organism Value: Zea mays
  misc_feature: MA Experiment 20000480 PARAMETER Experiment Name: Zm_Drought_P Parameter: Plant Line Value: 35A19
  misc_feature: MA Experiment 20000480 PARAMETER Experiment Name: Zm_Drought_P Parameter: Timepoint (hr) Value: 72
  misc_feature: MA Experiment 20000480 PARAMETER Experiment Name: Zm_Drought_P Parameter: Tissue Value: Aerial
  misc_feature: MA Experiment 20000480 PARAMETER Experiment Name: Zm_Drought_P Parameter: Treatment Value: Drought vs. No Drought
  misc_feature: MA Experiment ID: 20000488 Result: Up-regulated in Transcription
  misc_feature: MA Experiment 20000488 PARAMETER Experiment Name: Zm_50mM_NH4NO3_L_to_H_P Parameter: Organism Value: Zea mays
  misc_feature: MA Experiment 20000488 PARAMETER Experiment Name: Zm_50mM_NH4NO3_L_to_H_P Parameter: Timepoint (hr) Value: 8
  misc_feature: MA Experiment 20000488 PARAMETER Experiment Name: Zm_50mM_NH4NO3_L_to_H_P Parameter: Tissue Value: Leaves
  misc_feature: MA Experiment 20000488 PARAMETER Experiment Name: Zm_50mM_NH4NO3_L_to_H_P Parameter: Treatment Value: 50mM NH4NO3 vs. 100mM Mannitol
  misc_feature: MA Experiment ID: 20000532 Result: Up-regulated in Transcription
  misc_feature: MA Experiment 20000532 PARAMETER Experiment Name: Zm_0.001percent_MeJA_P Parameter: Age (day) Value: 10
  misc_feature: MA Experiment 20000532 PARAMETER Experiment Name: Zm_0.001percent_MeJA_P Parameter: Organism Value: Zea mays
  misc_feature: MA Experiment 20000532 PARAMETER Experiment Name: Zm_0.001percent_MeJA_P Parameter: Plant Line Value: 35A19
  misc_feature: MA Experiment 20000532 PARAMETER Experiment Name: Zm_0.001percent_MeJA_P Parameter: Timepoint (hr) Value: 48
  misc_feature: MA Experiment 20000532 PARAMETER Experiment Name: Zm_0.001percent_MeJA_P Parameter: Tissue Value: Aerial
  misc_feature: MA Experiment 20000532 PARAMETER Experiment Name: Zm_0.001percent_MeJA_P Parameter: Treatment Value: 0.001percent MeJA vs. No Treatment
  misc_feature: MA Experiment ID: 20000533 Result: Up-regulated in Transcription
  misc_feature: MA Experiment 20000533 PARAMETER Experiment Name: Zm_0.001percent_MeJA_P Parameter: Age (day) Value: 11
  misc_feature: MA Experiment 20000533 PARAMETER Experiment Name: Zm_0.001percent_MeJA_P Parameter: Organism Value: Zea mays
  misc_feature: MA Experiment 20000533 PARAMETER Experiment Name: Zm_0.001percent_MeJA_P Parameter: Plant Line Value: 35A19
  misc_feature: MA Experiment 20000533 PARAMETER Experiment Name: Zm_0.001percent_MeJA_P Parameter: Timepoint (hr) Value: 72
  misc_feature: MA Experiment 20000533 PARAMETER Experiment Name: Zm_0.001percent_MeJA_P Parameter: Tissue Value: Aerial
  misc_feature: MA Experiment 20000533 PARAMETER Experiment Name: Zm_0.001percent_MeJA_P Parameter: Treatment Value: 0.001percent MeJA vs. No Treatment
  misc_feature: MA Experiment ID: 20000626 Result: Up-regulated in Transcription
  misc_feature: MA Experiment 20000626 PARAMETER Experiment Name: Zm_Herbicide-Treatments_P Parameter: Timepoint (hr) Value: 12
  misc_feature: MA Experiment 20000626 PARAMETER Experiment Name: Zm_Herbicide-Treatments_P Parameter: Tissue Value: Aerial
  misc_feature: MA Experiment 20000626 PARAMETER Experiment Name: Zm_Herbicide-Treatments_P Parameter: Treatment Value: Roundup vs. No Treatment
  misc_feature: MA Experiment ID: 20000627 Result: Up-regulated in Transcription
  misc_feature: MA Experiment 20000627 PARAMETER Experiment Name: Zm_Herbicide-Treatments_P Parameter: Timepoint (hr) Value: 12
  misc_feature: MA Experiment 20000627 PARAMETER Experiment Name: Zm_Herbicide-Treatments_P Parameter: Tissue Value: Aerial
  misc_feature: MA Experiment 20000627 PARAMETER Experiment Name: Zm_Herbicide-Treatments_P Parameter: Treatment Value: Finale vs. No Treatment
  misc_feature: MA Experiment ID: 20001608 Result: Up-regulated in Transcription
  misc_feature: MA Experiment 20001608 PARAMETER Experiment Name: Zm_50ppm_KNO3_L-to-H_P Parameter: Age (day) Value: 21
  misc_feature: MA Experiment 20001608 PARAMETER Experiment Name: Zm_50ppm_KNO3_L-to-H_P Parameter: Organism Value: Zea mays
  misc_feature: MA Experiment 20001608 PARAMETER Experiment Name: Zm_50ppm_KNO3_L-to-H_P Parameter: Plant Line Value: 35A19
  misc_feature: MA Experiment 20001608 PARAMETER Experiment Name: Zm_50ppm_KNO3_L-to-H_P Parameter: Timepoint (hr) Value: 48
  misc_feature: MA Experiment 20001608 PARAMETER Experiment Name: Zm_50ppm_KNO3_L-to-H_P Parameter: Tissue Value: Shoots
  misc_feature: MA Experiment 20001608 PARAMETER Experiment Name: Zm_50ppm_KNO3_L-to-H_P Parameter: Treatment Value: 50ppm KNO3 vs. 50ppm KCl
  misc_feature: MA Experiment ID: 20001613 Result: Up-regulated in Transcription
  misc_feature: MA Experiment 20001613 PARAMETER Experiment Name: Zm_50ppm_KNO3_L-to-H_P Parameter: Age (day) Value: 20
  misc_feature: MA Experiment 20001613 PARAMETER Experiment Name: Zm_50ppm_KNO3_L-to-H_P Parameter: Organism Value: Zea mays
  misc_feature: MA Experiment 20001613 PARAMETER Experiment Name: Zm_50ppm_KNO3_L-to-H_P Parameter: Plant Line Value: 35A19
  misc_feature: MA Experiment 20001613 PARAMETER Experiment Name: Zm_50ppm_KNO3_L-to-H_P Parameter: Timepoint (hr) Value: 24
  misc_feature: MA Experiment 20001613 PARAMETER Experiment Name: Zm_50ppm_KNO3_L-to-H_P Parameter: Tissue Value: Roots
  misc_feature: MA Experiment 20001613 PARAMETER Experiment Name: Zm_50ppm_KNO3_L-to-H_P Parameter: Treatment Value: 50ppm KNO3 vs. 50ppm KCl
cattcccatcccattccccactctactcattcagcagatcccgtcactcgctctccacaagcagagcaccgcagcagaacgaggaaggatgctggccatcttccagaagcaggtggcgcacgcgccgcaggagctcaacagcccccgcgccggcgcgtcgcccagcaagccccggaaccccgacgagatcctgcgcgacttccacgccgcgcacccggccgccgccttctccgcctccttcggcggcggcgccgcgctcgcctgcgtcggcccctcctcctccgccaccgccaccggcaccgccacctaccagcggatgttctgcggcctggaccacatctactgcgtcttcctgggccgcctcgacaacctcagcggcctcatccgccagtacggcctgtgcggccgctccaccaacgaggcgatgctggtcatcgaggcctaccgcacgctgcgcgaccgcgggccctacccggccgaccaggtcgtcaaggacctcgccggcgccttcgccttcgtcgtcttcgacagccgctccggcgccgtcttcgccgccctcggcgccgccgacgccgggggaacgccggtgccgctgtactggggcgtcgcggccgacgggtccgcggtgatcagcgacgaccgggacctggtcaagcgcggctgcggcaagtcctacgcgcccttccccgcgggctgcatgttccacagcgacggagggctcaagagcttcgagcaccccatgaacaggctcaaggccatgccgcgcgtcgacagcgagggcgccatgtgcggcgccaccttcaaggtcgacaccttcaccaagatcaactccatgccccgtgttggcagcgccgccaactgggccgcctgggacgaagccatctagtagatctagccttgccatgtacactgcgctgcctgcaacccgttcgccggtgcccctgcccctgcccgtggtcttttatcatccttccaaccacgagactttgcttctaaaccagaggctccatctgtgtgccgccttgttttactagaaatctttttttttatcctttttcacttttcctgcctagtttttccccttatcctggcattgtacaaataatttctccagtgcttgtagcttgtggacttgggttgtccaacatgtcatgaatacaaactgagtttgctgc

SEQ ID NO: 10323 - protein, 331 aa, Zea mays subsp. mays
  peptide (1)..(331): Ceres Seq. ID no. 12350899
  misc_feature (147)..(216): Pfam Name: Spumavirus gag protein Pfam Description: Spumavirus gag protein
HSHPIPHSTHSADPVTRSPQAEHRSRTRKDAGHLPEAGGARAAGAQQPPRRRVAQQAPEPRRDPARLPRRAPGRRLLRLLRRRRRARLRRPLLLRHRHRHRHLPADVLRPGPHLLRLPGPPRQPQRPHPPVRPVRPLHQRGDAGHRGLPHAARPRALPGRPGRQGPRRRLRLRRLRQPLRRRLRRPRRRRRRGNAGAAVLGRRGRRVRGDQRRPGPGQARLRQVLRALPRGLHVPQRRRAQELRAPHEQAQGHAARRQRGRHVRRHLQGRHLHQDQLHAPCWQRRQLGRLGRSHLVDLALPCTLRCLQPVRRCPCPCPWSFIILPTTRLCF

SEQ ID NO: 10324 - protein, 294 aa, Zea mays subsp. mays
  peptide (1)..(294): Ceres Seq. ID no. 12350900
  misc_feature (30)..(293): Homolog of NCBI NO: 542200 NR Description: hypothetical protein - garden asparagus
IPIPFPTLLIQQIPSLALHKQSTAAERGRMLAIFQKQVAHAPQELNSPRAGASPSKPRNPDEILRDFHAAHPAAAFSASFGGGAALACVGPSSSATATGTATYQRMFCGLDHIYCVFLGRLDNLSGLIRQYGLCGRSTNEAMLVIEAYRTLRDRGPYPADQVVKDLAGAFAFVVFDSRSGAVFAALGAADAGGTPVPLYWGVAADGSAVISDDRDLVKRGCGKSYAPFPAGCMFHSDGGLKSFEHPMNRLKAMPRVDSEGAMCGATFKVDTFTKINSMPRVGSAANWAAWDEAI

SEQ ID NO: 10325 - protein, 265 aa, Zea mays subsp. mays
  peptide (1)..(265): Ceres Seq. ID no. 12350901
  misc_feature (1)..(264): Homolog of NCBI NO: 542200 NR Description: hypothetical protein - garden asparagus
MLAIFQKQVAHAPQELNSPRAGASPSKPRNPDEILRDFHAAHPAAAFSASFGGGAALACVGPSSSATATGTATYQRMFCGLDHIYCVFLGRLDNLSGLIRQYGLCGRSTNEAMLVIEAYRTLRDRGPYPADQVVKDLAGAFAFVVFDSRSGAVFAALGAADAGGTPVPLYWGVAADGSAVISDDRDLVKRGCGKSYAPFPAGCMFHSDGGLKSFEHPMNRLKAMPRVDSEGAMCGATFKVDTFTKINSMPRVGSAANWAAWDEAI

SEQ ID NO: 10326 - DNA, 1370 bp, Zea mays subsp. mays
  misc_feature (1)..(1370): Ceres Seq. ID no. 12368499
  misc_feature: MA Experiment ID: 108544 Result: Down-regulated in Transcription
  misc_feature: MA Experiment ID: 108556 Result: Down-regulated in Transcription
  misc_feature: MA Experiment 108556 PARAMETER Experiment Name: Zm_Drought_P Parameter: Age (day) Value: 9
  misc_feature: MA Experiment 108556 PARAMETER Experiment Name: Zm_Drought_P Parameter: Organism Value: Zea mays
  misc_feature: MA Experiment 108556 PARAMETER Experiment Name: Zm_Drought_P Parameter: Plant Line Value: 35A19
  misc_feature: MA Experiment 108556 PARAMETER Experiment Name: Zm_Drought_P Parameter: Timepoint (hr) Value: 24
  misc_feature: MA Experiment 108556 PARAMETER Experiment Name: Zm_Drought_P Parameter: Tissue Value: Aerial
  misc_feature: MA Experiment 108556 PARAMETER Experiment Name: Zm_Drought_P Parameter: Treatment Value: Drought vs. No Drought
  misc_feature: MA Experiment ID: 20000477 Result: Down-regulated in Transcription
  misc_feature: MA Experiment 20000477 PARAMETER Experiment Name: Zm_5mM_SA_P Parameter: Age (day) Value: 10
  misc_feature: MA Experiment 20000477 PARAMETER Experiment Name: Zm_5mM_SA_P Parameter: Organism Value: Zea mays
  misc_feature: MA Experiment 20000477 PARAMETER Experiment Name: Zm_5mM_SA_P Parameter: Plant Line Value: 35A19
  misc_feature: MA Experiment 20000477 PARAMETER Experiment Name: Zm_5mM_SA_P Parameter: Timepoint (hr) Value: 48
  misc_feature: MA Experiment 20000477 PARAMETER Experiment Name: Zm_5mM_SA_P Parameter: Tissue Value: Aerial
  misc_feature: MA Experiment 20000477 PARAMETER Experiment Name: Zm_5mM_SA_P Parameter: Treatment Value: 5mM SA vs. No Treatment
  misc_feature: MA Experiment ID: 20000478 Result: Down-regulated in Transcription
  misc_feature: MA Experiment 20000478 PARAMETER Experiment Name: Zm_5mM_SA_P Parameter: Age (day) Value: 11
  misc_feature: MA Experiment 20000478 PARAMETER Experiment Name: Zm_5mM_SA_P Parameter: Organism Value: Zea mays
  misc_feature: MA Experiment 20000478 PARAMETER Experiment Name: Zm_5mM_SA_P Parameter: Plant Line Value: 35A19
  misc_feature: MA Experiment 20000478 PARAMETER Experiment Name: Zm_5mM_SA_P Parameter: Timepoint (hr) Value: 72
  misc_feature: MA Experiment 20000478 PARAMETER Experiment Name: Zm_5mM_SA_P Parameter: Tissue Value: Aerial
  misc_feature: MA Experiment 20000478 PARAMETER Experiment Name: Zm_5mM_SA_P Parameter: Treatment Value: 5mM SA vs. No Treatment
  misc_feature: MA Experiment ID: 20000479 Result: Down-regulated in Transcription
  misc_feature: MA Experiment 20000479 PARAMETER Experiment Name: Zm_Drought_P Parameter: Age (day) Value: 10
  misc_feature: MA Experiment 20000479 PARAMETER Experiment Name: Zm_Drought_P Parameter: Organism Value: Zea mays
  misc_feature: MA Experiment 20000479 PARAMETER Experiment Name: Zm_Drought_P Parameter: Plant Line Value: 35A19
  misc_feature: MA Experiment 20000479 PARAMETER Experiment Name: Zm_Drought_P Parameter: Timepoint (hr) Value: 48
  misc_feature: MA Experiment 20000479 PARAMETER Experiment Name: Zm_Drought_P Parameter: Tissue Value: Aerial
  misc_feature: MA Experiment 20000479 PARAMETER Experiment Name: Zm_Drought_P Parameter: Treatment Value: Drought vs. No Drought
  misc_feature: MA Experiment ID: 20000492 Result: Up-regulated in Transcription
  misc_feature: MA Experiment 20000492 PARAMETER Experiment Name: Zm_Hybrid_Seed_Dev_P Parameter: DAP Value: 12
  misc_feature: MA Experiment 20000492 PARAMETER Experiment Name: Zm_Hybrid_Seed_Dev_P Parameter: Organism Value: Zea mays
  misc_feature: MA Experiment 20000492 PARAMETER Experiment Name: Zm_Hybrid_Seed_Dev_P Parameter: Plant Line Value: 35A19
  misc_feature: MA Experiment 20000492 PARAMETER Experiment Name: Zm_Hybrid_Seed_Dev_P Parameter: Tissue Value: Fert Kernel vs. Unfert Floret
  misc_feature: MA Experiment ID: 20000535 Result: Up-regulated in Transcription
  misc_feature: MA Experiment 20000535 PARAMETER Experiment Name: Zm_Hybrid_Seed_Dev_P Parameter: DAP Value: 30 vs. 12
  misc_feature: MA Experiment 20000535 PARAMETER Experiment Name: Zm_Hybrid_Seed_Dev_P Parameter: Organism Value: Zea mays
  misc_feature: MA Experiment 20000535 PARAMETER Experiment Name: Zm_Hybrid_Seed_Dev_P Parameter: Plant Line Value: 35A19
  misc_feature: MA Experiment 20000535 PARAMETER Experiment Name: Zm_Hybrid_Seed_Dev_P Parameter: Tissue Value: Embryo vs. Unfert Floret
  misc_feature: MA Experiment ID: 20000626 Result: Down-regulated in Transcription
  misc_feature: MA Experiment 20000626 PARAMETER Experiment Name: Zm_Herbicide-Treatments_P Parameter: Timepoint (hr) Value: 12
  misc_feature: MA Experiment 20000626 PARAMETER Experiment Name: Zm_Herbicide-Treatments_P Parameter: Tissue Value: Aerial
  misc_feature: MA Experiment 20000626 PARAMETER Experiment Name: Zm_Herbicide-Treatments_P Parameter: Treatment Value: Roundup vs. No Treatment
  misc_feature: MA Experiment ID: 20000632 Result: Down-regulated in Transcription
  misc_feature: MA Experiment 20000632 PARAMETER Experiment Name: Zm_Herbicide-Treatments_P Parameter: Timepoint (hr) Value: 4
  misc_feature: MA Experiment 20000632 PARAMETER Experiment Name: Zm_Herbicide-Treatments_P Parameter: Tissue Value: Aerial
  misc_feature: MA Experiment 20000632 PARAMETER Experiment Name: Zm_Herbicide-Treatments_P Parameter: Treatment Value: Glean vs. No Treatment
  misc_feature: MA Experiment ID: 20000633 Result: Down-regulated in Transcription
  misc_feature: MA Experiment 20000633 PARAMETER Experiment Name: Zm_Herbicide-Treatments_P Parameter: Timepoint (hr) Value: 4
  misc_feature: MA Experiment 20000633 PARAMETER Experiment Name: Zm_Herbicide-Treatments_P Parameter: Tissue Value: Aerial
  misc_feature: MA Experiment 20000633 PARAMETER Experiment Name: Zm_Herbicide-Treatments_P Parameter: Treatment Value: Trimec vs. No Treatment
aaattcaaaatcaacccccctcgtcgcaaggccacaaccactccactcctccccatccctagctagccactagggtttgccagcctttgcagcgtcgcgctcgcgcctcatcccctcgcccatcgacggtagacgagagcgagcggtctgtgttcgtggagcaggggccggcgccatggagatcaacatcgtggaacaagtacgagaagctggagaaggtcggggagggcacctacggcaaggtgtacaaggcgcaggacaaggcgacggggcagctggtggcgctgaagaagacccgcctcgagatggacgaggagggcatcccgcccacggcgctccgcgagatctccctcctcaacctcctctcccactccatctacatcgtccgcctcctcgccgtcgagcaggccgctaagaacggcaagcccgtcctctacctcgtcttcgagttcctcgacaccgatctcaagaagtacctcgacgtctaccgcagggggcccagcgccaggccgctccccgcgacactcatcaagaatttcctgtatcagttatgcaaaggagttgcacactgccatagccatggtgtccttcaccgggatttaaagccacaaaacctgctggtggacaaggagaagggtatactgaagattgctgatctgggactcggtagggctttcactgtgcccatgaaaagctacacccatgagattgtgaccctttggtacagagctcctgaagttttgcttggagcaacacattactcaactggcgttgatatgtggtctgttggatgcatctttgctgaaatggcccgacggcaggctctctttcctggtgactcggagttgcaacagttgcttcacatcttcaggttgctgggaacacctactgaggaacagtggcctggagtgagtgatttaagggactggcatgagtttccacagtggaagccccagggtttggcacgtgtcgtcccaacactggaacctgaaggagttgaccttctatcgaaaatgcttcagcttgatccttcaaacaggatatcagctttagctgcgatggagcatccctactttaacagccttgacaagtcccagttctagccgttgtactatgtggttcagaaggcgctaccctcgtacagagagatttccaatggtgttatgaatctcaattgccatctaggcaactggttcatgattttaccaatctgttagtgagtgaaaatcgtgcgagggtcatatgtgttccccttgtcttaaaaatctggtgtggtgtagaacaagagttacctgtgggaggcctgtgataatgccctttatgtctcaacatccattttcgtgcattccatgttcttcaatacggactcg

SEQ ID NO: 10327 - protein, 265 aa, Zea mays subsp. mays
  peptide (1)..(265): Ceres Seq. ID no. 12368500
  misc_feature (1)..(257): Pfam Name: Protein kinase domain Pfam Description: Protein kinase domain
  misc_feature (1)..(265): Homolog of NCBI NO: 27542763 NR Description: cyclin-dependent kinase-like protein [Sorghum
  misc_feature (1)..(265): Homolog of NCBI NO: 34907628 NR Description: putative cyclin-dependent kinase B1-1 [Oryza
  misc_feature (1)..(265): Homolog of NCBI NO: 9885801 NR Description: cyclin-dependent kinase B1-2 [Nicotiana tabacum]
  misc_feature (1)..(265): Homolog of NCBI NO: 11125683 NR Description: B1-type cyclin dependent kinase [Lycopersicon
  misc_feature (1)..(265): Homolog of NCBI NO: 9885799 NR Description: cyclin-dependent kinase B1-1 [Nicotiana tabacum]
  misc_feature (1)..(265): Homolog of NCBI NO: 25989353 NR Description: cyclin-dependent kinase [Helianthus tuberosus]
  misc_feature (1)..(265): Homolog of NCBI NO: 7434326 NR Description: probable cdc2-like protein kinase cdc2MsD -
  misc_feature (1)..(265): Homolog of NCBI NO: 5921446 NR Description: CELL DIVISION CONTROL PROTEIN 2 HOMOLOG C
  misc_feature (1)..(265): Homolog of NCBI NO: 15232441 NR Description: Cyclin-dependent kinase B1;1; protein id: supported by cDNA: 118434. [Arabidopsis thaliana] Cell division control protein 2 homolog B >gi|282864|pir||S23096
  misc_feature (1)..(265): Homolog of NCBI NO: 15224912 NR Description: Cyclin-dependent kinase B1;2; protein id: [Arabidopsis thaliana] >gi|25287592|pir||C84807 probable cell
MDEEGIPPTALREISLLNLLSHSIYIVRLLAVEQAAKNGKPVLYLVFEFLDTDLKKYLDVYRRGPSARPLPATLIKNFLYQLCKGVAHCHSHGVLHRDLKPQNLLVDKEKGILKIADLGLGRAFTVPMKSYTHEIVTLWYRAPEVLLGATHYSTGVDMWSVGCIFAEMARRQALFPGDSELQQLLHIFRLLGTPTEEQWPGVSDLRDWHEFPQWKPQGLARVVPTLEPEGVDLLSKMLQLDPSNRISALAAMEHPYFNSLDKSQF

SEQ ID NO: 10328 - protein, 138 aa, Zea mays subsp. mays
  peptide (1)..(138): Ceres Seq. ID no. 12368501
  misc_feature (1)..(130): Pfam Name: Protein kinase domain Pfam Description: Protein kinase domain
  misc_feature (1)..(138): Homolog of NCBI NO: 27542763 NR Description: cyclin-dependent kinase-like protein [Sorghum
  misc_feature (1)..(138): Homolog of NCBI NO: 34907628 NR Description: putative cyclin-dependent kinase B1-1 [Oryza
  misc_feature (1)..(138): Homolog of NCBI NO: 9885801 NR Description: cyclin-dependent kinase B1-2 [Nicotiana tabacum]
  misc_feature (1)..(138): Homolog of NCBI NO: 11125683 NR Description: B1-type cyclin dependent kinase [Lycopersicon
  misc_feature (1)..(138): Homolog of NCBI NO: 9885799 NR Description: cyclin-dependent kinase B1-1 [Nicotiana tabacum]
  misc_feature (1)..(138): Homolog of NCBI NO: 25989353 NR Description: cyclin-dependent kinase [Helianthus tuberosus]
  misc_feature (1)..(138): Homolog of NCBI NO: 7434326 NR Description: probable cdc2-like protein kinase cdc2MsD -
  misc_feature (1)..(138): Homolog of NCBI NO: 5921446 NR Description: CELL DIVISION CONTROL PROTEIN 2 HOMOLOG C
  misc_feature (1)..(138): Homolog of NCBI NO: 15232441 NR Description: Cyclin-dependent kinase B1;1; protein id: supported by cDNA: 118434. [Arabidopsis thaliana] Cell division control protein 2 homolog B >gi|282864|pir||S23096
  misc_feature (1)..(138): Homolog of NCBI NO: 15224912 NR Description: Cyclin-dependent kinase B1;2; protein id: [Arabidopsis thaliana] >gi|25287592|pir||C84807 probable cell
MKSYTHEIVTLWYRAPEVLLGATHYSTGVDMWSVGCIFAEMARRQALFPGDSELQQLLHIFRLLGTPTEEQWPGVSDLRDWHEFPQWKPQGLARVVPTLEPEGVDLLSKMLQLDPSNRISALAAMEHPYFNSLDKSQF

SEQ ID NO: 10329 - DNA, 844 bp, Zea mays subsp. mays
  misc_feature (1)..(844): Ceres Seq. ID no. 12400449
  misc_feature: MA Experiment ID: 108522 Result: Up-regulated in Transcription
  misc_feature: MA Experiment 108522 PARAMETER Experiment Name: Zm_42deg_Heat_P Parameter: Age (day) Value: 8
  misc_feature: MA Experiment 108522 PARAMETER Experiment Name: Zm_42deg_Heat_P Parameter: Organism Value: Zea mays
  misc_feature: MA Experiment 108522 PARAMETER Experiment Name: Zm_42deg_Heat_P Parameter: Plant Line Value: 35A19
  misc_feature: MA Experiment 108522 PARAMETER Experiment Name: Zm_42deg_Heat_P Parameter: Temperature (deg C) Value: 42 vs. 22
  misc_feature: MA Experiment 108522 PARAMETER Experiment Name: Zm_42deg_Heat_P Parameter: Timepoint (hr) Value: 1
  misc_feature: MA Experiment 108522 PARAMETER Experiment Name: Zm_42deg_Heat_P Parameter: Tissue Value: Aerial
  misc_feature: MA Experiment ID: 108528 Result: Up-regulated in Transcription
  misc_feature: MA Experiment 108528 PARAMETER Experiment Name: Zm_Imbibed_Seeds_P Parameter: Age (day) Value: 5 vs. 2
  misc_feature: MA Experiment 108528 PARAMETER Experiment Name: Zm_Imbibed_Seeds_P Parameter: Organism Value: Zea mays
  misc_feature: MA Experiment 108528 PARAMETER Experiment Name: Zm_Imbibed_Seeds_P Parameter: Plant Line Value: 35A19
  misc_feature: MA Experiment 108528 PARAMETER Experiment Name: Zm_Imbibed_Seeds_P Parameter: Tissue Value: Aerial vs. Embryo
  misc_feature: MA Experiment ID: 108534 Result: Down-regulated in Transcription
  misc_feature: MA Experiment 108534 PARAMETER Experiment Name: Zm_4deg_Cold_P Parameter: Age (hr) Value: 8
  misc_feature: MA Experiment 108534 PARAMETER Experiment Name: Zm_4deg_Cold_P Parameter: Organism Value: Zea mays
  misc_feature: MA Experiment 108534 PARAMETER Experiment Name: Zm_4deg_Cold_P Parameter: Plant Line Value: 35A19
  misc_feature: MA Experiment 108534 PARAMETER Experiment Name: Zm_4deg_Cold_P Parameter: Temperature (deg C) Value: 4 vs. 22
  misc_feature: MA Experiment 108534 PARAMETER Experiment Name: Zm_4deg_Cold_P Parameter: Timepoint (hr) Value: 6
  misc_feature: MA Experiment 108534 PARAMETER Experiment Name: Zm_4deg_Cold_P Parameter: Tissue Value: Aerial
  misc_feature: MA Experiment ID: 108543 Result: Down-regulated in Transcription
  misc_feature: MA Experiment ID: 108556 Result: Up-regulated in Transcription
  misc_feature: MA Experiment 108556 PARAMETER Experiment Name: Zm_Drought_P Parameter: Age (day) Value: 9
  misc_feature: MA Experiment 108556 PARAMETER Experiment Name: Zm_Drought_P Parameter: Organism Value: Zea mays
  misc_feature: MA Experiment 108556 PARAMETER Experiment Name: Zm_Drought_P Parameter: Plant Line Value: 35A19
  misc_feature: MA Experiment 108556 PARAMETER Experiment Name: Zm_Drought_P Parameter: Timepoint (hr) Value: 24
  misc_feature: MA Experiment 108556 PARAMETER Experiment Name: Zm_Drought_P Parameter: Tissue Value: Aerial
  misc_feature: MA Experiment 108556 PARAMETER Experiment Name: Zm_Drought_P Parameter: Treatment Value: Drought vs. No Drought
  misc_feature: MA Experiment ID: 20000480 Result: Up-regulated in Transcription
  misc_feature: MA Experiment 20000480 PARAMETER Experiment Name: Zm_Drought_P Parameter: Age (day) Value: 11
  misc_feature: MA Experiment 20000480 PARAMETER Experiment Name: Zm_Drought_P Parameter: Organism Value: Zea mays
  misc_feature: MA Experiment 20000480 PARAMETER Experiment Name: Zm_Drought_P Parameter: Plant Line Value: 35A19
  misc_feature: MA Experiment 20000480 PARAMETER Experiment Name: Zm_Drought_P Parameter: Timepoint (hr) Value: 72
  misc_feature: MA Experiment 20000480 PARAMETER Experiment Name: Zm_Drought_P Parameter: Tissue Value: Aerial
  misc_feature: MA Experiment 20000480 PARAMETER Experiment Name: Zm_Drought_P Parameter: Treatment Value: Drought vs. No Drought
atccgttccaagtatctcccctcttgcgcctcctctcgactcttccgtttagtgcccaccgaaatctttctaccacccacgttccggcatccatggctcgtctgttcgcggcgcgagcccttacgctggcccgcccctcggcggcgccatccgccctccgcttctgcccctcccgcgcgctgtcggacaaggtggacttcatcgagatcgacctctccgaggagtccccttcctcttcatccggaggaggaggcgcgggcgaccccgccacggttcaggcgcagatggggtcgcggcgcctggaggacgccatccatggggtgctcgtgcggcgggcggcgcctgaatggctccccttcgtgccgggggcatcctactgggtcccgccgtttccgcgggcgctcggggtggcggagcttctcagctcggctatgcacatcacgaggggcgccgaggcgatgacggaggaggaggcattgagcttcactaccgtgcgggggtggccatccgcggcgtactttgtggcaggctcctactgaagaggcagctggggacagtgaaggtcttctgatgggttgtagttataacttatagtaatagacagctagggagcccctgcaacaatggatcccctcaagctgtcaagcatcttcggatggtgtgctcacagctggtaaaatgacactggttcaatcttatgtatttgcagaacccggtgcgctagcacctggacatggtgggtgtatggtccacggaacccagccgtggcgcataatgtaatagagtttgtagtttgtactttgtaccatattttccctcttgaataaaggcatgtgttacgctg

SEQ ID NO: 10330 - protein, 178 aa, Zea mays subsp. mays
  peptide (1)..(178): Ceres Seq. ID no. 12400450
  misc_feature (31)..(178): Homolog of NCBI NO: 38175698 NR Description: unknown protein [Oryza sativa (japonica
  misc_feature (31)..(178): Homolog of NCBI NO: 38346553 NR Description: OSJNBa0035M09.14 [Oryza sativa (japonica
  misc_feature (31)..(178): Homolog of NCBI NO: 30685027 NR Description: expressed protein [Arabidopsis thaliana] At1g16840/F17F16.27 [Arabidopsis thaliana]
  misc_feature (37)..(176): Homolog of NCBI NO: 18412160 NR Description: expressed protein; protein id: At1g78890.1,
  misc_feature (37)..(176): Homolog of NCBI NO: 21592720 NR Description: unknown [Arabidopsis thaliana]
  misc_feature (37)..(176): Homolog of NCBI NO: 25364101 NR Description: hypothetical protein F9K20.6 [imported] - thaliana >gi|3834306|gb|AAC83022.1| EST gb|R65024 comes from this
  misc_feature (31)..(176): Homolog of NCBI NO: 18394407 NR Description: expressed protein; protein id: At1g16840.1, by cDNA: gi_15450362 [Arabidopsis thaliana]
  misc_feature (98)..(174): Homolog of NCBI NO: 14423398 NR Description: Unknown protein [Arabidopsis thaliana]
  misc_feature (98)..(174): Homolog of NCBI NO: 18398961 NR Description: expressed protein; protein id: At2g19180.1, by cDNA: 39441. [Arabidopsis thaliana] >gi|7487282|pir||T00539
PFQVSPLLRLLSTLPFSAHRNLSTTHVPASMARLFAARALTLARPSAAPSALRFCPSRALSDKVDFIEIDLSEESPSSSSGGGGAGDPATVQAQMGSRRLEDAIHGVLVRRAAPEWLPFVPGASYWVPPFPRALGVAELLSSAMHITRGAEAMTEEEALSFTTVRGWPSAAYFVAGSY

SEQ ID NO: 10331 - protein, 153 aa, Zea mays subsp. mays
  peptide (1)..(153): Ceres Seq. ID no. 12400451
IRSKYLPSCASSRLFRLVPTEIFLPPTFRHPWLVCSRREPLRWPAPRRRHPPSASAPPARCRTRWTSSRSTSPRSPLPLHPEEEARATPPRFRRRWGRGAWRTPSMGCSCGGRRLNGSPSCRGHPTGSRRFRGRSGWRSFSARLCTSRGAPRR

SEQ ID NO: 10332 - protein, 148 aa, Zea mays subsp. mays
  peptide (1)..(148): Ceres Seq. ID no. 12400452
  misc_feature (1)..(148): Homolog of NCBI NO: 38175698 NR Description: unknown protein [Oryza sativa (japonica
  misc_feature (1)..(148): Homolog of NCBI NO: 38346553 NR Description: OSJNBa0035M09.14 [Oryza sativa (japonica
  misc_feature (1)..(148): Homolog of NCBI NO: 30685027 NR Description: expressed protein [Arabidopsis thaliana] At1g16840/F17F16.27 [Arabidopsis thaliana]
  misc_feature (7)..(146): Homolog of NCBI NO: 18412160 NR Description: expressed protein; protein id: At1g78890.1,
  misc_feature (7)..(146): Homolog of NCBI NO: 25364101 NR Description: hypothetical protein F9K20.6 [imported] - thaliana >gi|3834306|gb|AAC83022.1| EST gb|R65024 comes from this
  misc_feature (7)..(146): Homolog of NCBI NO: 21592720 NR Description: unknown [Arabidopsis thaliana]
  misc_feature (1)..(146): Homolog of NCBI NO: 18394407 NR Description: expressed protein; protein id: At1g16840.1, by cDNA: gi_15450362 [Arabidopsis thaliana]
  misc_feature (68)..(144): Homolog of NCBI NO: 14423398 NR Description: Unknown protein [Arabidopsis thaliana]
  misc_feature (68)..(144): Homolog of NCBI NO: 18398961 NR Description: expressed protein; protein id: At2g19180.1, by cDNA: 39441. [Arabidopsis thaliana] >gi|7487282|pir||T00539
MARLFAARALTLARPSAAPSALRFCPSRALSDKVDFIEIDLSEESPSSSSGGGGAGDPATVQAQMGSRRLEDAIHGVLVRRAAPEWLPFVPGASYWVPPFPRALGVAELLSSAMHITRGAEAMTEEEALSFTTVRGWPSAAYFVAGSY

SEQ ID NO: 10333 - DNA, 866 bp, Zea mays subsp. mays
  misc_feature (1)..(866): Ceres Seq. ID no. 12342039
  misc_feature: MA Experiment ID: 108535 Result: Up-regulated in Transcription
  misc_feature: MA Experiment 108535 PARAMETER Experiment Name: Zm_Meristem_P Parameter: Age (day) Value: 8
  misc_feature: MA Experiment 108535 PARAMETER Experiment Name: Zm_Meristem_P Parameter: Organism Value: Zea mays
  misc_feature: MA Experiment 108535 PARAMETER Experiment Name: Zm_Meristem_P Parameter: Plant Line Value: 35A19
  misc_feature: MA Experiment 108535 PARAMETER Experiment Name: Zm_Meristem_P Parameter: Tissue Value: Root Meristem vs. Above Root Meristem
  misc_feature: MA Experiment ID: 108544 Result: Down-regulated in Transcription
agttcgactcagctccgccgcgcgtgtcagccgatggaagagctgcgggccgccgtgacggcgcacttggaccaggtagcgggcctcgtgcaggcgctctcctccgagctccgccgcggcataggtcccgccgccgacaacctgcgcgccttcatccgcgccgttgactggacggagccatggctcatgtgcttgatggcattccatgtggttctgctgctcactgctgtagggttcaggaggaatgccaatttccagctattcttgttatttcttgcttattcaggagtgtatctagctgaaaagatgaacagatacctgggagagaactggaagagctttaccagtaggaattattttgatcgttctggagtttttatctctgtcgtctggtctgggccccttattgtcatatcgattgtcagtgtgattagcagcctcattgcattatgtcgattgatggtgaaatggaaaagagcagaacttaggcaccgggctcgacttgctcatgacaagaaggattgagagaagagaaaaaaatccttattatgggagaatcgaatgatttagtgattttgaacttttctaagtttgtatgccgcttgtcaacagggcactcaagaattaagtgttggaaatcctggataagcgaggagtgtctacagctattgttcctgctggtcactgtaggacagtagcagctagacatacttcataaaaaaatagatatggtacctgtctctatcttgttttagattgtagatgtaaacatggatgtaatcttgattgaaactgccaagatttgtagaacaaagcctcactgtttcgtttcccatcacaaatatgaaatatgagacgcggaagtg

SEQ ID NO: 10334 - protein, 174 aa, Zea mays subsp. mays
  peptide (1)..(174): Ceres Seq. ID no. 12342040
  misc_feature (12)..(174): Homolog of NCBI NO: 18399227 NR Description: Expressed protein; protein id: At1g34350.1,
  misc_feature (12)..(174): Homolog of NCBI NO: 21554376 NR Description: unknown [Arabidopsis thaliana]
  misc_feature (14)..(174): Homolog of NCBI NO: 38637052 NR Description: unknown protein [Oryza sativa (japonica
  misc_feature (50)..(173): Homolog of NCBI NO: 31210097 NR Description: ENSANGP00000009975 [Anopheles gambiae]
  misc_feature (51)..(173): Homolog of NCBI NO: 24653051 NR Description: CG30051-PB [Drosophila melanogaster]
  misc_feature (47)..(174): Homolog of NCBI NO: 11359939 NR Description: hypothetical protein DKFZp434C1714.1 - human
  misc_feature (47)..(174): Homolog of NCBI NO: 16359094 NR Description: Unknown (protein for IMAGE:4686355) [Homo sapiens]
  misc_feature (47)..(174): Homolog of NCBI NO: 40548391 NR Description: hypothetical protein DKFZp434C1714 [Homo sapiens]
  misc_feature (56)..(174): Homolog of NCBI NO: 21595411 NR Description: Hypothetical protein DKFZp434C1714 [Homo sapiens]
  misc_feature (47)..(174): Homolog of NCBI NO: 34864175 NR Description: similar to cDNA sequence BC024093 [Rattus
SSTQLRRACQPMEELRAAVTAHLDQVAGLVQALSSELRRGIGPAADNLRAFIRAVDWTEPWLMCLMAFHVVLLLTAVGFRRNANFQLFLLFLAYSGVYLAEKMNRYLGENWKSFTSRNYFDRSGVFISVVWSGPLIVISIVSVISSLIALCRLMVKWKRAELRHRARLAHDKKD

SEQ ID NO: 10335 - protein, 163 aa, Zea mays subsp. mays
  peptide (1)..(163): Ceres Seq. ID no. 12342041
  misc_feature (1)..(163): Homolog of NCBI NO: 18399227 NR Description: Expressed protein; protein id: At1g34350.1,
  misc_feature (1)..(163): Homolog of NCBI NO: 21554376 NR Description: unknown [Arabidopsis thaliana]
  misc_feature (3)..(163): Homolog of NCBI NO: 38637052 NR Description: unknown protein [Oryza sativa (japonica
  misc_feature (39)..(162): Homolog of NCBI NO: 31210097 NR Description: ENSANGP00000009975 [Anopheles gambiae]
  misc_feature (40)..(162): Homolog of NCBI NO: 24653051 NR Description: CG30051-PB [Drosophila melanogaster]
  misc_feature (36)..(163): Homolog of NCBI NO: 11359939 NR Description: hypothetical protein DKFZp434C1714.1 - human
  misc_feature (36)..(163): Homolog of NCBI NO: 16359094 NR Description: Unknown (protein for IMAGE:4686355) [Homo sapiens]
  misc_feature (36)..(163): Homolog of NCBI NO: 40548391 NR Description: hypothetical protein DKFZp434C1714 [Homo sapiens]
  misc_feature (45)..(163): Homolog of NCBI NO: 21595411 NR Description: Hypothetical protein DKFZp434C1714 [Homo sapiens]
  misc_feature (36)..(163): Homolog of NCBI NO: 34864175 NR Description: similar to cDNA sequence BC024093 [Rattus
MEELRAAVTAHLDQVAGLVQALSSELRRGIGPAADNLRAFIRAVDWTEPWLMCLMAFHVVLLLTAVGFRRNANFQLFLLFLAYSGVYLAEKMNRYLGENWKSFTSRNYFDRSGVFISVVWSGPLIVISIVSVISSLIALCRLMVKWKRAELRHRARLAHDKKD

SEQ ID NO: 10336 - protein, 112 aa, Zea mays subsp. mays
  peptide (1)..(112): Ceres Seq. ID no. 12342042
  misc_feature (1)..(112): Homolog of NCBI NO: 18399227 NR Description: Expressed protein; protein id: At1g34350.1,
  misc_feature (1)..(112): Homolog of NCBI NO: 21554376 NR Description: unknown [Arabidopsis thaliana]
  misc_feature (1)..(112): Homolog of NCBI NO: 38637052 NR Description: unknown protein [Oryza sativa (japonica
  misc_feature (1)..(111): Homolog of NCBI NO: 31210097 NR Description: ENSANGP00000009975 [Anopheles gambiae]
  misc_feature (1)..(111): Homolog of NCBI NO: 24653051 NR Description: CG30051-PB [Drosophila melanogaster]
  misc_feature (1)..(112): Homolog of NCBI NO: 11359939 NR Description: hypothetical protein DKFZp434C1714.1 - human
  misc_feature (1)..(112): Homolog of NCBI NO: 16359094 NR Description: Unknown (protein for IMAGE:4686355) [Homo sapiens]
  misc_feature (1)..(112): Homolog of NCBI NO: 40548391 NR Description: hypothetical protein DKFZp434C1714 [Homo sapiens]
  misc_feature (1)..(112): Homolog of NCBI NO: 21595411 NR Description: Hypothetical protein DKFZp434C1714 [Homo sapiens]
  misc_feature (1)..(112): Homolog of NCBI NO: 34864175 NR Description: similar to cDNA sequence BC024093 [Rattus
MCLMAFHVVLLLTAVGFRRNANFQLFLLFLAYSGVYLAEKMNRYLGENWKSFTSRNYFDRSGVFISVVWSGPLIVISIVSVISSLIALCRLMVKWKRAELRHRARLAHDKKD

SEQ ID NO: 10337 - DNA, 921 bp, Zea mays subsp. mays
  misc_feature (1)..(921): Ceres Seq. ID no. 12367023
  misc_feature: MA Experiment ID: 108529 Result: Down-regulated in Transcription
  misc_feature: MA Experiment 108529 PARAMETER Experiment Name: Zm_Imbibed_Seeds_P Parameter: Age (day) Value: 5 vs. 2
  misc_feature: MA Experiment 108529 PARAMETER Experiment Name: Zm_Imbibed_Seeds_P Parameter: Organism Value: Zea mays
  misc_feature: MA Experiment 108529 PARAMETER Experiment Name: Zm_Imbibed_Seeds_P Parameter: Plant Line Value: 35A19
  misc_feature: MA Experiment 108529 PARAMETER Experiment Name: Zm_Imbibed_Seeds_P Parameter: Tissue Value: Roots vs. Embryo
  misc_feature: MA Experiment ID: 108545 Result: Up-regulated in Transcription
  misc_feature: MA Experiment 108545 PARAMETER Experiment Name: Zm_Imbibed_Seeds_P Parameter: Age (day) Value: 3 vs. 2
  misc_feature: MA Experiment 108545 PARAMETER Experiment Name: Zm_Imbibed_Seeds_P Parameter: Organism Value: Zea mays
  misc_feature: MA Experiment 108545 PARAMETER Experiment Name: Zm_Imbibed_Seeds_P Parameter: Plant Line Value: 35A19
  misc_feature: MA Experiment 108545 PARAMETER Experiment Name: Zm_Imbibed_Seeds_P Parameter: Tissue Value: Aerial vs. Embryo
  misc_feature: MA Experiment ID: 108546 Result: Down-regulated in Transcription
  misc_feature: MA Experiment 108546 PARAMETER Experiment Name: Zm_Imbibed_Seeds_P Parameter: Age (day) Value: 3 vs. 2
  misc_feature: MA Experiment 108546 PARAMETER Experiment Name: Zm_Imbibed_Seeds_P Parameter: Organism Value: Zea mays
  misc_feature: MA Experiment 108546 PARAMETER Experiment Name: Zm_Imbibed_Seeds_P Parameter: Plant Line Value: 35A19
  misc_feature: MA Experiment 108546 PARAMETER Experiment Name: Zm_Imbibed_Seeds_P Parameter: Tissue Value: Roots vs. Embryo
  misc_feature: MA Experiment ID: 20000477 Result: Down-regulated in Transcription
  misc_feature: MA Experiment 20000477 PARAMETER Experiment Name: Zm_5mM_SA_P Parameter: Age (day) Value: 10
  misc_feature: MA Experiment 20000477 PARAMETER Experiment Name: Zm_5mM_SA_P Parameter: Organism Value: Zea mays
  misc_feature: MA Experiment 20000477 PARAMETER Experiment Name: Zm_5mM_SA_P Parameter: Plant Line Value: 35A19
  misc_feature: MA Experiment 20000477 PARAMETER Experiment Name: Zm_5mM_SA_P Parameter: Timepoint (hr) Value: 48
  misc_feature: MA Experiment 20000477 PARAMETER Experiment Name: Zm_5mM_SA_P Parameter: Tissue Value: Aerial
  misc_feature: MA Experiment 20000477 PARAMETER Experiment Name: Zm_5mM_SA_P Parameter: Treatment Value: 5mM SA vs. No Treatment
  misc_feature: MA Experiment ID: 20000479 Result: Down-regulated in Transcription
  misc_feature: MA Experiment 20000479 PARAMETER Experiment Name: Zm_Drought_P Parameter: Age (day) Value: 10
  misc_feature: MA Experiment 20000479 PARAMETER Experiment Name: Zm_Drought_P Parameter: Organism Value: Zea mays
  misc_feature: MA Experiment 20000479 PARAMETER Experiment Name: Zm_Drought_P Parameter: Plant Line Value: 35A19
  misc_feature: MA Experiment 20000479 PARAMETER Experiment Name: Zm_Drought_P Parameter: Timepoint (hr) Value: 48
  misc_feature: MA Experiment 20000479 PARAMETER Experiment Name: Zm_Drought_P Parameter: Tissue Value: Aerial
  misc_feature: MA Experiment 20000479 PARAMETER Experiment Name: Zm_Drought_P Parameter: Treatment Value: Drought vs. No Drought
  misc_feature: MA Experiment ID: 20000632 Result: Down-regulated in Transcription
  misc_feature: MA Experiment 20000632 PARAMETER Experiment Name: Zm_Herbicide-Treatments_P Parameter: Timepoint (hr) Value: 4
  misc_feature: MA Experiment 20000632 PARAMETER Experiment Name: Zm_Herbicide-Treatments_P Parameter: Tissue Value: Aerial
  misc_feature: MA Experiment 20000632 PARAMETER Experiment Name: Zm_Herbicide-Treatments_P Parameter: Treatment Value: Glean vs. No Treatment
aagctcgcactcactcacacccgcagcgaaggagggagcttgcacgggccaacgcacacacaacacaagctcgtcgtcgatggcgcggtgggctgcggtgctggcgctggccgcggccacggccatcgccgtggcgtccgtggcgggcggcgacatgaacgcggacaagacggagtgcgcggaccagctggtgggcctggcgccgtgcctgcagtacgtgcaggggcaggcccgcgcgccgccgcccgactgctgcggcggcctgcgccaggtgctggggaagagccccaagtgcctgtgcgtgctcgtcaaggacaaggacgaccccaacctgggcatcaagatcaacgccaccctcgcgctcgcgctccccaacgcctgcggcgccacccgcgccaacgtctcccactgcgctcagctcctgcatattcccccgggctccaaagacgccgccgtcttcagtcccggcagcgacaagggctccactgccgctccagccaaggacaactcgacggcgacgaccaactcccgcgcgctgcaggcgaccaccggacgcggcgtctcctcctcggcggcgaccgccggtgctgcactcgcggtgctgctcgccggctacctcctcctgctcgtgccagagctgtcgcctagctcgttctagaccctctgtcaagttgtgccaccagtaggatttgatgtgttgttgttctttctagtacgtgacgtgacagacaatttgctgctggtgtccttgttgttgtagtagttgcactgtgtgttcctgttatgctatgggtacgagatgttagggcatgggttaagctaagctaaggcgatggggtatcagcagtaccttacctctcatctggctgctgatcctttttgttcttggcactgctgttttatctgaacatttgatcagcc

SEQ ID NO: 10338 - protein, 218 aa, Zea mays subsp. mays
  peptide (1)..(218): Ceres Seq. ID no. 12367024
  misc_feature (59)..(137): Pfam Name: Protease inhibitor/seed storage/LTP family Pfam Description: Protease inhibitor/seed storage/LTP family
  misc_feature (29)..(213): Homolog of NCBI NO: 34394084 NR Description: lipid transfer protein-like [Oryza sativa
  misc_feature (33)..(165): Homolog of NCBI NO: 15224863 NR Description: unknown protein; protein id: At2g44300.1
  misc_feature (35)..(195): Homolog of NCBI NO: 15224862 NR Description: unknown protein; protein id: At2g44290.1
  misc_feature (51)..(208): Homolog of NCBI NO: 18405294 NR Description: expressed protein; protein id: At1g55260.1, by cDNA: 13599., supported by cDNA: gi_15724271, supported by gi_19699113 [Arabidopsis thaliana] >gi|25354706|pir||E96594
  misc_feature (51)..(208): Homolog of NCBI NO: 21537387 NR Description: unknown [Arabidopsis thaliana]
  misc_feature (33)..(174): Homolog of NCBI NO: 15231070 NR Description: putative protein; protein id: At3g58550.1, by cDNA: 27380. [Arabidopsis thaliana] >gi|11357439|pir||T45675
  misc_feature (33)..(174): Homolog of NCBI NO: 21555220 NR Description: unknown [Arabidopsis thaliana]
  misc_feature (27)..(203): Homolog of NCBI NO: 25553595 NR Description: OJ1656_E11.26 [Oryza sativa (japonica
  misc_feature (26)..(210): Homolog of NCBI NO: 25553588 NR Description: OJ1656_E11.14 [Oryza sativa (japonica
  misc_feature (37)..(198): Homolog of NCBI NO: 25553602 NR Description: OJ1656_E11.34 [Oryza sativa (japonica
SSHSLTPAAKEGACTGQRTHNTSSSSMARWAAVLALAAATAIAVASVAGGDMNADKTECADQLVGLAPCLQYVQGQARAPPPDCCGGLRQVLGKSPKCLCVLVKDKDDPNLGIKINATLALALPNACGATRANVSHCAQLLHIPPGSKDAAVFSPGSDKGSTAAPAKDNSTATTNSRALQATTGRGVSSSAATAGAALAVLLAGYLLLLVPELSPSSF

SEQ ID NO: 10339 - protein, 215 aa, Zea mays subsp. mays
  peptide (1)..(215): Ceres Seq. ID no. 12367025
KLALTHTRSEGGSLHGPTHTQHKLVVDGAVGCGAGAGRGHGHRRGVRGGRRHERGQDGVRGPAGGPGAVPAVRAGAGPRAAARLLRRPAPGAGEEPQVPVRARQGQGRPQPGHQDQRHPRARAPQRLRRHPRQRLPLRSAPAYSPGLQRRRRLQSRQRQGLHCRSSQGQLDGDDQLPRAAGDHRTRRLLLGGDRRCCTRGAARRLPPPARARAVA

SEQ ID NO: 10340 - protein, 192 aa, Zea mays subsp. mays
  peptide (1)..(192): Ceres Seq. ID no. 12367026
  misc_feature (33)..(111): Pfam Name: Protease inhibitor/seed storage/LTP family Pfam Description: Protease inhibitor/seed storage/LTP family
  misc_feature (3)..(187): Homolog of NCBI NO: 34394084 NR Description: lipid transfer protein-like [Oryza sativa
  misc_feature (7)..(139): Homolog of NCBI NO: 15224863 NR Description: unknown protein; protein id: At2g44300.1
  misc_feature (9)..(169): Homolog of NCBI NO: 15224862 NR Description: unknown protein; protein id: At2g44290.1
  misc_feature (25)..(182): Homolog of NCBI NO: 18405294 NR Description: expressed protein; protein id: At1g55260.1, by cDNA: 13599., supported by cDNA: gi_15724271, supported by gi_19699113 [Arabidopsis thaliana] >gi|25354706|pir||E96594
  misc_feature (25)..(182): Homolog of NCBI NO: 21537387 NR Description: unknown [Arabidopsis thaliana]
  misc_feature (7)..(148): Homolog of NCBI NO: 15231070 NR Description: putative protein; protein id: At3g58550.1, by cDNA: 27380. [Arabidopsis thaliana] >gi|11357439|pir||T45675
  misc_feature (7)..(148): Homolog of NCBI NO: 21555220 NR Description: unknown [Arabidopsis thaliana]
  misc_feature (1)..(177): Homolog of NCBI NO: 25553595 NR Description: OJ1656_E11.26 [Oryza sativa (japonica
  misc_feature (1)..(184): Homolog of NCBI NO: 25553588 NR Description: OJ1656_E11.14 [Oryza sativa (japonica
  misc_feature (11)..(172): Homolog of NCBI NO: 25553602 NR Description: OJ1656_E11.34 [Oryza sativa (japonica
MARWAAVLALAAATAIAVASVAGGDMNADKTECADQLVGLAPCLQYVQGQARAPPPDCCGGLRQVLGKSPKCLCVLVKDKDDPNLGIKINATLALALPNACGATRANVSHCAQLLHIPPGSKDAAVFSPGSDKGSTAAPAKDNSTATTNSRALQATTGRGVSSSAATAGAALAVLLAGYLLLLVPELSPSSF

SEQ ID NO: 10341 - DNA, 927 bp, Zea mays subsp. mays
  misc_feature (1)..(927): Ceres Seq. ID no. 12347657
  misc_feature: MA Experiment ID: 108528 Result: Up-regulated in Transcription
  misc_feature: MA Experiment 108528 PARAMETER Experiment Name: Zm_Imbibed_Seeds_P Parameter: Age (day) Value: 5 vs. 2
  misc_feature: MA Experiment 108528 PARAMETER Experiment Name: Zm_Imbibed_Seeds_P Parameter: Organism Value: Zea mays
  misc_feature: MA Experiment 108528 PARAMETER Experiment Name: Zm_Imbibed_Seeds_P Parameter: Plant Line Value: 35A19
  misc_feature: MA Experiment 108528 PARAMETER Experiment Name: Zm_Imbibed_Seeds_P Parameter: Tissue Value: Aerial vs. Embryo
  misc_feature: MA Experiment ID: 108530 Result: Up-regulated in Transcription
  misc_feature: MA Experiment 108530 PARAMETER Experiment Name: Zm_Imbibed_Seeds_P Parameter: Age (day) Value: 6 vs. 2
  misc_feature: MA Experiment 108530 PARAMETER Experiment Name: Zm_Imbibed_Seeds_P Parameter: Organism Value: Zea mays
  misc_feature: MA Experiment 108530 PARAMETER Experiment Name: Zm_Imbibed_Seeds_P Parameter: Plant Line Value: 35A19
  misc_feature: MA Experiment 108530 PARAMETER Experiment Name: Zm_Imbibed_Seeds_P Parameter: Tissue Value: Aerial vs. Embryo
  misc_feature: MA Experiment ID: 108536 Result: Down-regulated in Transcription
  misc_feature: MA Experiment 108536 PARAMETER Experiment Name: Zm_Meristem_P Parameter: Age (day) Value: 8
  misc_feature: MA Experiment 108536 PARAMETER Experiment Name: Zm_Meristem_P Parameter: Organism Value: Zea mays
  misc_feature: MA Experiment 108536 PARAMETER Experiment Name: Zm_Meristem_P Parameter: Plant Line Value: 35A19
  misc_feature: MA Experiment 108536 PARAMETER Experiment Name: Zm_Meristem_P Parameter: Tissue Value: Shoot Meristem vs. Above Shoot Meristem
  misc_feature: MA Experiment ID: 108543 Result: Up-regulated in Transcription
  misc_feature: MA Experiment ID: 108545 Result: Up-regulated in Transcription
  misc_feature: MA Experiment 108545 PARAMETER Experiment Name: Zm_Imbibed_Seeds_P Parameter: Age (day) Value: 3 vs. 2
  misc_feature: MA Experiment 108545 PARAMETER Experiment Name: Zm_Imbibed_Seeds_P Parameter: Organism Value: Zea mays
  misc_feature: MA Experiment 108545 PARAMETER Experiment Name: Zm_Imbibed_Seeds_P Parameter: Plant Line Value: 35A19
  misc_feature: MA Experiment 108545 PARAMETER Experiment Name: Zm_Imbibed_Seeds_P Parameter: Tissue Value: Aerial vs. Embryo
  misc_feature: MA Experiment ID: 108546 Result: Down-regulated in Transcription
  misc_feature: MA Experiment 108546 PARAMETER Experiment Name: Zm_Imbibed_Seeds_P Parameter: Age (day) Value: 3 vs. 2
  misc_feature: MA Experiment 108546 PARAMETER Experiment Name: Zm_Imbibed_Seeds_P Parameter: Organism Value: Zea mays
  misc_feature: MA Experiment 108546 PARAMETER Experiment Name: Zm_Imbibed_Seeds_P Parameter: Plant Line Value: 35A19
  misc_feature: MA Experiment 108546 PARAMETER Experiment Name: Zm_Imbibed_Seeds_P Parameter: Tissue Value: Roots vs. Embryo
  misc_feature: MA Experiment ID: 20000478 Result: Down-regulated in Transcription
  misc_feature: MA Experiment 20000478 PARAMETER Experiment Name: Zm_5mM_SA_P Parameter: Age (day) Value: 11
  misc_feature: MA Experiment 20000478 PARAMETER Experiment Name: Zm_5mM_SA_P Parameter: Organism Value: Zea mays
  misc_feature: MA Experiment 20000478 PARAMETER Experiment Name: Zm_5mM_SA_P Parameter: Plant Line Value: 35A19
  misc_feature: MA Experiment 20000478 PARAMETER Experiment Name: Zm_5mM_SA_P Parameter: Timepoint (hr) Value: 72
  misc_feature: MA Experiment 20000478 PARAMETER Experiment Name: Zm_5mM_SA_P Parameter: Tissue Value: Aerial
  misc_feature: MA Experiment 20000478 PARAMETER Experiment Name: Zm_5mM_SA_P Parameter: Treatment Value: 5mM SA vs. No Treatment
  misc_feature: MA Experiment ID: 20000480 Result: Down-regulated in Transcription
  misc_feature: MA Experiment 20000480 PARAMETER Experiment Name: Zm_Drought_P Parameter: Age (day) Value: 11
  misc_feature: MA Experiment 20000480 PARAMETER Experiment Name: Zm_Drought_P Parameter: Organism Value: Zea mays
  misc_feature: MA Experiment 20000480 PARAMETER Experiment Name: Zm_Drought_P Parameter: Plant Line Value: 35A19
  misc_feature: MA Experiment 20000480 PARAMETER Experiment Name: Zm_Drought_P Parameter: Timepoint (hr) Value: 72
  misc_feature: MA Experiment 20000480 PARAMETER Experiment Name: Zm_Drought_P Parameter: Tissue Value: Aerial
  misc_feature: MA Experiment 20000480 PARAMETER Experiment Name: Zm_Drought_P Parameter: Treatment Value: Drought vs. No Drought
  misc_feature: MA Experiment ID: 20000492 Result: Up-regulated in Transcription
  misc_feature: MA Experiment 20000492 PARAMETER Experiment Name: Zm_Hybrid_Seed_Dev_P Parameter: DAP Value: 12
  misc_feature: MA Experiment 20000492 PARAMETER Experiment Name: Zm_Hybrid_Seed_Dev_P Parameter: Organism Value: Zea mays
  misc_feature: MA Experiment 20000492 PARAMETER Experiment Name: Zm_Hybrid_Seed_Dev_P Parameter: Plant Line Value: 35A19
  misc_feature: MA Experiment 20000492 PARAMETER Experiment Name: Zm_Hybrid_Seed_Dev_P Parameter: Tissue Value: Fert Kernel vs. Unfert Floret
aatttttccacggagccttccggataggatttgtctcccctccactgcgcctctccgtttccgccatggctccggccgccgccttcctgtcggcgtgcgccgctggttccattccccgtgcgcccttcctgatcccgaggcctcttcttctcccaattccgctctcccctgcgcgctgggaccgctcccgcagctgcagcctctttggcgtaggcgccaacactcgccgcgcgccaacccttcgacggaacgcctccacggagacggtggttccctacgtgccgggctctggcaagtacatagcgccggactacctcgtgaagaaggtgtcagccgaggaggtgcaggagctggtgagggggcagaggaaggtgccgctcatcgttgacttctacgcgacctggtgcgggccctgtgttcagatggcgcaggacatcgagatgcttgcagttgagtatgaggacaatgccctgtttgtgaaggtggacacagatgatgaatatgaatttgcaaaagacatgcaggtaagagggcttccgaccctttacttcttcagtccagaccaaaacaaagatgccatacgcaccgaggggctaattcctatggatatgatcagaaacatcattgacaacgagttatgacagctgatagatcactgtattaggaacataggcaatgttttatctttgtagcagaaaattttttgtcatgaggctaagcattaccgctaggtgctagtttgtgtgcttgatgttttcttttgctccaatggtaggtttcatctgtgcaaatccattctgctgtttctgtatcgtgttgtttattctcatcaaactctaggttgtgtcgtgctgttgtcggttaggcctgtgtgaccattttcatccctcgaatgataagatggctttggctcagattggtcctcac

SEQ ID NO: 10342 - protein, 212 aa, Zea mays subsp. mays
  peptide (1)..(212): Ceres Seq. ID no. 12347658
  misc_feature (105)..(212): Pfam Name: Thioredoxin Pfam Description: Thioredoxin
  misc_feature (21)..(212): Homolog of NCBI NO: 34904898 NR Description: similar to thioredoxin [Oryza sativa (japonica group)] >gi|24417213|dbj|BAC22569.1| similar to thioredoxin
  misc_feature (66)..(212): Homolog of NCBI NO: 8489792 NR Description: putative thioredoxin [Lycopersicon esculentum]
  misc_feature (94)..(212): Homolog of NCBI NO: 15230779 NR Description: thioredoxin, putative; protein id: At3g06730.1, by cDNA: 12284., supported by cDNA: gi_13878104, supported by gi_17104770 [Arabidopsis thaliana] >gi|7549640|gb|AAF63825.1|
  misc_feature (94)..(212): Homolog of NCBI NO: 21537179 NR Description: thioredoxin, putative [Arabidopsis thaliana]
  misc_feature (103)..(208): Homolog of NCBI NO: 15594407 NR Description: thioredoxin (trxA) [Borrelia burgdorferi]
  misc_feature (115)..(212): Homolog of NCBI NO: 135760 NR Description: Thioredoxin 1 (TRX-1) (Thioredoxin M)
  misc_feature (121)..(212): Homolog of NCBI NO: 628902 NR Description: thioredoxin - Chloroflexus aurantiacus
  misc_feature (121)..(212): Homolog of NCBI NO: 1093914 NR Description: thioredoxin
  misc_feature (111)..(205): Homolog of NCBI NO: 21673615 NR Description: thioredoxin [Chlorobium tepidum TLS]
  misc_feature (123)..(212): Homolog of NCBI NO: 29346866 NR Description: thioredoxin (TRX) [Bacteroides thetaiotaomicron
FFHGAFRIGFVSPPLRLSVSAMAPAAAFLSACAAGSIPRAPFLIPRPLLLPIPLSPARWDRSRSCSLFGVGANTRRAPTLRRNASTETVVPYVPGSGKYIAPDYLVKKVSAEEVQELVRGQRKVPLIVDFYATWCGPCVQMAQDIEMLAVEYEDNALFVKVDTDDEYEFAKDMQVRGLPTLYFFSPDQNKDAIRTEGLIPMDMIRNIIDNEL

SEQ ID NO: 10343 - protein, 191 aa, Zea mays subsp. mays
  peptide (1)..(191): Ceres Seq. ID no. 12347659
  misc_feature (84)..(191): Pfam Name: Thioredoxin Pfam Description: Thioredoxin
  misc_feature (1)..(191): Homolog of NCBI NO: 34904898 NR Description: similar to thioredoxin [Oryza sativa (japonica group)] >gi|24417213|dbj|BAC22569.1| similar to thioredoxin
  misc_feature (45)..(191): Homolog of NCBI NO: 8489792 NR Description: putative thioredoxin [Lycopersicon esculentum]
  misc_feature (73)..(191): Homolog of NCBI NO: 15230779 NR Description: thioredoxin, putative; protein id: At3g06730.1, by cDNA: 12284., supported by cDNA: gi_13878104, supported by gi_17104770 [Arabidopsis thaliana] >gi|7549640|gb|AAF63825.1|
  misc_feature (73)..(191): Homolog of NCBI NO: 21537179 NR Description: thioredoxin, putative [Arabidopsis thaliana]
  misc_feature (82)..(187): Homolog of NCBI NO: 15594407 NR Description: thioredoxin (trxA) [Borrelia burgdorferi]
  misc_feature (94)..(191): Homolog of NCBI NO: 135760 NR Description: Thioredoxin 1 (TRX-1) (Thioredoxin M)
  misc_feature (100)..(191): Homolog of NCBI NO: 628902 NR Description: thioredoxin - Chloroflexus aurantiacus
  misc_feature (100)..(191): Homolog of NCBI NO: 1093914 NR Description: thioredoxin
  misc_feature (90)..(184): Homolog of NCBI NO: 21673615 NR Description: thioredoxin [Chlorobium tepidum TLS]
  misc_feature (102)..(191): Homolog of NCBI NO: 29346866 NR Description: thioredoxin (TRX) [Bacteroides thetaiotaomicron
MAPAAAFLSACAAGSIPRAPFLIPRPLLLPIPLSPARWDRSRSCSLFGVGANTRRAPTLRRNASTETVVPYVPGSGKYIAPDYLVKKVSAEEVQELVRGQRKVPLIVDFYATWCGPCVQMAQDIEMLAVEYEDNALFVKVDTDDEYEFAKDMQVRGLPTLYFFSPDQNKDAIRTEGLIPMDMIRNIIDNEL

SEQ ID NO: 10344 - protein, 128 aa, Zea mays subsp. mays
  peptide (1)..(128): Ceres Seq. ID no. 12347660
IFPRSLPDRICLPSTAPLRFRHGSGRRLPVGVRRWFHSPCALPDPEASSSPNSALPCALGPLPQLQPLWRRRQHSPRANPSTERLHGDGGSLRAGLWQVHSAGLPREEGVSRGGAGAGEGAEEGAAHR

SEQ ID NO: 10345 - DNA, 899 bp, Zea mays subsp. mays
  misc_feature (1)..(899): Ceres Seq. ID no. 12351016
  misc_feature: MA Experiment ID: 108522 Result: Up-regulated in Transcription
  misc_feature: MA Experiment 108522 PARAMETER Experiment Name: Zm_42deg_Heat_P Parameter: Age (day) Value: 8
  misc_feature: MA Experiment 108522 PARAMETER Experiment Name: Zm_42deg_Heat_P Parameter: Organism Value: Zea mays
  misc_feature: MA Experiment 108522 PARAMETER Experiment Name: Zm_42deg_Heat_P Parameter: Plant Line Value: 35A19
  misc_feature: MA Experiment 108522 PARAMETER Experiment Name: Zm_42deg_Heat_P Parameter: Temperature (deg C) Value: 42 vs. 22
  misc_feature: MA Experiment 108522 PARAMETER Experiment Name: Zm_42deg_Heat_P Parameter: Timepoint (hr) Value: 1
  misc_feature: MA Experiment 108522 PARAMETER Experiment Name: Zm_42deg_Heat_P Parameter: Tissue Value: Aerial
  misc_feature: MA Experiment ID: 108556 Result: Up-regulated in Transcription
  misc_feature: MA Experiment 108556 PARAMETER Experiment Name: Zm_Drought_P Parameter: Age (day) Value: 9
  misc_feature: MA Experiment 108556 PARAMETER Experiment Name: Zm_Drought_P Parameter: Organism Value: Zea mays
  misc_feature: MA Experiment 108556 PARAMETER Experiment Name: Zm_Drought_P Parameter: Plant Line Value: 35A19
  misc_feature: MA Experiment 108556 PARAMETER Experiment Name: Zm_Drought_P Parameter: Timepoint (hr) Value: 24
  misc_feature: MA Experiment 108556 PARAMETER Experiment Name: Zm_Drought_P Parameter: Tissue Value: Aerial
  misc_feature: MA Experiment 108556 PARAMETER Experiment Name: Zm_Drought_P Parameter: Treatment Value: Drought vs. No Drought
  misc_feature: MA Experiment ID: 108689 Result: Up-regulated in Transcription
  misc_feature: MA Experiment 108689 PARAMETER Experiment Name: Zm_Drought_Roots_P Parameter: Age (day) Value: 9
  misc_feature: MA Experiment 108689 PARAMETER Experiment Name: Zm_Drought_Roots_P Parameter: Organism Value: Zea mays
  misc_feature: MA Experiment 108689 PARAMETER Experiment Name: Zm_Drought_Roots_P Parameter: Plant Line Value: 35A19
  misc_feature: MA Experiment 108689 PARAMETER Experiment Name: Zm_Drought_Roots_P Parameter: Timepoint (hr) Value: 24
  misc_feature: MA Experiment 108689 PARAMETER Experiment Name: Zm_Drought_Roots_P Parameter: Tissue Value: Roots
  misc_feature: MA Experiment 108689 PARAMETER Experiment Name: Zm_Drought_Roots_P Parameter: Treatment Value: Drought vs. No Drought
aaaaaaatcaaaaacaaaagaagcaaacctcgtcgtcacgccatccctctccacctctcgtcttccagacgcctccaatctgggctcccagcggccagcgtctcggaaaagaggagcagcacggcacggcggcgatggcgaggaacgctccaataatatgctaacccgttctacccagtccaattagcagcctcccaaggagaaggagatccaatcctgcgggcgggcgtcccccgtatcccatccatcgatccgaatctcggaatctgcaggaccctgcggcgcggcttcttcgtggagaagaggttgctgccgaagccaccgccaggtagccatgtcgtcctccgtgctgagggctgcggccgacagggccattcgcaggcaggccctcacgctgacgaacgccgcggcgtccaggatccggcagctactcagcctaaggcaacggccatacctgcggctgggtgtcaaagcgcgaggttgcaacggcctctcctacaccctcaactatgccgatgaaaaggggaagttcgatgagcttgtcgaggagaaaggagttaaagtactgatcgaccccaaggctttgatgcatgttataggcaccaagatggactatgttgatgatccattaaagtccgagtttgtgttcataaacccaaattccaaagggcagtgtggctgcggtgagtctttcatgactacaggcagcaaagggtcgacgtcatgaggcgtttttcagtgtaaatgcttagccaagtgtctgcaggctccagggtacagattttcttgtgtctgttgcgtcgcagttcattcatatataataacacagcagtgggtttgtactggatatgcaactaactcgcatttacttgtaatgtaagttcacctcaaatgttgtt

SEQ ID NO: 10346 - protein, 130 aa, Zea mays subsp. mays
  peptide (1)..(130): Ceres Seq. ID no. 12351017
  misc_feature (19)..(121): Pfam Name: HesB-like domain Pfam Description: HesB-like domain
  misc_feature (1)..(122): Homolog of NCBI NO: 16798390 NR Description: iron-sulfur cluster assembly protein IscA
  misc_feature (19)..(120): Homolog of NCBI NO: 23013039 NR Description: hypothetical protein [Magnetospirillum
  misc_feature (2)..(128): Homolog of NCBI NO: 21592728 NR Description: putative HesB-like protein [Arabidopsis thaliana]
  misc_feature (14)..(123): Homolog of NCBI NO: 15227614 NR Description: hypothetical protein; protein id: At2g36260.1
  misc_feature (100)..(130): Homolog of NCBI NO: 34894088 NR Description: P0005A05.9 [Oryza sativa (japonica
  misc_feature (14)..(123): Homolog of NCBI NO: 21805702 NR Description: hypothetical protein [Arabidopsis thaliana]
  misc_feature (61)..(100): Homolog of NCBI NO: 34894088 NR Description: P0005A05.9 [Oryza sativa (japonica
  misc_feature (2)..(128): Homolog of NCBI NO: 15227287 NR Description: putative HesB-like protein; protein id: supported by cDNA: 31917. [Arabidopsis thaliana]
  misc_feature (2)..(120): Homolog of NCBI NO: 25146411 NR Description: Protein Neurospora crassa like [Caenorhabditis
  misc_feature (1)..(121): Homolog of NCBI NO: 11359495 NR Description: hypothetical protein B24M22.180 [imported] - crassa >gi|9453818|emb|CAB99386.1| conserved hypothetical protein
MSSSVLRAAADRAIRRQALTLTNAAASRIRQLLSLRQRPYLRLGVKARGCNGLSYTLNYADEKGKFDELVEEKGVKVLIDPKALMHVIGTKMDYVDDPLKSEFVFINPNSKGQCGCGESFMTTGSKGSTS

SEQ ID NO: 10347 - DNA, 975 bp, Zea mays subsp. mays
  misc_feature (1)..(975): Ceres Seq. ID no. 12367081
  misc_feature: MA Experiment ID: 108504 Result: Down-regulated in Transcription
  misc_feature: MA Experiment 108504 PARAMETER Experiment Name: Zm_Drought_P Parameter: Age (day) Value: 8
  misc_feature: MA Experiment 108504 PARAMETER Experiment Name: Zm_Drought_P Parameter: Organism Value: Zea mays
  misc_feature: MA Experiment 108504 PARAMETER Experiment Name: Zm_Drought_P Parameter: Plant Line Value: 35A19
  misc_feature: MA Experiment 108504 PARAMETER Experiment Name: Zm_Drought_P Parameter: Timepoint (hr) Value: 12
  misc_feature: MA Experiment 108504 PARAMETER Experiment Name: Zm_Drought_P Parameter: Tissue Value: Aerial
  misc_feature: MA Experiment 108504 PARAMETER Experiment Name: Zm_Drought_P Parameter: Treatment Value: Drought vs. No Drought
  misc_feature: MA Experiment ID: 108535 Result: Up-regulated in Transcription
  misc_feature: MA Experiment 108535 PARAMETER Experiment Name: Zm_Meristem_P Parameter: Age (day) Value: 8
  misc_feature: MA Experiment 108535 PARAMETER Experiment Name: Zm_Meristem_P Parameter: Organism Value: Zea mays
  misc_feature: MA Experiment 108535 PARAMETER Experiment Name: Zm_Meristem_P Parameter: Plant Line Value: 35A19
  misc_feature: MA Experiment 108535 PARAMETER Experiment Name: Zm_Meristem_P Parameter: Tissue Value: Root Meristem vs. Above Root Meristem
  misc_feature: MA Experiment ID: 108543 Result: Up-regulated in Transcription
  misc_feature: MA Experiment ID: 20000478 Result: Down-regulated in Transcription
  misc_feature: MA Experiment 20000478 PARAMETER Experiment Name: Zm_5mM_SA_P Parameter: Age (day) Value: 11
  misc_feature: MA Experiment 20000478 PARAMETER Experiment Name: Zm_5mM_SA_P Parameter: Organism Value: Zea mays
  misc_feature: MA Experiment 20000478 PARAMETER Experiment Name: Zm_5mM_SA_P Parameter: Plant Line Value: 35A19
  misc_feature: MA Experiment 20000478 PARAMETER Experiment Name: Zm_5mM_SA_P Parameter: Timepoint (hr) Value: 72
  misc_feature: MA Experiment 20000478 PARAMETER Experiment Name: Zm_5mM_SA_P Parameter: Tissue Value: Aerial
  misc_feature: MA Experiment 20000478 PARAMETER Experiment Name: Zm_5mM_SA_P Parameter: Treatment Value: 5mM SA vs. No Treatment
  misc_feature: MA Experiment ID: 20000480 Result: Down-regulated in Transcription
  misc_feature: MA Experiment 20000480 PARAMETER Experiment Name: Zm_Drought_P Parameter: Age (day) Value: 11
  misc_feature: MA Experiment 20000480 PARAMETER Experiment Name: Zm_Drought_P Parameter: Organism Value: Zea mays
  misc_feature: MA Experiment 20000480 PARAMETER Experiment Name: Zm_Drought_P Parameter: Plant Line Value: 35A19
  misc_feature: MA Experiment 20000480 PARAMETER Experiment Name: Zm_Drought_P Parameter: Timepoint (hr) Value: 72
  misc_feature: MA Experiment 20000480 PARAMETER Experiment Name: Zm_Drought_P Parameter: Tissue Value: Aerial
  misc_feature: MA Experiment 20000480 PARAMETER Experiment Name: Zm_Drought_P Parameter: Treatment Value: Drought vs. No Drought
  misc_feature: MA Experiment ID: 20000632 Result: Down-regulated in Transcription
  misc_feature: MA Experiment 20000632 PARAMETER Experiment Name: Zm_Herbicide-Treatments_P Parameter: Timepoint (hr) Value: 4
  misc_feature: MA Experiment 20000632 PARAMETER Experiment Name: Zm_Herbicide-Treatments_P Parameter: Tissue Value: Aerial
  misc_feature: MA Experiment 20000632 PARAMETER Experiment Name: Zm_Herbicide-Treatments_P Parameter: Treatment Value: Glean vs. No Treatment
attcccagccaatcgcctctcgcttttaaatcctgcgccctaccgccgcctccactcccaccgctctcaatcctcccgcctcttcctaatccgcctcctcccgctcagtcgccgccgtggaggaaggagcaactcgatcgccagtcatgacccggggagagaaccaggagtcgcagaccgggaacgtctccgccgcatctgcggctgcgccgggaccgaagccggcatcggcgggggccgggaagggcgcggagggccagtcggtggtgcggcggctgcagtcggagctgatggcgctgatgatgggcggcgacccgggcgtgtcggcgttccccgagggggacaacatgctccactgggtgggcaccatcgcgggatccgccgggacggcctacgagggcacctcctaccgcctcgcgctggccttcaccgccgagtacccgtacaagccgcccaaggtgcggttcgacaccccctgcttccaccccaacgtcgacgtgcacggcaacatctgcctggacatcctccaggacaagtggtcctccgcctacgacgtgcgcaccatcctcctctccatccagagcctgctcggagagccgaacaacgactcgccgctcaacacgcaggcggcggcgctttgggcgaaccaggaagagttcaggaagatggtggagaagctctacaaggccgccgcgtagaggacagcacacggcgcagatgccgactcaggttcttcaagcaccgatctcacttggatcgattgacgtggatggttttgttgggttgggttcccagtctggtgctgtagcggtgtagcaggaacgcgtgggtagccttgagcctggcgattctgtaattgtcctttgagttctgaaatgttaagagattcatttttacatgactttttgttttttcatttttacactctggatatggacgggactagttgaatttaggaagatcgtatgatctcgc

SEQ ID NO: 10348 - protein, 268 aa, Zea mays subsp. mays
  peptide (1)..(268): Ceres Seq. ID no. 12367082
FPANRLSLLNPAPYRRLHSHRSQSSRLFLIRLLPLSRRRGGRSNSIASHDPGREPGVADRERLRRICGCAGTEAGIGGGREGRGGPVGGAAAAVGADGADDGRRPGRVGVPRGGQHAPLGGHHRGIRRDGLRGHLLPPRAGLHRRVPVQAAQGAVRHPLLPPQRRRARQHLPGHPPGQVVLRLRRAHHPPLHPEPARRAEQRLAAQHAGGGALGEPGRVQEDGGEALQGRRVEDSTRRRCRLRFFKHRSHLDRLTWMVLLGWVPSLVL

SEQ ID NO: 10349 - protein, 183 aa, Zea mays subsp. mays
  peptide (1)..(183): Ceres Seq. ID no. 12367083
  misc_feature (1)..(183): Homolog of NCBI NO: 34903234 NR Description: unnamed protein product [Oryza sativa (japonica group)] >gi|6815106|dbj|BAA90392.1| unnamed protein product
  misc_feature (12)..(180): Homolog of NCBI NO: 18403097 NR Description: E2, ubiquitin-conjugating enzyme, putative;
  misc_feature (12)..(180): Homolog of NCBI NO: 21618179 NR Description: E2, ubiquitin-conjugating enzyme, putative
  misc_feature (11)..(180): Homolog of NCBI NO: 18402475 NR Description: E2, ubiquitin-conjugating enzyme, putative; id: At3g20060.1 [Arabidopsis thaliana]
  misc_feature (25)..(180): Homolog of NCBI NO: 9454557 NR Description: Putative ubiquitin carrier protein [Arabidopsis
  misc_feature (37)..(180): Homolog of NCBI NO: 25293673 NR Description: hypothetical protein F17J6.3 [imported] -
  misc_feature (13)..(180): Homolog of NCBI NO: 3915189 NR Description: UBIQUITIN-CONJUGATING ENZYME X (UBIQUITIN-PROTEIN
  misc_feature (9)..(179): Homolog of NCBI NO: 5902146 NR Description: ubiquitin-conjugating enzyme E2C; ubiquitin
  misc_feature (9)..(179): Homolog of NCBI NO: 27704688 NR Description: similar to ubiquitin-conjugating enzyme E2C [Mus
  misc_feature (9)..(179): Homolog of NCBI NO: 30583869 NR Description: Homo sapiens ubiquitin-conjugating enzyme E2C
MTRGENQESQTGNVSAASAAAPGPKPASAGAGKGAEGQSVVRRLQSELMALMMGGDPGVSAFPEGDNMLHWVGTIAGSAGTAYEGTSYRLALAFTAEYPYKPPKVRFDTPCFHPNVDVHGNICLDILQDKWSSAYDVRTILLSIQSLLGEPNNDSPLNTQAAALWANQEEFRKMVEKLYKAAA

SEQ ID NO: 10350 - protein, 135 aa, Zea mays subsp. mays
  peptide (1)..(135): Ceres Seq. ID no. 12367084
  misc_feature (1)..(135): Homolog of NCBI NO: 34903234 NR Description: unnamed protein product [Oryza sativa (japonica group)] >gi|6815106|dbj|BAA90392.1| unnamed protein product
  misc_feature (1)..(132): Homolog of NCBI NO: 18403097 NR Description: E2, ubiquitin-conjugating enzyme, putative;
  misc_feature (1)..(132): Homolog of NCBI NO: 21618179 NR Description: E2, ubiquitin-conjugating enzyme, putative
  misc_feature (1)..(132): Homolog of NCBI NO: 18402475 NR Description: E2, ubiquitin-conjugating enzyme, putative; id: At3g20060.1 [Arabidopsis thaliana]
  misc_feature (1)..(132): Homolog of NCBI NO: 9454557 NR Description: Putative ubiquitin carrier protein [Arabidopsis
  misc_feature (1)..(132): Homolog of NCBI NO: 25293673 NR Description: hypothetical protein F17J6.3 [imported] -
  misc_feature (1)..(132): Homolog of NCBI NO: 3915189 NR Description: UBIQUITIN-CONJUGATING ENZYME X (UBIQUITIN-PROTEIN
  misc_feature (1)..(131): Homolog of NCBI NO: 5902146 NR Description: ubiquitin-conjugating enzyme E2C; ubiquitin
  misc_feature (1)..(131): Homolog of NCBI NO: 27704688 NR Description: similar to ubiquitin-conjugating enzyme E2C [Mus
  misc_feature (1)..(131): Homolog of NCBI NO: 30583869 NR Description: Homo sapiens ubiquitin-conjugating enzyme E2C
MALMMGGDPGVSAFPEGDNMLHWVGTIAGSAGTAYEGTSYRLALAFTAEYPYKPPKVRFDTPCFHPNVDVHGNICLDILQDKWSSAYDVRTILLSIQSLLGEPNNDSPLNTQAAALWANQEEFRKMVEKLYKAAA

SEQ ID NO: 10351 - DNA, 587 bp, Zea mays subsp. mays
  misc_feature (1)..(587): Ceres Seq. ID no. 12400564
  misc_feature: MA Experiment ID: 108530 Result: Down-regulated in Transcription
  misc_feature: MA Experiment 108530 PARAMETER Experiment Name: Zm_Imbibed_Seeds_P Parameter: Age (day) Value: 6 vs. 2
  misc_feature: MA Experiment 108530 PARAMETER Experiment Name: Zm_Imbibed_Seeds_P Parameter: Organism Value: Zea mays
  misc_feature: MA Experiment 108530 PARAMETER Experiment Name: Zm_Imbibed_Seeds_P Parameter: Plant Line Value: 35A19
  misc_feature: MA Experiment 108530 PARAMETER Experiment Name: Zm_Imbibed_Seeds_P Parameter: Tissue Value: Aerial vs. Embryo
  misc_feature: MA Experiment ID: 108535 Result: Up-regulated in Transcription
  misc_feature: MA Experiment 108535 PARAMETER Experiment Name: Zm_Meristem_P Parameter: Age (day) Value: 8
  misc_feature: MA Experiment 108535 PARAMETER Experiment Name: Zm_Meristem_P Parameter: Organism Value: Zea mays
  misc_feature: MA Experiment 108535 PARAMETER Experiment Name: Zm_Meristem_P Parameter: Plant Line Value: 35A19
  misc_feature: MA Experiment 108535 PARAMETER Experiment Name: Zm_Meristem_P Parameter: Tissue Value: Root Meristem vs. Above Root Meristem
gactgattcttctccttacctgcttctcccggtgtggatctcggctctcgacgagtttcagaggggttgttcgtaacatctgctaagatccgtggcggctgtttaggtgctggatccgtagcggcggcggcggccatggacaagagcatgctcggcgacctggacggcctccccgaggaggacaagatgcggatggccgccatgatcgaccagctccagatccgcgacagcctgagaatgtacaattcgctggtggagaggtgcttcacggactgcgtggacacgttccggcggaagaacctggacaagcaagaggagtcgtgcgtccgccggtgcgcggagaagttcctgaagcactccatgagggtcggcatgaggttcgccgagcttaaccagggtgtggccacgccggactaagaaacacgctgccgctggctggctgctctcgttgcgcgcccgccgccaggtttctggctttcgctggcacagatttgtagccgacaaaaggatttcagcacttcccctgcctgagatatatgcgttttagagccgaacgctgggtgtcagattgaataaaaactgccttg

SEQ ID NO: 10352 - protein, 93 aa, Zea mays subsp. mays
  peptide (1)..(93): Ceres Seq. ID no. 12400565
  misc_feature (20)..(85): Pfam Name: Tim10/DDP family zinc finger Pfam Description: Tim10/DDP family zinc finger
  misc_feature (1)..(93): Homolog of NCBI NO: 12230181 NR Description: Mitochondrial import inner membrane translocase
  misc_feature (1)..(93): Homolog of NCBI NO: 12230182 NR Description: Mitochondrial import inner membrane translocase
  misc_feature (1)..(93): Homolog of NCBI NO: 15231455 NR Description: small zinc finger-like protein TIM9; protein id: supported by cDNA: 9070., supported by cDNA: gi_15028234, by cDNA: gi_19310824, supported by cDNA: gi_5107209 [Arabidopsis
  misc_feature (1)..(93): Homolog of NCBI NO: 21617942 NR Description: mitochondrial import inner membrane translocase
  misc_feature (1)..(91): Homolog of NCBI NO: 5107210 NR Description: small zinc finger-like protein [Arabidopsis
  misc_feature (1)..(91): Homolog of NCBI NO: 11358850 NR Description: small zinc finger-like protein [imported] -
  misc_feature (9)..(86): Homolog of NCBI NO: 12230144 NR Description: Mitochondrial import inner membrane translocase Tim9 >gi|10444070|gb|AAG17695.1| mitochondrial inner membrane
  misc_feature (9)..(86): Homolog of NCBI NO: 6320815 NR Description: Translocase in inner membrane of mitochondria
  misc_feature (9)..(86): Homolog of NCBI NO: 19075508 NR Description: similar to yeast Tim9p essential component of the import machinery; required for transfer of hydrophobic inner carrier proteins across the intermembrane space
  misc_feature (1)..(84): Homolog of NCBI NO: 23481518 NR Description: mitochondrial import inner membrane translocase
MDKSMLGDLDGLPEEDKMRMAAMIDQLQIRDSLRMYNSLVERCFTDCVDTFRRKNLDKQEESCVRRCAEKFLKHSMRVGMRFAELNQGVATPD

SEQ ID NO: 10353 - protein, 89 aa, Zea mays subsp. mays
  peptide (1)..(89): Ceres Seq. ID no. 12400566
  misc_feature (16)..(81): Pfam Name: Tim10/DDP family zinc finger Pfam Description: Tim10/DDP family zinc finger
  misc_feature (1)..(89): Homolog of NCBI NO: 12230181 NR Description: Mitochondrial import inner membrane translocase
  misc_feature (1)..(89): Homolog of NCBI NO: 12230182 NR Description: Mitochondrial import inner membrane translocase
  misc_feature (1)..(89): Homolog of NCBI NO: 15231455 NR Description: small zinc finger-like protein TIM9; protein id: supported by cDNA: 9070., supported by cDNA: gi_15028234, by cDNA: gi_19310824, supported by cDNA: gi_5107209 [Arabidopsis
  misc_feature (1)..(89): Homolog of NCBI NO: 21617942 NR Description: mitochondrial import inner membrane translocase
  misc_feature (1)..(87): Homolog of NCBI NO: 5107210 NR Description: small zinc finger-like protein [Arabidopsis
  misc_feature (1)..(87): Homolog of NCBI NO: 11358850 NR Description: small zinc finger-like protein [imported] -
  misc_feature (5)..(82): Homolog of NCBI NO: 12230144 NR Description: Mitochondrial import inner membrane translocase Tim9 >gi|10444070|gb|AAG17695.1| mitochondrial inner membrane
  misc_feature (5)..(82): Homolog of NCBI NO: 6320815 NR Description: Translocase in inner membrane of mitochondria
  misc_feature (5)..(82): Homolog of NCBI NO: 19075508 NR Description: similar to yeast Tim9p essential component of the import machinery; required for transfer of hydrophobic inner carrier proteins across the intermembrane space
  misc_feature (1)..(80): Homolog of NCBI NO: 23481518 NR Description: mitochondrial import inner membrane translocase
MLGDLDGLPEEDKMRMAAMIDQLQIRDSLRMYNSLVERCFTDCVDTFRRKNLDKQEESCVRRCAEKFLKHSMRVGMRFAELNQGVATPD

SEQ ID NO: 10354 - protein, 76 aa, Zea mays subsp. mays
  peptide (1)..(76): Ceres Seq. ID no. 12400567
  misc_feature (3)..(68): Pfam Name: Tim10/DDP family zinc finger Pfam Description: Tim10/DDP family zinc finger
  misc_feature (1)..(76): Homolog of NCBI NO: 12230181 NR Description: Mitochondrial import inner membrane translocase
  misc_feature (1)..(76): Homolog of NCBI NO: 12230182 NR Description: Mitochondrial import inner membrane translocase
  misc_feature (1)..(76): Homolog of NCBI NO: 15231455 NR Description: small zinc finger-like protein TIM9; protein id: supported by cDNA: 9070., supported by cDNA: gi_15028234, by cDNA: gi_19310824, supported by cDNA: gi_5107209 [Arabidopsis
  misc_feature (1)..(76): Homolog of NCBI NO: 21617942 NR Description: mitochondrial import inner membrane translocase
  misc_feature (1)..(74): Homolog of NCBI NO: 5107210 NR Description: small zinc finger-like protein [Arabidopsis
  misc_feature (1)..(74): Homolog of NCBI NO: 11358850 NR Description: small zinc finger-like protein [imported] -
  misc_feature (1)..(69): Homolog of NCBI NO: 12230144 NR Description: Mitochondrial import inner membrane translocase Tim9 >gi|10444070|gb|AAG17695.1| mitochondrial inner membrane
  misc_feature (1)..(69): Homolog of NCBI NO: 6320815 NR Description: Translocase in inner membrane of mitochondria
  misc_feature (1)..(69): Homolog of NCBI NO: 19075508 NR Description: similar to yeast Tim9p essential component of the import machinery; required for transfer of hydrophobic inner carrier proteins across the intermembrane space
  misc_feature (1)..(67): Homolog of NCBI NO: 23481518 NR Description: mitochondrial import inner membrane translocase
MRMAAMIDQLQIRDSLRMYNSLVERCFTDCVDTFRRKNLDKQEESCVRRCAEKFLKHSMRVGMRFAELNQGVATPD

SEQ ID NO: 10355 - DNA, 932 bp, Zea mays subsp. mays; identical to SEQ ID NO: 3229
  misc_feature (1)..(932): Ceres Seq. ID no. 12400274
  misc_feature: MA Experiment ID: 108528 Result: Up-regulated in Transcription
  misc_feature: MA Experiment 108528 PARAMETER Experiment Name: Zm_Imbibed_Seeds_P Parameter: Age (day) Value: 5 vs. 2
  misc_feature: MA Experiment 108528 PARAMETER Experiment Name: Zm_Imbibed_Seeds_P Parameter: Organism Value: Zea mays
  misc_feature: MA Experiment 108528 PARAMETER Experiment Name: Zm_Imbibed_Seeds_P Parameter: Plant Line Value: 35A19
  misc_feature: MA Experiment 108528 PARAMETER Experiment Name: Zm_Imbibed_Seeds_P Parameter: Tissue Value: Aerial vs. Embryo
  misc_feature: MA Experiment ID: 108530 Result: Up-regulated in Transcription
  misc_feature: MA Experiment 108530 PARAMETER Experiment Name: Zm_Imbibed_Seeds_P Parameter: Age (day) Value: 6 vs. 2
  misc_feature: MA Experiment 108530 PARAMETER Experiment Name: Zm_Imbibed_Seeds_P Parameter: Organism Value: Zea mays
  misc_feature: MA Experiment 108530 PARAMETER Experiment Name: Zm_Imbibed_Seeds_P Parameter: Plant Line Value: 35A19
  misc_feature: MA Experiment 108530 PARAMETER Experiment Name: Zm_Imbibed_Seeds_P Parameter: Tissue Value: Aerial vs. Embryo
  misc_feature: MA Experiment ID: 108545 Result: Up-regulated in Transcription
  misc_feature: MA Experiment 108545 PARAMETER Experiment Name: Zm_Imbibed_Seeds_P Parameter: Age (day) Value: 3 vs. 2
  misc_feature: MA Experiment 108545 PARAMETER Experiment Name: Zm_Imbibed_Seeds_P Parameter: Organism Value: Zea mays
  misc_feature: MA Experiment 108545 PARAMETER Experiment Name: Zm_Imbibed_Seeds_P Parameter: Plant Line Value: 35A19
  misc_feature: MA Experiment 108545 PARAMETER Experiment Name: Zm_Imbibed_Seeds_P Parameter: Tissue Value: Aerial vs. Embryo
  misc_feature: MA Experiment ID: 20000492 Result: Up-regulated in Transcription
  misc_feature: MA Experiment 20000492 PARAMETER Experiment Name: Zm_Hybrid_Seed_Dev_P Parameter: DAP Value: 12
  misc_feature: MA Experiment 20000492 PARAMETER Experiment Name: Zm_Hybrid_Seed_Dev_P Parameter: Organism Value: Zea mays
  misc_feature: MA Experiment 20000492 PARAMETER Experiment Name: Zm_Hybrid_Seed_Dev_P Parameter: Plant Line Value: 35A19
  misc_feature: MA Experiment 20000492 PARAMETER Experiment Name: Zm_Hybrid_Seed_Dev_P Parameter: Tissue Value: Fert Kernel vs. Unfert Floret

SEQ ID NO: 10356 - protein, 151 aa, Zea mays subsp. mays; identical to SEQ ID NO: 3230
  peptide (1)..(151): Ceres Seq. ID no. 12400275
  misc_feature (5)..(117): Homolog of NCBI NO: 34913982 NR Description: peptide deformylase-like protein [Oryza sativa
  misc_feature (26)..(117): Homolog of NCBI NO: 17433049 NR Description: Peptide deformylase, mitochondrial precursor (Polypeptide deformylase) >gi|11320968|gb|AAG33981.1|AF271258_1
  misc_feature (47)..(117): Homolog of NCBI NO: 17433051 NR Description: Peptide deformylase, mitochondrial precursor (Polypeptide deformylase) >gi|25518549|pir||E86288 hypothetical
  misc_feature (47)..(117): Homolog of NCBI NO: 18394237 NR Description: expressed protein; protein id: At1g15390.1, by cDNA: gi_11320951 [Arabidopsis thaliana]
  misc_feature (71)..(117): Homolog of NCBI NO: 37521298 NR Description: polypeptide deformylase [Gloeobacter violaceus]
  misc_feature (71)..(117): Homolog of NCBI NO: 39930960 NR Description: Peptide deformylase 1 (PDF 1) (Polypeptide
  misc_feature (74)..(117): Homolog of NCBI NO: 24645728 NR Description: CG31373-PA [Drosophila melanogaster]
  misc_feature (72)..(124): Homolog of NCBI NO: 11641243 NR Description: peptide deformylase-like protein [Homo sapiens] Peptide deformylase, mitochondrial precursor (PDF) (Polypeptide
  misc_feature (72)..(124): Homolog of NCBI NO: 18043802 NR Description: peptide deformylase-like protein [Homo sapiens]
  misc_feature (72)..(124): Homolog of NCBI NO: 34851655 NR Description: similar to peptide deformylase-like protein

SEQ ID NO: 10357 - protein, 121 aa, Zea mays subsp. mays; identical to SEQ ID NO: 3231
  peptide (1)..(121): Ceres Seq. ID no. 12400276
  misc_feature (20)..(102): Homolog of NCBI NO: 34913982 NR Description: peptide deformylase-like protein [Oryza sativa
  misc_feature (20)..(119): Homolog of NCBI NO: 17433049 NR Description: Peptide deformylase, mitochondrial precursor (Polypeptide deformylase) >gi|11320968|gb|AAG33981.1|AF271258_1
  misc_feature (20)..(119): Homolog of NCBI NO: 17433051 NR Description: Peptide deformylase, mitochondrial precursor (Polypeptide deformylase) >gi|25518549|pir||E86288 hypothetical
  misc_feature (20)..(119): Homolog of NCBI NO: 18394237 NR Description: expressed protein; protein id: At1g15390.1, by cDNA: gi_11320951 [Arabidopsis thaliana]
  misc_feature (8)..(108): Homolog of NCBI NO: 37521298 NR Description: polypeptide deformylase [Gloeobacter violaceus]
  misc_feature (8)..(108): Homolog of NCBI NO: 39930960 NR Description: Peptide deformylase 1 (PDF 1) (Polypeptide
  misc_feature (19)..(104): Homolog of NCBI NO: 24645728 NR Description: CG31373-PA [Drosophila melanogaster]
  misc_feature (20)..(101): Homolog of NCBI NO: 11641243 NR Description: peptide deformylase-like protein [Homo sapiens] Peptide deformylase, mitochondrial precursor (PDF) (Polypeptide
  misc_feature (20)..(101): Homolog of NCBI NO: 18043802 NR Description: peptide deformylase-like protein [Homo sapiens]
  misc_feature (1)..(101): Homolog of NCBI NO: 34851655 NR Description: similar to peptide deformylase-like protein

SEQ ID NO: 10358 - protein, 88 aa, Zea mays subsp. mays; identical to SEQ ID NO: 3232
  peptide (1)..(88): Ceres Seq. ID no. 12400277
  misc_feature (1)..(54): Homolog of NCBI NO: 34913982 NR Description: peptide deformylase-like protein [Oryza sativa
  misc_feature (1)..(54): Homolog of NCBI NO: 17433049 NR Description: Peptide deformylase, mitochondrial precursor (Polypeptide deformylase) >gi|11320968|gb|AAG33981.1|AF271258_1
  misc_feature (1)..(54): Homolog of NCBI NO: 17433051 NR Description: Peptide deformylase, mitochondrial precursor (Polypeptide deformylase) >gi|25518549|pir||E86288 hypothetical
  misc_feature (1)..(54): Homolog of NCBI NO: 18394237 NR Description: expressed protein; protein id: At1g15390.1, by cDNA: gi_11320951 [Arabidopsis thaliana]
  misc_feature (8)..(54): Homolog of NCBI NO: 37521298 NR Description: polypeptide deformylase [Gloeobacter violaceus]
  misc_feature (8)..(54): Homolog of NCBI NO: 39930960 NR Description: Peptide deformylase 1 (PDF 1) (Polypeptide
  misc_feature (11)..(54): Homolog of NCBI NO: 24645728 NR Description: CG31373-PA [Drosophila melanogaster]
  misc_feature (9)..(61): Homolog of NCBI NO: 11641243 NR Description: peptide deformylase-like protein [Homo sapiens] Peptide deformylase, mitochondrial precursor (PDF) (Polypeptide
  misc_feature (9)..(61): Homolog of NCBI NO: 18043802 NR Description: peptide deformylase-like protein [Homo sapiens]
  misc_feature (9)..(61): Homolog of NCBI NO: 34851655 NR Description: similar to peptide deformylase-like protein

SEQ ID NO: 10359 - DNA, 857 bp, Zea mays subsp. mays
  misc_feature (1)..(857): Ceres Seq. ID no. 12400410
  misc_feature: MA Experiment ID: 108522 Result: Up-regulated in Transcription
  misc_feature: MA Experiment 108522 PARAMETER Experiment Name: Zm_42deg_Heat_P Parameter: Age (day) Value: 8
  misc_feature: MA Experiment 108522 PARAMETER Experiment Name: Zm_42deg_Heat_P Parameter: Organism Value: Zea mays
  misc_feature: MA Experiment 108522 PARAMETER Experiment Name: Zm_42deg_Heat_P Parameter: Plant Line Value: 35A19
  misc_feature: MA Experiment 108522 PARAMETER Experiment Name: Zm_42deg_Heat_P Parameter: Temperature (deg C) Value: 42 vs. 22
  misc_feature: MA Experiment 108522 PARAMETER Experiment Name: Zm_42deg_Heat_P Parameter: Timepoint (hr) Value: 1
  misc_feature: MA Experiment 108522 PARAMETER Experiment Name: Zm_42deg_Heat_P Parameter: Tissue Value: Aerial
  misc_feature: MA Experiment ID: 108523 Result: Up-regulated in Transcription
  misc_feature: MA Experiment 108523 PARAMETER Experiment Name: Zm_42deg_Heat_P Parameter: Age (day) Value: 8
  misc_feature: MA Experiment 108523 PARAMETER Experiment Name: Zm_42deg_Heat_P Parameter: Organism Value: Zea mays
  misc_feature: MA Experiment 108523 PARAMETER Experiment Name: Zm_42deg_Heat_P Parameter: Plant Line Value: 35A19
  misc_feature: MA Experiment 108523 PARAMETER Experiment Name: Zm_42deg_Heat_P Parameter: Temperature (deg C) Value: 42 vs. 22
  misc_feature: MA Experiment 108523 PARAMETER Experiment Name: Zm_42deg_Heat_P Parameter: Timepoint (hr) Value: 6
  misc_feature: MA Experiment 108523 PARAMETER Experiment Name: Zm_42deg_Heat_P Parameter: Tissue Value: Aerial
  misc_feature: MA Experiment ID: 108527 Result: Up-regulated in Transcription
  misc_feature: MA Experiment 108527 PARAMETER Experiment Name: Zm_5mM_NO_P Parameter: Age (day) Value: 8
  misc_feature: MA Experiment 108527 PARAMETER Experiment Name: Zm_5mM_NO_P Parameter: Organism Value: Zea mays
  misc_feature: MA Experiment 108527 PARAMETER Experiment Name: Zm_5mM_NO_P Parameter: Plant Line Value: 35A19
  misc_feature: MA Experiment 108527 PARAMETER Experiment Name: Zm_5mM_NO_P Parameter: Timepoint (hr) Value: 6
  misc_feature: MA Experiment 108527 PARAMETER Experiment Name: Zm_5mM_NO_P Parameter: Tissue Value: Aerial
  misc_feature: MA Experiment 108527 PARAMETER Experiment Name: Zm_5mM_NO_P Parameter: Treatment Value: 5mM NO vs. No Treatment
  misc_feature: MA Experiment ID: 108529 Result: Down-regulated in Transcription
  misc_feature: MA Experiment 108529 PARAMETER Experiment Name: Zm_Imbibed_Seeds_P Parameter: Age (day) Value: 5 vs. 2
  misc_feature: MA Experiment 108529 PARAMETER Experiment Name: Zm_Imbibed_Seeds_P Parameter: Organism Value: Zea mays
  misc_feature: MA Experiment 108529 PARAMETER Experiment Name: Zm_Imbibed_Seeds_P Parameter: Plant Line Value: 35A19
  misc_feature: MA Experiment 108529 PARAMETER Experiment Name: Zm_Imbibed_Seeds_P Parameter: Tissue Value: Roots vs. Embryo
  misc_feature: MA Experiment ID: 108530 Result: Down-regulated in Transcription
  misc_feature: MA Experiment 108530 PARAMETER Experiment Name: Zm_Imbibed_Seeds_P Parameter: Age (day) Value: 6 vs. 2
  misc_feature: MA Experiment 108530 PARAMETER Experiment Name: Zm_Imbibed_Seeds_P Parameter: Organism Value: Zea mays
  misc_feature: MA Experiment 108530 PARAMETER Experiment Name: Zm_Imbibed_Seeds_P Parameter: Plant Line Value: 35A19
  misc_feature: MA Experiment 108530 PARAMETER Experiment Name: Zm_Imbibed_Seeds_P Parameter: Tissue Value: Aerial vs. Embryo
  misc_feature: MA Experiment ID: 108545 Result: Down-regulated in Transcription
  misc_feature: MA Experiment 108545 PARAMETER Experiment Name: Zm_Imbibed_Seeds_P Parameter: Age (day) Value: 3 vs. 2
  misc_feature: MA Experiment 108545 PARAMETER Experiment Name: Zm_Imbibed_Seeds_P Parameter: Organism Value: Zea mays
  misc_feature: MA Experiment 108545 PARAMETER Experiment Name: Zm_Imbibed_Seeds_P Parameter: Plant Line Value: 35A19
  misc_feature: MA Experiment 108545 PARAMETER Experiment Name: Zm_Imbibed_Seeds_P Parameter: Tissue Value: Aerial vs. Embryo
  misc_feature: MA Experiment ID: 108546 Result: Down-regulated in Transcription
  misc_feature: MA Experiment 108546 PARAMETER Experiment Name: Zm_Imbibed_Seeds_P Parameter: Age (day) Value: 3 vs. 2
  misc_feature: MA Experiment 108546 PARAMETER Experiment Name: Zm_Imbibed_Seeds_P Parameter: Organism Value: Zea mays
  misc_feature: MA Experiment 108546 PARAMETER Experiment Name: Zm_Imbibed_Seeds_P Parameter: Plant Line Value: 35A19
  misc_feature: MA Experiment 108546 PARAMETER Experiment Name: Zm_Imbibed_Seeds_P Parameter: Tissue Value: Roots vs. Embryo
  misc_feature: MA Experiment ID: 108547 Result: Down-regulated in Transcription
  misc_feature: MA Experiment 108547 PARAMETER Experiment Name: Zm_Imbibed_Seeds_P Parameter: Age (day) Value: 4 vs. 2
  misc_feature: MA Experiment 108547 PARAMETER Experiment Name: Zm_Imbibed_Seeds_P Parameter: Organism Value: Zea mays
  misc_feature: MA Experiment 108547 PARAMETER Experiment Name: Zm_Imbibed_Seeds_P Parameter: Plant Line Value: 35A19
  misc_feature: MA Experiment 108547 PARAMETER Experiment Name: Zm_Imbibed_Seeds_P Parameter: Tissue Value: Aerial vs. Embryo
  misc_feature: MA Experiment ID: 108556 Result: Up-regulated in Transcription
  misc_feature: MA Experiment 108556 PARAMETER Experiment Name: Zm_Drought_P Parameter: Age (day) Value: 9
  misc_feature: MA Experiment 108556 PARAMETER Experiment Name: Zm_Drought_P Parameter: Organism Value: Zea mays
  misc_feature: MA Experiment 108556 PARAMETER Experiment Name: Zm_Drought_P Parameter: Plant Line Value: 35A19
  misc_feature: MA Experiment 108556 PARAMETER Experiment Name: Zm_Drought_P Parameter: Timepoint (hr) Value: 24
  misc_feature: MA Experiment 108556 PARAMETER Experiment Name: Zm_Drought_P Parameter: Tissue Value: Aerial
  misc_feature: MA Experiment 108556 PARAMETER Experiment Name: Zm_Drought_P Parameter: Treatment Value: Drought vs. No Drought
  misc_feature: MA Experiment ID: 108559 Result: Up-regulated in Transcription
  misc_feature: MA Experiment 108559 PARAMETER Experiment Name: Zm_5mM_NO_P Parameter: Age (day) Value: 8
  misc_feature: MA Experiment 108559 PARAMETER Experiment Name: Zm_5mM_NO_P Parameter: Organism Value: Zea mays
  misc_feature: MA Experiment 108559 PARAMETER Experiment Name: Zm_5mM_NO_P Parameter: Plant Line Value: 35A19
  misc_feature: MA Experiment 108559 PARAMETER Experiment Name: Zm_5mM_NO_P Parameter: Timepoint (hr) Value: 12
  misc_feature: MA Experiment 108559 PARAMETER Experiment Name: Zm_5mM_NO_P Parameter: Tissue Value: Aerial
  misc_feature: MA Experiment 108559 PARAMETER Experiment Name: Zm_5mM_NO_P Parameter: Treatment Value: 5mM NO vs. No Treatment
  misc_feature: MA Experiment ID: 20000478 Result: Up-regulated in Transcription
  misc_feature: MA Experiment 20000478 PARAMETER Experiment Name: Zm_5mM_SA_P Parameter: Age (day) Value: 11
  misc_feature: MA Experiment 20000478 PARAMETER Experiment Name: Zm_5mM_SA_P Parameter: Organism Value: Zea mays
  misc_feature: MA Experiment 20000478 PARAMETER Experiment Name: Zm_5mM_SA_P Parameter: Plant Line Value: 35A19
  misc_feature: MA Experiment 20000478 PARAMETER Experiment Name: Zm_5mM_SA_P Parameter: Timepoint (hr) Value: 72
  misc_feature: MA Experiment 20000478 PARAMETER Experiment Name: Zm_5mM_SA_P Parameter: Tissue Value: Aerial
  misc_feature: MA Experiment 20000478 PARAMETER Experiment Name: Zm_5mM_SA_P Parameter: Treatment Value: 5mM SA vs. No Treatment
  misc_feature: MA Experiment ID: 20000480 Result: Up-regulated in Transcription
  misc_feature: MA Experiment 20000480 PARAMETER Experiment Name: Zm_Drought_P Parameter: Age (day) Value: 11
  misc_feature: MA Experiment 20000480 PARAMETER Experiment Name: Zm_Drought_P Parameter: Organism Value: Zea mays
  misc_feature: MA Experiment 20000480 PARAMETER Experiment Name: Zm_Drought_P Parameter: Plant Line Value: 35A19
  misc_feature: MA Experiment 20000480 PARAMETER Experiment Name: Zm_Drought_P Parameter: Timepoint (hr) Value: 72
  misc_feature: MA Experiment 20000480 PARAMETER Experiment Name: Zm_Drought_P Parameter: Tissue Value: Aerial
  misc_feature: MA Experiment 20000480 PARAMETER Experiment Name: Zm_Drought_P Parameter: Treatment Value: Drought vs. No Drought
  misc_feature: MA Experiment ID: 20000535 Result: Up-regulated in Transcription
  misc_feature: MA Experiment 20000535 PARAMETER Experiment Name: Zm_Hybrid_Seed_Dev_P Parameter: DAP Value: 30 vs. 12
  misc_feature: MA Experiment 20000535 PARAMETER Experiment Name: Zm_Hybrid_Seed_Dev_P Parameter: Organism Value: Zea mays
  misc_feature: MA Experiment 20000535 PARAMETER Experiment Name: Zm_Hybrid_Seed_Dev_P Parameter: Plant Line Value: 35A19
  misc_feature: MA Experiment 20000535 PARAMETER Experiment Name: Zm_Hybrid_Seed_Dev_P Parameter: Tissue Value: Embryo vs. Unfert Floret
  misc_feature: MA Experiment ID: 20000626 Result: Up-regulated in Transcription
  misc_feature: MA Experiment 20000626 PARAMETER Experiment Name: Zm_Herbicide-Treatments_P Parameter: Timepoint (hr) Value: 12
  misc_feature: MA Experiment 20000626 PARAMETER Experiment Name: Zm_Herbicide-Treatments_P Parameter: Tissue Value: Aerial
  misc_feature: MA Experiment 20000626 PARAMETER Experiment Name: Zm_Herbicide-Treatments_P Parameter: Treatment Value: Roundup vs. No Treatment
aaactcatcccaaaccagagcgaagaagaatcgccatcacagcaagctacgcgcactgaaatcctccaatccacaggacacagctctacttccacagttcgcagactcgcacgcaccgagcggctagcgatcaacgagaaatgtcgctggtgaggcgcagcagcgtgttcgacccattctctgtggacctcttcgaccccttcgacagcatgttccgctccatcgtgccgccgtcgttgtcgtcgtcggcggcctccgagaccgccgccttcgccagcgcccgcatcgactggaaggagacgcccgaggcgcacgtgttcaaggccgacctccccggcgtgaagaaggaggaggtcaaggtggaggtggaggacggcaacgtgctgctcatcagcgggcagcgcagcagggagaaggaggacaagggcgacaagtggcaccgcgtggagcgcagcagcggccagttcgtgcggcgcttccgcctgccggagaacgccaagacggaggaggtgaggggccgcgctggagaacggcgtgctcacggtcaccgtgcccaaggccgaggtcaagaagcccgaggttaagagcatccagatctccgtctgaagaagacatggacgcgaggtgaatggtcgcgtcgcgttcgcgtcgcggcgtcgggtcttgggtttcagcgacgcgactcgtgtgtgtggtactgtggttgctctgctttggtatgtctggtgtgtacgtgtgctgttcagtgtttcgtggtcatcgtctgtacattgtgctgttcggtgagctccccgactcagtgtgttgtgttctgcgagtgaataaataaaaacaaaccagctgtcgtctcgtgtcgt

SEQ ID NO: 10360 - protein, 147 aa, Zea mays subsp. mays
  peptide (1)..(147): Ceres Seq. ID no. 12400411
  misc_feature (1)..(125): Homolog of NCBI NO: 100883 NR Description: heat shock protein 17.2 - maize
  misc_feature (1)..(125): Homolog of NCBI NO: 123543 NR Description: 16.9 KD CLASS I HEAT SHOCK PROTEIN
  misc_feature (1)..(125): Homolog of NCBI NO: 169799 NR Description: 16.9 kDa heat shock protein
  misc_feature (1)..(125): Homolog of NCBI NO: 7441298 NR Description: heat shock protein 17.0 - pearl millet
  misc_feature (1)..(125): Homolog of NCBI NO: 123545 NR Description: 16.9 KD CLASS I HEAT SHOCK PROTEIN (LOW MOLECULAR HEAT SHOCK PROTEIN) (HEAT SHOCK PROTEIN 17) (HSP 16.9)
  misc_feature (1)..(125): Homolog of NCBI NO: 15408722 NR Description: putative 16.9 kDa heat shock protein [Oryza
  misc_feature (1)..(125): Homolog of NCBI NO: 17942916 NR Description: Chain A, Crystal Structure And Assembly Of An Small Heat Shock Protein >gi|17942917|pdb|1GME|B Chain B, Crystal And Assembly Of An Eukaryotic Small Heat Shock Protein Shock
  misc_feature (1)..(125): Homolog of NCBI NO: 1536911 NR Description: 17 kDa class I small heat shock protein [Hordeum
  misc_feature (1)..(125): Homolog of NCBI NO: 7441301 NR Description: heat shock protein - rice
  misc_feature (1)..(125): Homolog of NCBI NO: 100789 NR Description: heat shock protein 16.9B - wheat
MSLVRRSSVFDPFSVDLFDPFDSMFRSIVPPSLSSSAASETAAFASARIDWKETPEAHVFKADLPGVKKEEVKVEVEDGNVLLISGQRSREKEDKGDKWHRVERSSGQFVRRFRLPENAKTEEVRGRAGERRAHGHRAQGRGQEARG

SEQ ID NO: 10361 - protein, 124 aa, Zea mays subsp. mays
  peptide (1)..(124): Ceres Seq. ID no. 12400412
  misc_feature (1)..(102): Homolog of NCBI NO: 100883 NR Description: heat shock protein 17.2 - maize
  misc_feature (1)..(102): Homolog of NCBI NO: 123543 NR Description: 16.9 KD CLASS I HEAT SHOCK PROTEIN
  misc_feature (1)..(102): Homolog of NCBI NO: 169799 NR Description: 16.9 kDa heat shock protein
  misc_feature (1)..(102): Homolog of NCBI NO: 7441298 NR Description: heat shock protein 17.0 - pearl millet
  misc_feature (1)..(102): Homolog of NCBI NO: 123545 NR Description: 16.9 KD CLASS I HEAT SHOCK PROTEIN (LOW MOLECULAR HEAT SHOCK PROTEIN) (HEAT SHOCK PROTEIN 17) (HSP 16.9)
  misc_feature (1)..(102): Homolog of NCBI NO: 15408722 NR Description: putative 16.9 kDa heat shock protein [Oryza
  misc_feature (1)..(102): Homolog of NCBI NO: 17942916 NR Description: Chain A, Crystal Structure And Assembly Of An Small Heat Shock Protein >gi|17942917|pdb|1GME|B Chain B, Crystal And Assembly Of An Eukaryotic Small Heat Shock Protein Shock
  misc_feature (1)..(102): Homolog of NCBI NO: 1536911 NR Description: 17 kDa class I small heat shock protein [Hordeum
  misc_feature (1)..(102): Homolog of NCBI NO: 7441301 NR Description: heat shock protein - rice
  misc_feature (1)..(102): Homolog of NCBI NO: 100789 NR Description: heat shock protein 16.9B - wheat
MFRSIVPPSLSSSAASETAAFASARIDWKETPEAHVFKADLPGVKKEEVKVEVEDGNVLLISGQRSREKEDKGDKWHRVERSSGQFVRRFRLPENAKTEEVRGRAGERRAHGHRAQGRGQEARG

SEQ ID NO: 10362 - DNA, 861 bp, Zea mays subsp. mays
  misc_feature (1)..(861): Ceres Seq. ID no. 12342053
  misc_feature: MA Experiment ID: 108527 Result: Down-regulated in Transcription
  misc_feature: MA Experiment 108527 PARAMETER Experiment Name: Zm_5mM_NO_P Parameter: Age (day) Value: 8
  misc_feature: MA Experiment 108527 PARAMETER Experiment Name: Zm_5mM_NO_P Parameter: Organism Value: Zea mays
  misc_feature: MA Experiment 108527 PARAMETER Experiment Name: Zm_5mM_NO_P Parameter: Plant Line Value: 35A19
  misc_feature: MA Experiment 108527 PARAMETER Experiment Name: Zm_5mM_NO_P Parameter: Timepoint (hr) Value: 6
  misc_feature: MA Experiment 108527 PARAMETER Experiment Name: Zm_5mM_NO_P Parameter: Tissue Value: Aerial
  misc_feature: MA Experiment 108527 PARAMETER Experiment Name: Zm_5mM_NO_P Parameter: Treatment Value: 5mM NO vs. No Treatment
  misc_feature: MA Experiment ID: 108545 Result: Up-regulated in Transcription
  misc_feature: MA Experiment 108545 PARAMETER Experiment Name: Zm_Imbibed_Seeds_P Parameter: Age (day) Value: 3 vs. 2
  misc_feature: MA Experiment 108545 PARAMETER Experiment Name: Zm_Imbibed_Seeds_P Parameter: Organism Value: Zea mays
  misc_feature: MA Experiment 108545 PARAMETER Experiment Name: Zm_Imbibed_Seeds_P Parameter: Plant Line Value: 35A19
  misc_feature: MA Experiment 108545 PARAMETER Experiment Name: Zm_Imbibed_Seeds_P Parameter: Tissue Value: Aerial vs. Embryo
  misc_feature: MA Experiment ID: 108547 Result: Up-regulated in Transcription
  misc_feature: MA Experiment 108547 PARAMETER Experiment Name: Zm_Imbibed_Seeds_P Parameter: Age (day) Value: 4 vs. 2
  misc_feature: MA Experiment 108547 PARAMETER Experiment Name: Zm_Imbibed_Seeds_P Parameter: Organism Value: Zea mays
  misc_feature: MA Experiment 108547 PARAMETER Experiment Name: Zm_Imbibed_Seeds_P Parameter: Plant Line Value: 35A19
  misc_feature: MA Experiment 108547 PARAMETER Experiment Name: Zm_Imbibed_Seeds_P Parameter: Tissue Value: Aerial vs. Embryo
aacgaagagagggaaaacaagtgtggaagagggaaaactggaaaaggcacagcaaaccgagaaaatggcggctcggcgtgggcgagagtgggacggggacgagcagggcgcggcgctgccaacgccggcgcccctcggcgcgccggtcgtctgccttctcagctccgccggagacctagccgccggcgccttcgtaggctccctcgtcggatacggaaaaggtttgatcacaaaccaaggcacgaaggcttgtcttagcattgctggatcttctgcaaagacatttgctgctcttgctggtgtccaaagtttcatcatgtgcttgctaagaagactgcgtgggaaagatgacatgatcaatgcgggtatggcaggttgttgcacaggcattgctttgagctttccaggtgcgccccaggcaatgttccacagctgtgtcaccttcgcagcattctcatgcataatggacggtctcagcaagcagcaggcagcaatggcactcacacttgatgtgaaatctccaactgtcaagtatgaggagggccgggtcatcccaccattcactcttccgccgcttctggatgcattggatcctctaggttcattctgccagacccttatcaagcctaagcattaggagtgcgctgaggcttgttaccccaaaaaggcagtttcgatctatagtttggcactgtatgctctataaccgttctgaatttgtctccagtcatgctgttcaagtttggtaactgtagtggcgctataggacatatgcccattttttgtcaatggtacattttttatgaaacttgctgaagagattataaccataagattgttcattggtgaagatttgatagt

SEQ ID NO: 10363 - protein, 211 aa, Zea mays subsp. mays
  peptide (1)..(211): Ceres Seq. ID no. 12342054
  misc_feature (45)..(162): Pfam Name: Tim17/Tim22/Tim23 family Pfam Description: Tim17/Tim22/Tim23 family
  misc_feature (22)..(210): Homolog of NCBI NO: 37533490 NR Description: unknown protein [Oryza sativa (japonica
  misc_feature (22)..(211): Homolog of NCBI NO: 24414272 NR Description: Unknown protein [Oryza sativa (japonica
  misc_feature (31)..(210): Homolog of NCBI NO: 15240525 NR Description: putative protein; protein id: At5g55510.1
  misc_feature (31)..(210): Homolog of NCBI NO: 18416798 NR Description: putative protein; protein id: At4g26670.1, by cDNA: 5367., supported by cDNA: gi_15294263, supported by gi_20857096 [Arabidopsis thaliana]
  misc_feature (31)..(210): Homolog of NCBI NO: 9758183 NR Description: contains similarity to unknown
  misc_feature (31)..(210): Homolog of NCBI NO: 7485327 NR Description: hypothetical protein F10M23.10 - Arabidopsis >gi|4455190|emb|CAB36513.1| putative protein [Arabidopsis >gi|7269519|emb|CAB79522.1| putative protein [Arabidopsis
  misc_feature (90)..(156): Homolog of NCBI NO: 18398755 NR Description: expressed protein; protein id: At3g10110.1,
TKRGKTSVEEGKLEKAQQTEKMAARRGREWDGDEQGAALPTPAPLGAPVVCLLSSAGDLAAGAFVGSLVGYGKGLITNQGTKACLSIAGSSAKTFAALAGVQSFIMCLLRRLRGKDDMINAGMAGCCTGIALSFPGAPQAMFHSCVTFAAFSCIMDGLSKQQAAMALTLDVKSPTVKYEEGRVIPPFTLPPLLDALDPLGSFCQTLIKPKH

SEQ ID NO: 10364 - protein, 190 aa, Zea mays subsp. mays
  peptide (1)..(190): Ceres Seq. ID no. 12342055
  misc_feature (24)..(141): Pfam Name: Tim17/Tim22/Tim23 family Pfam Description: Tim17/Tim22/Tim23 family
  misc_feature (1)..(189): Homolog of NCBI NO: 37533490 NR Description: unknown protein [Oryza sativa (japonica
  misc_feature (1)..(190): Homolog of NCBI NO: 24414272 NR Description: Unknown protein [Oryza sativa (japonica
  misc_feature (10)..(189): Homolog of NCBI NO: 15240525 NR Description: putative protein; protein id: At5g55510.1
  misc_feature (10)..(189): Homolog of NCBI NO: 18416798 NR Description: putative protein; protein id: At4g26670.1, by cDNA: 5367., supported by cDNA: gi_15294263, supported by gi_20857096 [Arabidopsis thaliana]
  misc_feature (10)..(189): Homolog of NCBI NO: 9758183 NR Description: contains similarity to unknown
  misc_feature (10)..(189): Homolog of NCBI NO: 7485327 NR Description: hypothetical protein F10M23.10 - Arabidopsis >gi|4455190|emb|CAB36513.1| putative protein [Arabidopsis >gi|7269519|emb|CAB79522.1| putative protein [Arabidopsis
  misc_feature (69)..(135): Homolog of NCBI NO: 18398755 NR Description: expressed protein; protein id: At3g10110.1,
MAARRGREWDGDEQGAALPTPAPLGAPVVCLLSSAGDLAAGAFVGSLVGYGKGLITNQGTKACLSIAGSSAKTFAALAGVQSFIMCLLRRLRGKDDMINAGMAGCCTGIALSFPGAPQAMFHSCVTFAAFSCIMDGLSKQQAAMALTLDVKSPTVKYEEGRVIPPFTLPPLLDALDPLGSFCQTLIKPKH

SEQ ID NO: 10365 - protein, 106 aa, Zea mays subsp. mays
  peptide (1)..(106): Ceres Seq. ID no. 12342056
  misc_feature (1)..(57): Pfam Name: Tim17/Tim22/Tim23 family Pfam Description: Tim17/Tim22/Tim23 family
  misc_feature (1)..(105): Homolog of NCBI NO: 37533490 NR Description: unknown protein [Oryza sativa (japonica
  misc_feature (1)..(106): Homolog of NCBI NO: 24414272 NR Description: Unknown protein [Oryza sativa (japonica
  misc_feature (1)..(105): Homolog of NCBI NO: 15240525 NR Description: putative protein; protein id: At5g55510.1
  misc_feature (1)..(105): Homolog of NCBI NO: 18416798 NR Description: putative protein; protein id: At4g26670.1, by cDNA: 5367., supported by cDNA: gi_15294263, supported by gi_20857096 [Arabidopsis thaliana]
  misc_feature (1)..(105): Homolog of NCBI NO: 9758183 NR Description: contains similarity to unknown
  misc_feature (1)..(105): Homolog of NCBI NO: 7485327 NR Description: hypothetical protein F10M23.10 - Arabidopsis >gi|4455190|emb|CAB36513.1| putative protein [Arabidopsis >gi|7269519|emb|CAB79522.1| putative protein [Arabidopsis
  misc_feature (1)..(51): Homolog of NCBI NO: 18398755 NR Description: expressed protein; protein id: At3g10110.1,
MCLLRRLRGKDDMINAGMAGCCTGIALSFPGAPQAMFHSCVTFAAFSCIMDGLSKQQAAMALTLDVKSPTVKYEEGRVIPPFTLPPLLDALDPLGSFCQTLIKPKH

SEQ ID NO: 10366 - DNA, 552 bp, Zea mays subsp. mays
  misc_feature (1)..(552): Ceres Seq. ID no. 12361769
  misc_feature: MA Experiment ID: 108528 Result: Up-regulated in Transcription
  misc_feature: MA Experiment 108528 PARAMETER Experiment Name: Zm_Imbibed_Seeds_P Parameter: Age (day) Value: 5 vs. 2
  misc_feature: MA Experiment 108528 PARAMETER Experiment Name: Zm_Imbibed_Seeds_P Parameter: Organism Value: Zea mays
  misc_feature: MA Experiment 108528 PARAMETER Experiment Name: Zm_Imbibed_Seeds_P Parameter: Plant Line Value: 35A19
  misc_feature: MA Experiment 108528 PARAMETER Experiment Name: Zm_Imbibed_Seeds_P Parameter: Tissue Value: Aerial vs. Embryo
  misc_feature: MA Experiment ID: 108530 Result: Up-regulated in Transcription
  misc_feature: MA Experiment 108530 PARAMETER Experiment Name: Zm_Imbibed_Seeds_P Parameter: Age (day) Value: 6 vs. 2
  misc_feature: MA Experiment 108530 PARAMETER Experiment Name: Zm_Imbibed_Seeds_P Parameter: Organism Value: Zea mays
  misc_feature: MA Experiment 108530 PARAMETER Experiment Name: Zm_Imbibed_Seeds_P Parameter: Plant Line Value: 35A19
  misc_feature: MA Experiment 108530 PARAMETER Experiment Name: Zm_Imbibed_Seeds_P Parameter: Tissue Value: Aerial vs. Embryo
  misc_feature: MA Experiment ID: 108534 Result: Down-regulated in Transcription
  misc_feature: MA Experiment 108534 PARAMETER Experiment Name: Zm_4deg_Cold_P Parameter: Age (hr) Value: 8
  misc_feature: MA Experiment 108534 PARAMETER Experiment Name: Zm_4deg_Cold_P Parameter: Organism Value: Zea mays
  misc_feature: MA Experiment 108534 PARAMETER Experiment Name: Zm_4deg_Cold_P Parameter: Plant Line Value: 35A19
  misc_feature: MA Experiment 108534 PARAMETER Experiment Name: Zm_4deg_Cold_P Parameter: Temperature (deg C) Value: 4 vs. 22
  misc_feature: MA Experiment 108534 PARAMETER Experiment Name: Zm_4deg_Cold_P Parameter: Timepoint (hr) Value: 6
  misc_feature: MA Experiment 108534 PARAMETER Experiment Name: Zm_4deg_Cold_P Parameter: Tissue Value: Aerial
  misc_feature: MA Experiment ID: 108536 Result: Down-regulated in Transcription
  misc_feature: MA Experiment 108536 PARAMETER Experiment Name: Zm_Meristem_P Parameter: Age (day) Value: 8
  misc_feature: MA Experiment 108536 PARAMETER Experiment Name: Zm_Meristem_P Parameter: Organism Value: Zea mays
  misc_feature: MA Experiment 108536 PARAMETER Experiment Name: Zm_Meristem_P Parameter: Plant Line Value: 35A19
  misc_feature: MA Experiment 108536 PARAMETER Experiment Name: Zm_Meristem_P Parameter: Tissue Value: Shoot Meristem vs. Above Shoot Meristem
  misc_feature: MA Experiment ID: 108543 Result: Down-regulated in Transcription
  misc_feature: MA Experiment ID: 108544 Result: Down-regulated in Transcription
  misc_feature: MA Experiment ID: 108545 Result: Up-regulated in Transcription
  misc_feature: MA Experiment 108545 PARAMETER Experiment Name: Zm_Imbibed_Seeds_P Parameter: Age (day) Value: 3 vs. 2
  misc_feature: MA Experiment 108545 PARAMETER Experiment Name: Zm_Imbibed_Seeds_P Parameter: Organism Value: Zea mays
  misc_feature: MA Experiment 108545 PARAMETER Experiment Name: Zm_Imbibed_Seeds_P Parameter: Plant Line Value: 35A19
  misc_feature: MA Experiment 108545 PARAMETER Experiment Name: Zm_Imbibed_Seeds_P Parameter: Tissue Value: Aerial vs. Embryo
  misc_feature: MA Experiment ID: 108546 Result: Down-regulated in Transcription
  misc_feature: MA Experiment 108546 PARAMETER Experiment Name: Zm_Imbibed_Seeds_P Parameter: Age (day) Value: 3 vs. 2
  misc_feature: MA Experiment 108546 PARAMETER Experiment Name: Zm_Imbibed_Seeds_P Parameter: Organism Value: Zea mays
  misc_feature: MA Experiment 108546 PARAMETER Experiment Name: Zm_Imbibed_Seeds_P Parameter: Plant Line Value: 35A19
  misc_feature: MA Experiment 108546 PARAMETER Experiment Name: Zm_Imbibed_Seeds_P Parameter: Tissue Value: Roots vs. Embryo
  misc_feature: MA Experiment ID: 108547 Result: Up-regulated in Transcription
  misc_feature: MA Experiment 108547 PARAMETER Experiment Name: Zm_Imbibed_Seeds_P Parameter: Age (day) Value: 4 vs. 2
  misc_feature: MA Experiment 108547 PARAMETER Experiment Name: Zm_Imbibed_Seeds_P Parameter: Organism Value: Zea mays
  misc_feature: MA Experiment 108547 PARAMETER Experiment Name: Zm_Imbibed_Seeds_P Parameter: Plant Line Value: 35A19
  misc_feature: MA Experiment 108547 PARAMETER Experiment Name: Zm_Imbibed_Seeds_P Parameter: Tissue Value: Aerial vs. Embryo
  misc_feature: MA Experiment ID: 108556 Result: Down-regulated in Transcription
  misc_feature: MA Experiment 108556 PARAMETER Experiment Name: Zm_Drought_P Parameter: Age (day) Value: 9
  misc_feature: MA Experiment 108556 PARAMETER Experiment Name: Zm_Drought_P Parameter: Organism Value: Zea mays
  misc_feature: MA Experiment 108556 PARAMETER Experiment Name: Zm_Drought_P Parameter: Plant Line Value: 35A19
  misc_feature: MA Experiment 108556 PARAMETER Experiment Name: Zm_Drought_P Parameter: Timepoint (hr) Value: 24
  misc_feature: MA Experiment 108556 PARAMETER Experiment Name: Zm_Drought_P Parameter: Tissue Value: Aerial
  misc_feature: MA Experiment 108556 PARAMETER Experiment Name: Zm_Drought_P Parameter: Treatment Value: Drought vs. No Drought
  misc_feature: MA Experiment ID: 108687 Result: Down-regulated in Transcription
  misc_feature: MA Experiment 108687 PARAMETER Experiment Name: Zm_Embryos-Flowers__P Parameter: Tissue Value: Embryo vs. Aerial+
  misc_feature: MA Experiment ID: 20000480 Result: Down-regulated in Transcription
  misc_feature: MA Experiment 20000480 PARAMETER Experiment Name: Zm_Drought_P Parameter: Age (day) Value: 11
  misc_feature: MA Experiment 20000480 PARAMETER Experiment Name: Zm_Drought_P Parameter: Organism Value: Zea mays
  misc_feature: MA Experiment 20000480 PARAMETER Experiment Name: Zm_Drought_P Parameter: Plant Line Value: 35A19
  misc_feature: MA Experiment 20000480 PARAMETER Experiment Name: Zm_Drought_P Parameter: Timepoint (hr) Value: 72
  misc_feature: MA Experiment 20000480 PARAMETER Experiment Name: Zm_Drought_P Parameter: Tissue Value: Aerial
  misc_feature: MA Experiment 20000480 PARAMETER Experiment Name: Zm_Drought_P Parameter: Treatment Value: Drought vs. No Drought
  misc_feature: MA Experiment ID: 20000492 Result: Down-regulated in Transcription
  misc_feature: MA Experiment 20000492 PARAMETER Experiment Name: Zm_Hybrid_Seed_Dev_P Parameter: DAP Value: 12
  misc_feature: MA Experiment 20000492 PARAMETER Experiment Name: Zm_Hybrid_Seed_Dev_P Parameter: Organism Value: Zea mays
  misc_feature: MA Experiment 20000492 PARAMETER Experiment Name: Zm_Hybrid_Seed_Dev_P Parameter: Plant Line Value: 35A19
  misc_feature: MA Experiment 20000492 PARAMETER Experiment Name: Zm_Hybrid_Seed_Dev_P Parameter: Tissue Value: Fert Kernel vs. Unfert Floret
aagtttcaggcagagatggagcggatgggccgtgccggcacaccgcgcttcgcttggtccctcagcaacgtcccagacctgggccagcgccgcgctcaccgacacctccacctgcctcgactccctcgcccagcagtcccgcggtggcaaggacagcgacgacgccgtcagggtgaagaggagggtggtggccgtcgcgcaggccaccagcaacgcgctcgggctcgtcaacaggctccagccggcgccgcaccggcggcgtctcctgtgactcttgtagcagcagctagccacggaaatctttgatggttcctcgttctcatccatgtcgacatcatccgtcccctgcatctccttctccaattgccatgtatgcgtgtatgtatgggtatggtatgcgtgtatgtatggactacggatcgatcagctttctcgattgcgtggttgtcgttgtctatctgtagtaactctgcagctgggatcactcaattcccgctagtggttgttcaggattatgctcaagtttatgcgtagtaaatagcaaaatctttg

SEQ ID NO: 10367 - protein, 101 aa, Zea mays subsp. mays
  peptide (1)..(101): Ceres Seq. ID no. 12361770
  misc_feature (4)..(24): Homolog of NCBI NO: 32489696 NR Description: OSJNBb0004G23.9 [Oryza sativa (japonica
KFQAEMERMGRAGTPRFAWSLSNVPDLGQRRAHRHLHLPRLPRPAVPRWQGQRRRRQGEEEGGGRRAGHQQRARARQQAPAGAAPAASPVTLVAAASHGNL

SEQ ID NO: 10368 - protein, 96 aa, Zea mays subsp. mays
  peptide (1)..(96): Ceres Seq. ID no. 12361771
  misc_feature (1)..(19): Homolog of NCBI NO: 32489696 NR Description: OSJNBb0004G23.9 [Oryza sativa (japonica
MERMGRAGTPRFAWSLSNVPDLGQRRAHRHLHLPRLPRPAVPRWQGQRRRRQGEEEGGGRRAGHQQRARARQQAPAGAAPAASPVTLVAAASHGNL

SEQ ID NO: 10369 - protein, 93 aa, Zea mays subsp. mays
  peptide (1)..(93): Ceres Seq. ID no. 12361772
  misc_feature (1)..(16): Homolog of NCBI NO: 32489696 NR Description: OSJNBb0004G23.9 [Oryza sativa (japonica
MGRAGTPRFAWSLSNVPDLGQRRAHRHLHLPRLPRPAVPRWQGQRRRRQGEEEGGGRRAGHQQRARARQQAPAGAAPAASPVTLVAAASHGNL

SEQ ID NO: 10370 - protein, 89 aa, Zea mays subsp. mays
  peptide (1)..(89): Ceres Seq. ID no. 12361773
  misc_feature (25)..(84): Homolog of NCBI NO: 32489696 NR Description: OSJNBb0004G23.9 [Oryza sativa (japonica
  misc_feature (25)..(78): Homolog of NCBI NO: 18407657 NR Description: expressed protein; protein id: At1g62770.1, by cDNA: 93927. [Arabidopsis thaliana]
  misc_feature (25)..(78): Homolog of NCBI NO: 21618013 NR Description: putative ripening-related protein [Arabidopsis
  misc_feature (25)..(85): Homolog of NCBI NO: 112717 NR Description: 21 KD PROTEIN PRECURSOR (1.2 PROTEIN)
  misc_feature (25)..(85): Homolog of NCBI NO: 15234547 NR Description: putative protein; protein id: At4g12390.1, by cDNA: 27615., supported by cDNA: gi_15450853, supported by
SFRQRWSGWAVPAHRASLGPSATSQTWASAALTDTSTCLDSLAQQSRGGKDSDDAVRVKRRVVAVAQATSNALGLVNRLQPAPHRRRLL

SEQ ID NO: 10371 - DNA, 726 bp, Zea mays subsp. mays
  misc_feature (1)..(726): Ceres Seq. ID no. 12343292
  misc_feature: MA Experiment ID: 108543 Result: Up-regulated in Transcription
  misc_feature: MA Experiment ID: 20000492 Result: Down-regulated in Transcription
  misc_feature: MA Experiment 20000492 PARAMETER Experiment Name: Zm_Hybrid_Seed_Dev_P Parameter: DAP Value: 12
  misc_feature: MA Experiment 20000492 PARAMETER Experiment Name: Zm_Hybrid_Seed_Dev_P Parameter: Organism Value: Zea mays
  misc_feature: MA Experiment 20000492 PARAMETER Experiment Name: Zm_Hybrid_Seed_Dev_P Parameter: Plant Line Value: 35A19
  misc_feature: MA Experiment 20000492 PARAMETER Experiment Name: Zm_Hybrid_Seed_Dev_P Parameter: Tissue Value: Fert Kernel vs. Unfert Floret
acactttcaaggatttgctaaccaaacatgaagatgccgtctctgaatttctgagctcacattatgagcagttttttggactctacacaaaacttttatcttcaactaattatgtgacacgaagacaatcagtgaagtttctttcagagtttctgttggaggccccaaatgctcaaataatgaagcgttacattttggaagttcattacttaaacattatgatgggcctgctaaaggattcaagcaaaaatatcaggatatgtgccttccacatttttaaggtatttgttgccaatccaaacaagcctcgtgagattattcaggttttggttgagaatcacagagaagtgttgaagctactccacaatctccccacaagcaaaggtgaagatgaacagcttgatgaggagagagatttaattatcaaagaaatcgagaagcttgtgcggttgtcagtataaaccctcaggaaattcgaacgtatccttgaatacatactgtgcaatatgctgccttgtatagagcttgtttttcatgtatggaaaaaaaagtttggccacaaattgcatttttcgcgagaacacttagcatttctgtcagaaaattattgtcgtgtagcagaatttgcaacaggaataatctgcattatggtgtggtgttgataccattaaggattggtgaaagtgcctgccatttgaaatgggtacgcttgtcatgtttgtttcg

SEQ ID NO: 10372 - protein, 152 aa, Zea mays subsp. mays
  peptide (1)..(152): Ceres Seq. ID no. 12343293
  misc_feature (1)..(148): Pfam Name: Mo25 protein family Pfam Description: Mo25 protein family
  misc_feature (1)..(152): Homolog of NCBI NO: 33146499 NR Description: unknown protein [Oryza sativa (japonica
  misc_feature (1)..(152): Homolog of NCBI NO: 34898912 NR Description: hypothetical protein, similar to Arabidopsis
  misc_feature (1)..(147): Homolog of NCBI NO: 18419772 NR Description: putative protein; protein id: At5g18940.1, by cDNA: 6139. [Arabidopsis thaliana] >gi|21593944|gb|AAM65898.1|
  misc_feature (1)..(147): Homolog of NCBI NO: 1794137 NR Description: DMO25 [Drosophila melanogaster]
  misc_feature (1)..(147): Homolog of NCBI NO: 17647657 NR Description: Mo25 CG4083-PA >gi|15214070|sp|P91891|MO25_DROME
  misc_feature (1)..(149): Homolog of NCBI NO: 31982582 NR Description: MO25 protein; calcium binding protein, 39 kDa musculus] >gi|547911|sp|Q06138|MO25_MOUSE MO25 protein
  misc_feature (1)..(149): Homolog of NCBI NO: 7706481 NR Description: MO25 protein [Homo sapiens]
  misc_feature (1)..(149): Homolog of NCBI NO: 22137752 NR Description: Similar to calcium binding protein, 39 kDa [Mus
  misc_feature (1)..(149): Homolog of NCBI NO: 18044843 NR Description: MO25 protein [Mus musculus]
  misc_feature (1)..(149): Homolog of NCBI NO: 34877516 NR Description: similar to MO25 protein [Rattus norvegicus]
TFKDLLTKHEDAVSEFLSSHYEQFFGLYTKLLSSTNYVTRRQSVKFLSEFLLEAPNAQIMKRYILEVHYLNIMMGLLKDSSKNIRICAFHIFKVFVANPNKPREIIQVLVENHREVLKLLHNLPTSKGEDEQLDEERDLIIKEIEKLVRLSV

SEQ ID NO: 10373 - protein, 93 aa, Zea mays subsp. mays
  peptide (1)..(93): Ceres Seq. ID no. 12343294
  misc_feature (1)..(89): Pfam Name: Mo25 protein family Pfam Description: Mo25 protein family
  misc_feature (1)..(93): Homolog of NCBI NO: 33146499 NR Description: unknown protein [Oryza sativa (japonica
  misc_feature (1)..(93): Homolog of NCBI NO: 34898912 NR Description: hypothetical protein, similar to Arabidopsis
  misc_feature (1)..(88): Homolog of NCBI NO: 18419772 NR Description: putative protein; protein id: At5g18940.1, by cDNA: 6139. [Arabidopsis thaliana] >gi|21593944|gb|AAM65898.1|
  misc_feature (1)..(88): Homolog of NCBI NO: 1794137 NR Description: DMO25 [Drosophila melanogaster]
  misc_feature (1)..(88): Homolog of NCBI NO: 17647657 NR Description: Mo25 CG4083-PA >gi|15214070|sp|P91891|MO25_DROME
  misc_feature (1)..(90): Homolog of NCBI NO: 31982582 NR Description: MO25 protein; calcium binding protein, 39 kDa musculus] >gi|547911|sp|Q06138|MO25_MOUSE MO25 protein
  misc_feature (1)..(90): Homolog of NCBI NO: 7706481 NR Description: MO25 protein [Homo sapiens]
  misc_feature (1)..(90): Homolog of NCBI NO: 22137752 NR Description: Similar to calcium binding protein, 39 kDa [Mus
  misc_feature (1)..(90): Homolog of NCBI NO: 18044843 NR Description: MO25 protein [Mus musculus]
  misc_feature (1)..(90): Homolog of NCBI NO: 34877516 NR Description: similar to MO25 protein [Rattus norvegicus]
MKRYILEVHYLNIMMGLLKDSSKNIRICAFHIFKVFVANPNKPREIIQVLVENHREVLKLLHNLPTSKGEDEQLDEERDLIIKEIEKLVRLSV

SEQ ID NO: 10374 - protein, 80 aa, Zea mays subsp. mays
  peptide (1)..(80): Ceres Seq. ID no. 12343295
  misc_feature (1)..(76): Pfam Name: Mo25 protein family Pfam Description: Mo25 protein family
  misc_feature (1)..(80): Homolog of NCBI NO: 33146499 NR Description: unknown protein [Oryza sativa (japonica
  misc_feature (1)..(80): Homolog of NCBI NO: 34898912 NR Description: hypothetical protein, similar to Arabidopsis
  misc_feature (1)..(75): Homolog of NCBI NO: 18419772 NR Description: putative protein; protein id: At5g18940.1, by cDNA: 6139. [Arabidopsis thaliana] >gi|21593944|gb|AAM65898.1|
  misc_feature (1)..(75): Homolog of NCBI NO: 1794137 NR Description: DMO25 [Drosophila melanogaster]
  misc_feature (1)..(75): Homolog of NCBI NO: 17647657 NR Description: Mo25 CG4083-PA >gi|15214070|sp|P91891|MO25_DROME
  misc_feature (1)..(77): Homolog of NCBI NO: 31982582 NR Description: MO25 protein; calcium binding protein, 39 kDa musculus] >gi|547911|sp|Q06138|MO25_MOUSE MO25 protein
  misc_feature (1)..(77): Homolog of NCBI NO: 7706481 NR Description: MO25 protein [Homo sapiens]
  misc_feature (1)..(77): Homolog of NCBI NO: 22137752 NR Description: Similar to calcium binding protein, 39 kDa [Mus
  misc_feature (1)..(77): Homolog of NCBI NO: 18044843 NR Description: MO25 protein [Mus musculus]
  misc_feature (1)..(77): Homolog of NCBI NO: 34877516 NR Description: similar to MO25 protein [Rattus norvegicus]
MMGLLKDSSKNIRICAFHIFKVFVANPNKPREIIQVLVENHREVLKLLHNLPTSKGEDEQLDEERDLIIKEIEKLVRLSV

SEQ ID NO: 10375 - DNA, 726 bp, Zea mays subsp. mays
  misc_feature (1)..(726): Ceres Seq. ID no. 12400560
  misc_feature: MA Experiment ID: 108535 Result: Up-regulated in Transcription
  misc_feature: MA Experiment 108535 PARAMETER Experiment Name: Zm_Meristem_P Parameter: Age (day) Value: 8
  misc_feature: MA Experiment 108535 PARAMETER Experiment Name: Zm_Meristem_P Parameter: Organism Value: Zea mays
  misc_feature: MA Experiment 108535 PARAMETER Experiment Name: Zm_Meristem_P Parameter: Plant Line Value: 35A19
  misc_feature: MA Experiment 108535 PARAMETER Experiment Name: Zm_Meristem_P Parameter: Tissue Value: Root Meristem vs. Above Root Meristem
  misc_feature: MA Experiment ID: 20000488 Result: Up-regulated in Transcription
  misc_feature: MA Experiment 20000488 PARAMETER Experiment Name: Zm_50mM_NH4NO3_L_to_H_P Parameter: Organism Value: Zea mays
  misc_feature: MA Experiment 20000488 PARAMETER Experiment Name: Zm_50mM_NH4NO3_L_to_H_P Parameter: Timepoint (hr) Value: 8
  misc_feature: MA Experiment 20000488 PARAMETER Experiment Name: Zm_50mM_NH4NO3_L_to_H_P Parameter: Tissue Value: Leaves
  misc_feature: MA Experiment 20000488 PARAMETER Experiment Name: Zm_50mM_NH4NO3_L_to_H_P Parameter: Treatment Value: 50mM NH4NO3 vs. 100mM Mannitol
  misc_feature: MA Experiment ID: 20000534 Result: Down-regulated in Transcription
  misc_feature: MA Experiment 20000534 PARAMETER Experiment Name: Zm_Hybrid_Pollen_P Parameter: Age (day) Value: 8
  misc_feature: MA Experiment 20000534 PARAMETER Experiment Name: Zm_Hybrid_Pollen_P Parameter: Organism Value: Zea mays
  misc_feature: MA Experiment 20000534 PARAMETER Experiment Name: Zm_Hybrid_Pollen_P Parameter: Plant Line Value: 35A19
  misc_feature: MA Experiment 20000534 PARAMETER Experiment Name: Zm_Hybrid_Pollen_P Parameter: Tissue Value: Pollen vs. Aerial
ctcggccctctcctcggcgacgccactactcctgcctcacgccgccagctcaaaccgcagaagagagaagagaagcacgcccaaaaattccgaggttttcacctcttggagcgcaccaacaccacccggagaccggagcgactcgccaccggcgcggaaaaggagggcggaggctcgatggcggatgagaatcaggctggaaagaaagaggaggaggaatttagcacaggccctctgtcagtcctaatgatgagtgttaagaacaacacccaggtcctcatcaattgccgcaacaacaagaagctgcttggccgtgttcgtgcttttgatcgccactgtaacatggtgctcgagaacgtgcgtgagatgtggacagagatccccaagactggcaagggcaaaaagaangctctgcctgtgaacaaggatagattcatcagtaagatgttcctcangggcgactcggtcatcatagtgctgaggaacccgaagtgatcgcccaaccagtcaccttgcagcagttatgccccttctctgggttcacggaatccgtgcctctgttgaaaaaaactgtagcttatgtatgtcttggcggattagctggttatcttgaactgacgttcatgtgacatggcaatggcacatgaacatacgtttcatgagtttggttgttaattggcgcttgcagtactttgatccctgaatgttgagattgcacttctgctt

SEQ ID NO: 10376 - protein, 164 aa, Zea mays subsp. mays
  peptide (1)..(164): Ceres Seq. ID no. 12400561
  misc_feature (82)..(161): Pfam Name: LSM domain Pfam Description: LSM domain
  misc_feature (62)..(164): Homolog of NCBI NO: 18407411 NR Description: putative small nuclear ribonucleoprotein D2;
  misc_feature (62)..(164): Homolog of NCBI NO: 21554692 NR Description: small nuclear ribonucleoprotein-like protein
  misc_feature (62)..(164): Homolog of NCBI NO: 30690747 NR Description: small nuclear ribonucleo protein D2 -related
  misc_feature (68)..(163): Homolog of NCBI NO: 4759158 NR Description: small nuclear ribonucleoprotein polypeptide D2; core protein D2 [Homo sapiens] >gi|20821553|ref|XP_133225.1| nuclear ribonucleoprotein D2 [Mus musculus]
  misc_feature (65)..(163): Homolog of NCBI NO: 21357623 NR Description: CG1249-PA [Drosophila melanogaster]
  misc_feature (68)..(163): Homolog of NCBI NO: 26337731 NR Description: unnamed protein product [Mus musculus]
  misc_feature (68)..(163): Homolog of NCBI NO: 22203734 NR Description: small nuclear ribonucleoprotein D2-like protein
  misc_feature (68)..(163): Homolog of NCBI NO: 27677236 NR Description: similar to Small nuclear ribonucleoprotein Sm D2
  misc_feature (52)..(163): Homolog of NCBI NO: 39592141 NR Description: Hypothetical protein CBG23345 [Caenorhabditis
  misc_feature (52)..(163): Homolog of NCBI NO: 17558868 NR Description: Small nuclear ribonucleoprotein (13.3 kD)
  misc_feature (136)..(136): Xaa is any aa, unknown or other
  misc_feature (152)..(152): Xaa is any aa, unknown or other
LGPLLGDATTPASRRQLKPQKREEKHAQKFRGFHLLERTNTTRRPERLATGAEKEGGGSMADENQAGKKEEEEFSTGPLSVLMMSVKNNTQVLINCRNNKKLLGRVRAFDRHCNMVLENVREMWTEIPKTGKGKKXALPVNKDRFISKMFLXGDSVIIVLRNPK

SEQ ID NO: 10377 - protein, 105 aa, Zea mays subsp. mays
  peptide (1)..(105): Ceres Seq. ID no. 12400562
  misc_feature (23)..(102): Pfam Name: LSM domain Pfam Description: LSM domain
  misc_feature (3)..(105): Homolog of NCBI NO: 18407411 NR Description: putative small nuclear ribonucleoprotein D2;
  misc_feature (3)..(105): Homolog of NCBI NO: 21554692 NR Description: small nuclear ribonucleoprotein-like protein
  misc_feature (3)..(105): Homolog of NCBI NO: 30690747 NR Description: small nuclear ribonucleo protein D2 -related
  misc_feature (9)..(104): Homolog of NCBI NO: 4759158 NR Description: small nuclear ribonucleoprotein polypeptide D2; core protein D2 [Homo sapiens] >gi|20821553|ref|XP_133225.1| nuclear ribonucleoprotein D2 [Mus musculus]
  misc_feature (6)..(104): Homolog of NCBI NO: 21357623 NR Description: CG1249-PA [Drosophila melanogaster]
  misc_feature (9)..(104): Homolog of NCBI NO: 26337731 NR Description: unnamed protein product [Mus musculus]
  misc_feature (9)..(104): Homolog of NCBI NO: 22203734 NR Description: small nuclear ribonucleoprotein D2-like protein
  misc_feature (9)..(104): Homolog of NCBI NO: 27677236 NR Description: similar to Small nuclear ribonucleoprotein Sm D2
  misc_feature (1)..(104): Homolog of NCBI NO: 39592141 NR Description: Hypothetical protein CBG23345 [Caenorhabditis
  misc_feature (1)..(104): Homolog of NCBI NO: 17558868 NR Description: Small nuclear ribonucleoprotein (13.3 kD)
  misc_feature (77)..(77): Xaa is any aa, unknown or other
  misc_feature (93)..(93): Xaa is any aa, unknown or other
MADENQAGKKEEEEFSTGPLSVLMMSVKNNTQVLINCRNNKKLLGRVRAFDRHCNMVLENVREMWTEIPKTGKGKKXALPVNKDRFISKMFLXGDSVIIVLRNPK

SEQ ID NO: 10378 - protein, 82 aa, Zea mays subsp. mays
  peptide (1)..(82): Ceres Seq. ID no. 12400563
  misc_feature (1)..(79): Pfam Name: LSM domain Pfam Description: LSM domain
  misc_feature (1)..(82): Homolog of NCBI NO: 18407411 NR Description: putative small nuclear ribonucleoprotein D2;
  misc_feature (1)..(82): Homolog of NCBI NO: 21554692 NR Description: small nuclear ribonucleoprotein-like protein
  misc_feature (1)..(82): Homolog of NCBI NO: 30690747 NR Description: small nuclear ribonucleo protein D2 -related
  misc_feature (1)..(81): Homolog of NCBI NO: 4759158 NR Description: small nuclear ribonucleoprotein polypeptide D2; core protein D2 [Homo sapiens] >gi|20821553|ref|XP_133225.1| nuclear ribonucleoprotein D2 [Mus musculus]
  misc_feature (1)..(81): Homolog of NCBI NO: 21357623 NR Description: CG1249-PA [Drosophila melanogaster]
  misc_feature (1)..(81): Homolog of NCBI NO: 26337731 NR Description: unnamed protein product [Mus musculus]
  misc_feature (1)..(81): Homolog of NCBI NO: 22203734 NR Description: small nuclear ribonucleoprotein D2-like protein
  misc_feature (1)..(81): Homolog of NCBI NO: 27677236 NR Description: similar to Small nuclear ribonucleoprotein Sm D2
  misc_feature (1)..(81): Homolog of NCBI NO: 39592141 NR Description: Hypothetical protein CBG23345 [Caenorhabditis
  misc_feature (1)..(81): Homolog of NCBI NO: 17558868 NR Description: Small nuclear ribonucleoprotein (13.3 kD)
  misc_feature (54)..(54): Xaa is any aa, unknown or other
  misc_feature (70)..(70): Xaa is any aa, unknown or other
MMSVKNNTQVLINCRNNKKLLGRVRAFDRHCNMVLENVREMWTEIPKTGKGKKXALPVNKDRFISKMFLXGDSVIIVLRNPK

SEQ ID NO: 10379 - DNA, 1336 bp, Zea mays subsp. mays
  misc_feature (1)..(1336): Ceres Seq. ID no. 12400914
  misc_feature: MA Experiment ID: 108535 Result: Up-regulated in Transcription
  misc_feature: MA Experiment 108535 PARAMETER Experiment Name: Zm_Meristem_P Parameter: Age (day) Value: 8
  misc_feature: MA Experiment 108535 PARAMETER Experiment Name: Zm_Meristem_P Parameter: Organism Value: Zea mays
  misc_feature: MA Experiment 108535 PARAMETER Experiment Name: Zm_Meristem_P Parameter: Plant Line Value: 35A19
  misc_feature: MA Experiment 108535 PARAMETER Experiment Name: Zm_Meristem_P Parameter: Tissue Value: Root Meristem vs. Above Root Meristem
  misc_feature: MA Experiment ID: 108543 Result: Up-regulated in Transcription
  misc_feature: MA Experiment ID: 108556 Result: Down-regulated in Transcription
  misc_feature: MA Experiment 108556 PARAMETER Experiment Name: Zm_Drought_P Parameter: Age (day) Value: 9
  misc_feature: MA Experiment 108556 PARAMETER Experiment Name: Zm_Drought_P Parameter: Organism Value: Zea mays
  misc_feature: MA Experiment 108556 PARAMETER Experiment Name: Zm_Drought_P Parameter: Plant Line Value: 35A19
  misc_feature: MA Experiment 108556 PARAMETER Experiment Name: Zm_Drought_P Parameter: Timepoint (hr) Value: 24
  misc_feature: MA Experiment 108556 PARAMETER Experiment Name: Zm_Drought_P Parameter: Tissue Value: Aerial
  misc_feature: MA Experiment 108556 PARAMETER Experiment Name: Zm_Drought_P Parameter: Treatment Value: Drought vs. No Drought
  misc_feature: MA Experiment ID: 20000479 Result: Down-regulated in Transcription
  misc_feature: MA Experiment 20000479 PARAMETER Experiment Name: Zm_Drought_P Parameter: Age (day) Value: 10
  misc_feature: MA Experiment 20000479 PARAMETER Experiment Name: Zm_Drought_P Parameter: Organism Value: Zea mays
  misc_feature: MA Experiment 20000479 PARAMETER Experiment Name: Zm_Drought_P Parameter: Plant Line Value: 35A19
  misc_feature: MA Experiment 20000479 PARAMETER Experiment Name: Zm_Drought_P Parameter: Timepoint (hr) Value: 48
  misc_feature: MA Experiment 20000479 PARAMETER Experiment Name: Zm_Drought_P Parameter: Tissue Value: Aerial
  misc_feature: MA Experiment 20000479 PARAMETER Experiment Name: Zm_Drought_P Parameter: Treatment Value: Drought vs. No Drought
atatcctataacaatttccccaacccacatggccaacgccgacgctggcgacggcgacgaggtcatcctcgacgctcccggcttcatacgagtgtacaggagcggccgcgtcgagcgctttctgccggtcgacttcgccccgccctccactgacgccgccaccggcgtttcttcaaaggacgtcgccatcctcccagacgcctgcctattggttcgcatttacctcccagcgcccccctcttccggaagttacagcggcaagctccccgtcctggtgttcttccacggcggcgggttctgcctcggttcggcgtttgatgcggcggtgcactcccacgccaaccggttagccgcggctgccggcgcaatcatcgtgtcggtggaataccgcctcgcgccagagcatccggtccccgctctctaccgggacgcgtggacggcgctccagtgggtggccgcgcactccgtgggccgggggcaggaaccctggctgactgcccacgcggacctcgggcgcgtccacgtcggtggagagagcgcgggcgcgaacattgcccaccacgccgcgatgcgcgctggcagagaggagctgggccacggcgtgaagctcagctcgctcgtgatgatccatccctacttcctgggaggcgagagctccgagacagacgacatgggcgtagcgttgctccgcgagctcgtccggctgtggccggtggtatgcccgggcacgagcgggtgcgatgacgacccgttgatcaatccgatggcagagggtgcccccaatctcgctagcttggggtgccgacgcgtagtggtgtgcgtcgggggaaaggacccgatgagaggcagaggaaggctgtattgtgagaagctgaagagaagtgggtggcgcggggaggtggatgactgggaggcggacggccagggacacggtttccatctctcgtgccccatgagcgcagaggcggaggcgcaagtccgggtcatcgctgagtttctgacctacggatgacatatctgttttcccactccttcacgcggccatggtgcattgttctcgaatctgatatacattttttgtttcgagttttggttgaggacttgcatgtttatattttatatttttatctactatttcataagcttaataaatgtttggctatgggttccagattctcaattttcatcagaagaaggggttactgagctgtattagacttacctttgggttaatatctattggtgcaagacccagattggctatacctttgtaatcgtatttgctttgcctggctaaagtttatgacaaaattgtcgcattgctgacattctctct

SEQ ID NO: 10380 - protein, 336 aa, Zea mays subsp. mays
  peptide (1)..(336): Ceres Seq. ID no. 12400915
  misc_feature (74)..(133): Pfam Name: Carboxylesterase Pfam Description: Carboxylesterase
  misc_feature (12)..(334): Homolog of NCBI NO: 38344841 NR Description: OSJNBa0064H22.22 [Oryza sativa (japonica
  misc_feature (20)..(332): Homolog of NCBI NO: 15228425 NR Description: putative protein; protein id: At3g48690.1, by cDNA: gi_18086340 [Arabidopsis thaliana]
  misc_feature (20)..(333): Homolog of NCBI NO: 15221975 NR Description: hypothetical protein; protein id: At1g19190.1
  misc_feature (20)..(332): Homolog of NCBI NO: 18086341 NR Description: AT3g48690/T8P19_200 [Arabidopsis thaliana]
  misc_feature (10)..(336): Homolog of NCBI NO: 34393975 NR Description: putative PrMC3 [Oryza sativa (japonica
  misc_feature (20)..(333): Homolog of NCBI NO: 15228426 NR Description: putative protein; protein id: At3g48700.1
  misc_feature (19)..(336): Homolog of NCBI NO: 34393904 NR Description: putative cell death associated protein [Oryza
  misc_feature (6)..(334): Homolog of NCBI NO: 21537287 NR Description: putative esterase [Arabidopsis thaliana]
  misc_feature (6)..(334): Homolog of NCBI NO: 18402731 NR Description: expressed protein; protein id: At1g49650.1, by cDNA: 12638. [Arabidopsis thaliana]
  misc_feature (19)..(333): Homolog of NCBI NO: 15227669 NR Description: putative esterase; protein id: At2g03550.1
YPITISPTHMANADAGDGDEVILDAPGFIRVYRSGRVERFLPVDFAPPSTDAATGVSSKDVAILPDACLLVRIYLPAPPSSGSYSGKLPVLVFFHGGGFCLGSAFDAAVHSHANRLAAAAGAIIVSVEYRLAPEHPVPALYRDAWTALQWVAAHSVGRGQEPWLTAHADLGRVHVGGESAGANIAHHAAMRAGREELGHGVKLSSLVMIHPYFLGGESSETDDMGVALLRELVRLWPVVCPGTSGCDDDPLINPMAEGAPNLASLGCRRVVVCVGGKDPMRGRGRLYCEKLKRSGWRGEVDDWEADGQGHGFHLSCPMSAEAEAQVRVIAEFLTYG

SEQ ID NO: 10381 - protein, 327 aa, Zea mays subsp. mays
  peptide (1)..(327): Ceres Seq. ID no. 12400916
  misc_feature (65)..(124): Pfam Name: Carboxylesterase Pfam Description: Carboxylesterase
  misc_feature (3)..(325): Homolog of NCBI NO: 38344841 NR Description: OSJNBa0064H22.22 [Oryza sativa (japonica
  misc_feature (11)..(323): Homolog of NCBI NO: 15228425 NR Description: putative protein; protein id: At3g48690.1, by cDNA: gi_18086340 [Arabidopsis thaliana]
  misc_feature (11)..(324): Homolog of NCBI NO: 15221975 NR Description: hypothetical protein; protein id: At1g19190.1
  misc_feature (11)..(323): Homolog of NCBI NO: 18086341 NR Description: AT3g48690/T8P19_200 [Arabidopsis thaliana]
  misc_feature (1)..(327): Homolog of NCBI NO: 34393975 NR Description: putative PrMC3 [Oryza sativa (japonica
  misc_feature (11)..(324): Homolog of NCBI NO: 15228426 NR Description: putative protein; protein id: At3g48700.1
  misc_feature (10)..(327): Homolog of NCBI NO: 34393904 NR Description: putative cell death associated protein [Oryza
  misc_feature (1)..(325): Homolog of NCBI NO: 21537287 NR Description: putative esterase [Arabidopsis thaliana]
  misc_feature (1)..(325): Homolog of NCBI NO: 18402731 NR Description: expressed protein; protein id: At1g49650.1, by cDNA: 12638. [Arabidopsis thaliana]
  misc_feature (10)..(324): Homolog of NCBI NO: 15227669 NR Description: putative esterase; protein id: At2g03550.1
MANADAGDGDEVILDAPGFIRVYRSGRVERFLPVDFAPPSTDAATGVSSKDVAILPDACLLVRIYLPAPPSSGSYSGKLPVLVFFHGGGFCLGSAFDAAVHSHANRLAAAAGAIIVSVEYRLAPEHPVPALYRDAWTALQWVAAHSVGRGQEPWLTAHADLGRVHVGGESAGANIAHHAAMRAGREELGHGVKLSSLVMIHPYFLGGESSETDDMGVALLRELVRLWPVVCPGTSGCDDDPLINPMAEGAPNLASLGCRRVVVCVGGKDPMRGRGRLYCEKLKRSGWRGEVDDWEADGQGHGFHLSCPMSAEAEAQVRVIAEFLTYG

SEQ ID NO: 10382 - DNA, 1316 bp, Zea mays subsp. mays
  misc_feature (1)..(1316): Ceres Seq. ID no. 12400906
  misc_feature: MA Experiment ID: 108504 Result: Down-regulated in Transcription
  misc_feature: MA Experiment 108504 PARAMETER Experiment Name: Zm_Drought_P Parameter: Age (day) Value: 8
  misc_feature: MA Experiment 108504 PARAMETER Experiment Name: Zm_Drought_P Parameter: Organism Value: Zea mays
  misc_feature: MA Experiment 108504 PARAMETER Experiment Name: Zm_Drought_P Parameter: Plant Line Value: 35A19
  misc_feature: MA Experiment 108504 PARAMETER Experiment Name: Zm_Drought_P Parameter: Timepoint (hr) Value: 12
  misc_feature: MA Experiment 108504 PARAMETER Experiment Name: Zm_Drought_P Parameter: Tissue Value: Aerial
  misc_feature: MA Experiment 108504 PARAMETER Experiment Name: Zm_Drought_P Parameter: Treatment Value: Drought vs. No Drought
  misc_feature: MA Experiment ID: 108523 Result: Down-regulated in Transcription
  misc_feature: MA Experiment 108523 PARAMETER Experiment Name: Zm_42deg_Heat_P Parameter: Age (day) Value: 8
  misc_feature: MA Experiment 108523 PARAMETER Experiment Name: Zm_42deg_Heat_P Parameter: Organism Value: Zea mays
  misc_feature: MA Experiment 108523 PARAMETER Experiment Name: Zm_42deg_Heat_P Parameter: Plant Line Value: 35A19
  misc_feature: MA Experiment 108523 PARAMETER Experiment Name: Zm_42deg_Heat_P Parameter: Temperature (deg C) Value: 42 vs. 22
  misc_feature: MA Experiment 108523 PARAMETER Experiment Name: Zm_42deg_Heat_P Parameter: Timepoint (hr) Value: 6
  misc_feature: MA Experiment 108523 PARAMETER Experiment Name: Zm_42deg_Heat_P Parameter: Tissue Value: Aerial
  misc_feature: MA Experiment ID: 108528 Result: Up-regulated in Transcription
  misc_feature: MA Experiment 108528 PARAMETER Experiment Name: Zm_Imbibed_Seeds_P Parameter: Age (day) Value: 5 vs. 2
  misc_feature: MA Experiment 108528 PARAMETER Experiment Name: Zm_Imbibed_Seeds_P Parameter: Organism Value: Zea mays
  misc_feature: MA Experiment 108528 PARAMETER Experiment Name: Zm_Imbibed_Seeds_P Parameter: Plant Line Value: 35A19
  misc_feature: MA Experiment 108528 PARAMETER Experiment Name: Zm_Imbibed_Seeds_P Parameter: Tissue Value: Aerial vs. Embryo
  misc_feature: MA Experiment ID: 108529 Result: Down-regulated in Transcription
  misc_feature: MA Experiment 108529 PARAMETER Experiment Name: Zm_Imbibed_Seeds_P Parameter: Age (day) Value: 5 vs. 2
  misc_feature: MA Experiment 108529 PARAMETER Experiment Name: Zm_Imbibed_Seeds_P Parameter: Organism Value: Zea mays
  misc_feature: MA Experiment 108529 PARAMETER Experiment Name: Zm_Imbibed_Seeds_P Parameter: Plant Line Value: 35A19
  misc_feature: MA Experiment 108529 PARAMETER Experiment Name: Zm_Imbibed_Seeds_P Parameter: Tissue Value: Roots vs. Embryo
  misc_feature: MA Experiment ID: 108530 Result: Up-regulated in Transcription
  misc_feature: MA Experiment 108530 PARAMETER Experiment Name: Zm_Imbibed_Seeds_P Parameter: Age (day) Value: 6 vs. 2
  misc_feature: MA Experiment 108530 PARAMETER Experiment Name: Zm_Imbibed_Seeds_P Parameter: Organism Value: Zea mays
  misc_feature: MA Experiment 108530 PARAMETER Experiment Name: Zm_Imbibed_Seeds_P Parameter: Plant Line Value: 35A19
  misc_feature: MA Experiment 108530 PARAMETER Experiment Name: Zm_Imbibed_Seeds_P Parameter: Tissue Value: Aerial vs. Embryo
  misc_feature: MA Experiment ID: 108536 Result: Down-regulated in Transcription
  misc_feature: MA Experiment 108536 PARAMETER Experiment Name: Zm_Meristem_P Parameter: Age (day) Value: 8
  misc_feature: MA Experiment 108536 PARAMETER Experiment Name: Zm_Meristem_P Parameter: Organism Value: Zea mays
  misc_feature: MA Experiment 108536 PARAMETER Experiment Name: Zm_Meristem_P Parameter: Plant Line Value: 35A19
  misc_feature: MA Experiment 108536 PARAMETER Experiment Name: Zm_Meristem_P Parameter: Tissue Value: Shoot Meristem vs. Above Shoot Meristem
  misc_feature: MA Experiment ID: 108540 Result: Down-regulated in Transcription
  misc_feature: MA Experiment 108540 PARAMETER Experiment Name: Zm_20percent_PEG_P Parameter: Age (day) Value: 8
  misc_feature: MA Experiment 108540 PARAMETER Experiment Name: Zm_20percent_PEG_P Parameter: Organism Value: Zea mays
  misc_feature: MA Experiment 108540 PARAMETER Experiment Name: Zm_20percent_PEG_P Parameter: Plant Line Value: 35A19
  misc_feature: MA Experiment 108540 PARAMETER Experiment Name: Zm_20percent_PEG_P Parameter: Timepoint (hr) Value: 6
  misc_feature: MA Experiment 108540 PARAMETER Experiment Name: Zm_20percent_PEG_P Parameter: Tissue Value: Aerial
  misc_feature: MA Experiment 108540 PARAMETER Experiment Name: Zm_20percent_PEG_P Parameter: Treatment Value: 20percent PEG vs. No Treatment
  misc_feature: MA Experiment ID: 108544 Result: Down-regulated in Transcription
  misc_feature: MA Experiment ID: 108545 Result: Up-regulated in Transcription
  misc_feature: MA Experiment 108545 PARAMETER Experiment Name: Zm_Imbibed_Seeds_P Parameter: Age (day) Value: 3 vs. 2
  misc_feature: MA Experiment 108545 PARAMETER Experiment Name: Zm_Imbibed_Seeds_P Parameter: Organism Value: Zea mays
  misc_feature: MA Experiment 108545 PARAMETER Experiment Name: Zm_Imbibed_Seeds_P Parameter: Plant Line Value: 35A19
  misc_feature: MA Experiment 108545 PARAMETER Experiment Name: Zm_Imbibed_Seeds_P Parameter: Tissue Value: Aerial vs. Embryo
  misc_feature: MA Experiment ID: 108546 Result: Down-regulated in Transcription
  misc_feature: MA Experiment 108546 PARAMETER Experiment Name: Zm_Imbibed_Seeds_P Parameter: Age (day) Value: 3 vs. 2
  misc_feature: MA Experiment 108546 PARAMETER Experiment Name: Zm_Imbibed_Seeds_P Parameter: Organism Value: Zea mays
  misc_feature: MA Experiment 108546 PARAMETER Experiment Name: Zm_Imbibed_Seeds_P Parameter: Plant Line Value: 35A19
  misc_feature: MA Experiment 108546 PARAMETER Experiment Name: Zm_Imbibed_Seeds_P Parameter: Tissue Value: Roots vs. Embryo
  misc_feature: MA Experiment ID: 108547 Result: Up-regulated in Transcription
  misc_feature: MA Experiment 108547 PARAMETER Experiment Name: Zm_Imbibed_Seeds_P Parameter: Age (day) Value: 4 vs. 2
  misc_feature: MA Experiment 108547 PARAMETER Experiment Name: Zm_Imbibed_Seeds_P Parameter: Organism Value: Zea mays
  misc_feature: MA Experiment 108547 PARAMETER Experiment Name: Zm_Imbibed_Seeds_P Parameter: Plant Line Value: 35A19
  misc_feature: MA Experiment 108547 PARAMETER Experiment Name: Zm_Imbibed_Seeds_P Parameter: Tissue Value: Aerial vs. Embryo
  misc_feature: MA Experiment ID: 108556 Result: Down-regulated in Transcription
  misc_feature: MA Experiment 108556 PARAMETER Experiment Name: Zm_Drought_P Parameter: Age (day) Value: 9
  misc_feature: MA Experiment 108556 PARAMETER Experiment Name: Zm_Drought_P Parameter: Organism Value: Zea mays
  misc_feature: MA Experiment 108556 PARAMETER Experiment Name: Zm_Drought_P Parameter: Plant Line Value: 35A19
  misc_feature: MA Experiment 108556 PARAMETER Experiment Name: Zm_Drought_P Parameter: Timepoint (hr) Value: 24
  misc_feature: MA Experiment 108556 PARAMETER Experiment Name: Zm_Drought_P Parameter: Tissue Value: Aerial
  misc_feature: MA Experiment 108556 PARAMETER Experiment Name: Zm_Drought_P Parameter: Treatment Value: Drought vs. No Drought
  misc_feature: MA Experiment ID: 108597 Result: Down-regulated in Transcription
  misc_feature: MA Experiment 108597 PARAMETER Experiment Name: Zm_100uM_ABA_P Parameter: Age (day) Value: 9
  misc_feature: MA Experiment 108597 PARAMETER Experiment Name: Zm_100uM_ABA_P Parameter: Organism Value: Zea mays
  misc_feature: MA Experiment 108597 PARAMETER Experiment Name: Zm_100uM_ABA_P Parameter: Plant Line Value: 35A19
  misc_feature: MA Experiment 108597 PARAMETER Experiment Name: Zm_100uM_ABA_P Parameter: Timepoint (hr) Value: 24
  misc_feature: MA Experiment 108597 PARAMETER Experiment Name: Zm_100uM_ABA_P Parameter: Tissue Value: Aerial
  misc_feature: MA Experiment 108597 PARAMETER Experiment Name: Zm_100uM_ABA_P Parameter: Treatment Value: 100uM ABA vs. No Treatment
  misc_feature: MA Experiment ID: 108687 Result: Down-regulated in Transcription
  misc_feature: MA Experiment 108687 PARAMETER Experiment Name: Zm_Embryos-Flowers__P Parameter: Tissue Value: Embryo vs. Aerial+
  misc_feature: MA Experiment ID: 108689 Result: Down-regulated in Transcription
  misc_feature: MA Experiment 108689 PARAMETER Experiment Name: Zm_Drought_Roots_P Parameter: Age (day) Value: 9
  misc_feature: MA Experiment 108689 PARAMETER Experiment Name: Zm_Drought_Roots_P Parameter: Organism Value: Zea mays
  misc_feature: MA Experiment 108689 PARAMETER Experiment Name: Zm_Drought_Roots_P Parameter: Plant Line Value: 35A19
  misc_feature: MA Experiment 108689 PARAMETER Experiment Name: Zm_Drought_Roots_P Parameter: Timepoint (hr) Value: 24
  misc_feature: MA Experiment 108689 PARAMETER Experiment Name: Zm_Drought_Roots_P Parameter: Tissue Value: Roots
  misc_feature: MA Experiment 108689 PARAMETER Experiment Name: Zm_Drought_Roots_P Parameter: Treatment Value: Drought vs. No Drought
  misc_feature: MA Experiment ID: 20000488 Result: Down-regulated in Transcription
  misc_feature: MA Experiment 20000488 PARAMETER Experiment Name: Zm_50mM_NH4NO3_L_to_H_P Parameter: Organism Value: Zea mays
  misc_feature: MA Experiment 20000488 PARAMETER Experiment Name: Zm_50mM_NH4NO3_L_to_H_P Parameter: Timepoint (hr) Value: 8
  misc_feature: MA Experiment 20000488 PARAMETER Experiment Name: Zm_50mM_NH4NO3_L_to_H_P Parameter: Tissue Value: Leaves
  misc_feature: MA Experiment 20000488 PARAMETER Experiment Name: Zm_50mM_NH4NO3_L_to_H_P Parameter: Treatment Value: 50mM NH4NO3 vs. 100mM Mannitol
  misc_feature: MA Experiment ID: 20000626 Result: Down-regulated in Transcription
  misc_feature: MA Experiment 20000626 PARAMETER Experiment Name: Zm_Herbicide-Treatments_P Parameter: Timepoint (hr) Value: 12
  misc_feature: MA Experiment 20000626 PARAMETER Experiment Name: Zm_Herbicide-Treatments_P Parameter: Tissue Value: Aerial
  misc_feature: MA Experiment 20000626 PARAMETER Experiment Name: Zm_Herbicide-Treatments_P Parameter: Treatment Value: Roundup vs. No Treatment
tctgctctgctcagccagctagccatatatacggcggcattcttcttctcttcttcttccccaataacatatcgagctgcaagctgctctgcttcttttctagcatgggcatgagggtcttgttggtggtcgtgctcatctcgttcgccccccttattaccactaatgtagcagcaggtgtcaacgccacgagatctgctggtaggcagcagaagcagaagcagaagccgctggcgcctgccctcatcgtgttcggcgactccatcgtggaccccggcaacaacaacgacatccacaccatcatcaaggccgacttcccgccctacggcacctacttccagaaccacagagccacgggaaggttctgcaacggcaggataccaaccgacttcatcgcctcccgcctcggcatcaaggagcttctgccgccctacctcacctccgagccgctcgacaagcacgacctcgtcaccggcgtcagcttcgcgtccggcggcacgggcttcgacccgctcacgccgcagctcgcctccgtgatctcgctcccggaccagctcaccatgttccacgactacctgggcaaggtgcgcgacgccgccggggacgccagggtgtcggatatcctgtcccggggcgtcttcgccatctgcgccggcagcgacgacgtggccaacacctacttcaccctgcgagcgcgcagcagctacgaccacgcctcctacgcgcgcctcctggtgcagcacgccaccgccttcgtcgaggacctcatccgcgccggcgcgcgccgcgtcgccttcatcggcatcccgcccatcggctgcgtcccgtcgcagcgcaccatgtccggcggtctcgaccggggctgctcgcagggccacaacgagatcgccgtcgcatacaacgccgggatggtgcagcagctggcggcgctgcgggccaagtaccccgacacgctgctcgtcttcatggacatctacggcttcctctacgacatgatgatgcacccgcgcagctacggcttcacgcagtccaccagaggatgctgcggcacgggcctcctcgaggtctccgtcctctgcaacggcgtcacctccgccgtctgccaagacgtcggcgactacctcttctgggacagctaccacccaacggagaaggcgtacaagatcctcgccgacttcgtcttcgacaactacgtcaagctcatcctcgtctagcttaccattattttcatttcatgagatggatttgatctgctggattatgcattaattgtttgctgctgtatttacatttgcttgtctgattaattgtttgct

SEQ ID NO: 10383 - protein, 403 aa, Zea mays subsp. mays
  peptide (1)..(403): Ceres Seq. ID no. 12400907
  misc_feature (81)..(393): Pfam Name: GDSL-like Lipase/Acylhydrolase Pfam Description: GDSL-like Lipase/Acylhydrolase
  misc_feature (72)..(401): Homolog of NCBI NO: 18406327 NR Description: proline-rich protein, putative; protein id:
  misc_feature (60)..(398): Homolog of NCBI NO: 28393626 NR Description: putative family II extracellular lipase 1 (EXL1) thaliana] >gi|28827430|gb|AAO50559.1| putative family II
  misc_feature (71)..(398): Homolog of NCBI NO: 26449364 NR Description: putative family II lipase EXL3 [Arabidopsis
  misc_feature (39)..(402): Homolog of NCBI NO: 30102970 NR Description: putative lipase/acylhydrolase [Oryza sativa
  misc_feature (71)..(396): Homolog of NCBI NO: 18394825 NR Description: anter-specific proline-rich protein APG putative; protein id: At1g20120.1, supported by cDNA: 22980.
  misc_feature (71)..(396): Homolog of NCBI NO: 21592372 NR Description: anter-specific proline-rich protein APG
  misc_feature (79)..(397): Homolog of NCBI NO: 37534726 NR Description: putative anter-specific proline-rich protein
  misc_feature (71)..(397): Homolog of NCBI NO: 25404994 NR Description: protein T4O12.13 [imported] - Arabidopsis >gi|8778808|gb|AAF79815.1|AC007396_8 T4O12.13 [Arabidopsis
  misc_feature (71)..(398): Homolog of NCBI NO: 15222901 NR Description: family II extracellular lipase 3 (EXL3); protein At1g75900.1, supported by cDNA: gi_15054385 [Arabidopsis >gi|15054386|gb|AAK30018.1| family II lipase EXL3 [Arabidopsis
  misc_feature (61)..(398): Homolog of NCBI NO: 8778807 NR Description: T4O12.12 [Arabidopsis thaliana]
CSAQPASHIYGGILLLFFFPNNISSCKLLCFFSSMGMRVLLVVVLISFAPLITTNVAAGVNATRSAGRQQKQKQKPLAPALIVFGDSIVDPGNNNDIHTIIKADFPPYGTYFQNHRATGRFCNGRIPTDFIASRLGIKELLPPYLTSEPLDKHDLVTGVSFASGGTGFDPLTPQLASVISLPDQLTMFHDYLGKVRDAAGDARVSDILSRGVFAICAGSDDVANTYFTLRARSSYDHASYARLLVQHATAFVEDLIRAGARRVAFIGIPPIGCVPSQRTMSGGLDRGCSQGHNEIAVAYNAGMVQQLAALRAKYPDTLLVFMDIYGFLYDMMMHPRSYGFTQSTRGCCGTGLLEVSVLCNGVTSAVCQDVGDYLFWDSYHPTEKAYKILADFVFDNYVKLILV

SEQ ID NO: 10384 - protein, 369 aa, Zea mays subsp. mays
  peptide (1)..(369): Ceres Seq. ID no. 12400908
  misc_feature (47)..(359): Pfam Name: GDSL-like Lipase/Acylhydrolase Pfam Description: GDSL-like Lipase/Acylhydrolase
  misc_feature (37)..(364): Homolog of NCBI NO: 15222901 NR Description: family II extracellular lipase 3 (EXL3); protein At1g75900.1, supported by cDNA: gi_15054385 [Arabidopsis >gi|15054386|gb|AAK30018.1| family II lipase EXL3 [Arabidopsis
  misc_feature (37)..(364): Homolog of NCBI NO: 26449364 NR Description: putative family II lipase EXL3 [Arabidopsis
  misc_feature (37)..(363): Homolog of NCBI NO: 25404994 NR Description: protein T4O12.13 [imported] - Arabidopsis >gi|8778808|gb|AAF79815.1|AC007396_8 T4O12.13 [Arabidopsis
  misc_feature (5)..(368): Homolog of NCBI NO: 30102970 NR Description: putative lipase/acylhydrolase [Oryza sativa
  misc_feature (45)..(363): Homolog of NCBI NO: 37534726 NR Description: putative anter-specific proline-rich protein
  misc_feature (37)..(362): Homolog of NCBI NO: 18394825 NR Description: anter-specific proline-rich protein APG putative; protein id: At1g20120.1, supported by cDNA: 22980.
  misc_feature (37)..(362): Homolog of NCBI NO: 21592372 NR Description: anter-specific proline-rich protein APG
  misc_feature (38)..(367): Homolog of NCBI NO: 18406327 NR Description: proline-rich protein, putative; protein id:
  misc_feature (26)..(364): Homolog of NCBI NO: 28393626 NR Description: putative family II extracellular lipase 1 (EXL1) thaliana] >gi|28827430|gb|AAO50559.1| putative family II
  misc_feature (27)..(364): Homolog of NCBI NO: 8778807 NR Description: T4O12.12 [Arabidopsis thaliana]
MGMRVLLVVVLISFAPLITTNVAAGVNATRSAGRQQKQKQKPLAPALIVFGDSIVDPGNNNDIHTIIKADFPPYGTYFQNHRATGRFCNGRIPTDFIASRLGIKELLPPYLTSEPLDKHDLVTGVSFASGGTGFDPLTPQLASVISLPDQLTMFHDYLGKVRDAAGDARVSDILSRGVFAICAGSDDVANTYFTLRARSSYDHASYARLLVQHATAFVEDLIRAGARRVAFIGIPPIGCVPSQRTMSGGLDRGCSQGHNEIAVAYNAGMVQQLAALRAKYPDTLLVFMDIYGFLYDMMMHPRSYGFTQSTRGCCGTGLLEVSVLCNGVTSAVCQDVGDYLFWDSYHPTEKAYKILADFVFDNYVKLILV

SEQ ID NO: 10385 - protein, 367 aa, Zea mays subsp. mays
  peptide (1)..(367): Ceres Seq. ID no. 12400909
  misc_feature (45)..(357): Pfam Name: GDSL-like Lipase/Acylhydrolase Pfam Description: GDSL-like Lipase/Acylhydrolase
  misc_feature (35)..(362): Homolog of NCBI NO: 15222901 NR Description: family II extracellular lipase 3 (EXL3); protein At1g75900.1, supported by cDNA: gi_15054385 [Arabidopsis >gi|15054386|gb|AAK30018.1| family II lipase EXL3 [Arabidopsis
  misc_feature (35)..(362): Homolog of NCBI NO: 26449364 NR Description: putative family II lipase EXL3 [Arabidopsis
  misc_feature (35)..(361): Homolog of NCBI NO: 25404994 NR Description: protein T4O12.13 [imported] - Arabidopsis >gi|8778808|gb|AAF79815.1|AC007396_8 T4O12.13 [Arabidopsis
  misc_feature (3)..(366): Homolog of NCBI NO: 30102970 NR Description: putative lipase/acylhydrolase [Oryza sativa
  misc_feature (43)..(361): Homolog of NCBI NO: 37534726 NR Description: putative anter-specific proline-rich protein
  misc_feature (35)..(360): Homolog of NCBI NO: 18394825 NR Description: anter-specific proline-rich protein APG putative; protein id: At1g20120.1, supported by cDNA: 22980.
  misc_feature (35)..(360): Homolog of NCBI NO: 21592372 NR Description: anter-specific proline-rich protein APG
  misc_feature (36)..(365): Homolog of NCBI NO: 18406327 NR Description: proline-rich protein, putative; protein id:
  misc_feature (24)..(362): Homolog of NCBI NO: 28393626 NR Description: putative family II extracellular lipase 1 (EXL1) thaliana] >gi|28827430|gb|AAO50559.1| putative family II
  misc_feature (25)..(362): Homolog of NCBI NO: 8778807 NR Description: T4O12.12 [Arabidopsis thaliana]
MRVLLVVVLISFAPLITTNVAAGVNATRSAGRQQKQKQKPLAPALIVFGDSIVDPGNNNDIHTIIKADFPPYGTYFQNHRATGRFCNGRIPTDFIASRLGIKELLPPYLTSEPLDKHDLVTGVSFASGGTGFDPLTPQLASVISLPDQLTMFHDYLGKVRDAAGDARVSDILSRGVFAICAGSDDVANTYFTLRARSSYDHASYARLLVQHATAFVEDLIRAGARRVAFIGIPPIGCVPSQRTMSGGLDRGCSQGHNEIAVAYNAGMVQQLAALRAKYPDTLLVFMDIYGFLYDMMMHPRSYGFTQSTRGCCGTGLLEVSVLCNGVTSAVCQDVGDYLFWDSYHPTEKAYKILADFVFDNYVKLILV

SEQ ID NO: 10386 - DNA, 695 bp, Zea mays subsp. mays; identical to SEQ ID NO: 10175
  misc_feature (1)..(695): Ceres Seq. ID no. 12342067
  misc_feature: MA Experiment ID: 108528 Result: Up-regulated in Transcription
  misc_feature: MA Experiment 108528 PARAMETER Experiment Name: Zm_Imbibed_Seeds_P Parameter: Age (day) Value: 5 vs. 2
  misc_feature: MA Experiment 108528 PARAMETER Experiment Name: Zm_Imbibed_Seeds_P Parameter: Organism Value: Zea mays
  misc_feature: MA Experiment 108528 PARAMETER Experiment Name: Zm_Imbibed_Seeds_P Parameter: Plant Line Value: 35A19
  misc_feature: MA Experiment 108528 PARAMETER Experiment Name: Zm_Imbibed_Seeds_P Parameter: Tissue Value: Aerial vs. Embryo
  misc_feature: MA Experiment ID: 108529 Result: Up-regulated in Transcription
  misc_feature: MA Experiment 108529 PARAMETER Experiment Name: Zm_Imbibed_Seeds_P Parameter: Age (day) Value: 5 vs. 2
  misc_feature: MA Experiment 108529 PARAMETER Experiment Name: Zm_Imbibed_Seeds_P Parameter: Organism Value: Zea mays
  misc_feature: MA Experiment 108529 PARAMETER Experiment Name: Zm_Imbibed_Seeds_P Parameter: Plant Line Value: 35A19
  misc_feature: MA Experiment 108529 PARAMETER Experiment Name: Zm_Imbibed_Seeds_P Parameter: Tissue Value: Roots vs. Embryo
  misc_feature: MA Experiment ID: 108530 Result: Up-regulated in Transcription
  misc_feature: MA Experiment 108530 PARAMETER Experiment Name: Zm_Imbibed_Seeds_P Parameter: Age (day) Value: 6 vs. 2
  misc_feature: MA Experiment 108530 PARAMETER Experiment Name: Zm_Imbibed_Seeds_P Parameter: Organism Value: Zea mays
  misc_feature: MA Experiment 108530 PARAMETER Experiment Name: Zm_Imbibed_Seeds_P Parameter: Plant Line Value: 35A19
  misc_feature: MA Experiment 108530 PARAMETER Experiment Name: Zm_Imbibed_Seeds_P Parameter: Tissue Value: Aerial vs. Embryo
  misc_feature: MA Experiment ID: 108534 Result: Up-regulated in Transcription
  misc_feature: MA Experiment 108534 PARAMETER Experiment Name: Zm_4deg_Cold_P Parameter: Age (hr) Value: 8
  misc_feature: MA Experiment 108534 PARAMETER Experiment Name: Zm_4deg_Cold_P Parameter: Organism Value: Zea mays
  misc_feature: MA Experiment 108534 PARAMETER Experiment Name: Zm_4deg_Cold_P Parameter: Plant Line Value: 35A19
  misc_feature: MA Experiment 108534 PARAMETER Experiment Name: Zm_4deg_Cold_P Parameter: Temperature (deg C) Value: 4 vs. 22
  misc_feature: MA Experiment 108534 PARAMETER Experiment Name: Zm_4deg_Cold_P Parameter: Timepoint (hr) Value: 6
  misc_feature: MA Experiment 108534 PARAMETER Experiment Name: Zm_4deg_Cold_P Parameter: Tissue Value: Aerial
  misc_feature: MA Experiment ID: 108535 Result: Down-regulated in Transcription
  misc_feature: MA Experiment 108535 PARAMETER Experiment Name: Zm_Meristem_P Parameter: Age (day) Value: 8
  misc_feature: MA Experiment 108535 PARAMETER Experiment Name: Zm_Meristem_P Parameter: Organism Value: Zea mays
  misc_feature: MA Experiment 108535 PARAMETER Experiment Name: Zm_Meristem_P Parameter: Plant Line Value: 35A19
  misc_feature: MA Experiment 108535 PARAMETER Experiment Name: Zm_Meristem_P Parameter: Tissue Value: Root Meristem vs. Above Root Meristem
  misc_feature: MA Experiment ID: 108543 Result: Up-regulated in Transcription
  misc_feature: MA Experiment ID: 108546 Result: Up-regulated in Transcription
  misc_feature: MA Experiment 108546 PARAMETER Experiment Name: Zm_Imbibed_Seeds_P Parameter: Age (day) Value: 3 vs. 2
  misc_feature: MA Experiment 108546 PARAMETER Experiment Name: Zm_Imbibed_Seeds_P Parameter: Organism Value: Zea mays
  misc_feature: MA Experiment 108546 PARAMETER Experiment Name: Zm_Imbibed_Seeds_P Parameter: Plant Line Value: 35A19
  misc_feature: MA Experiment 108546 PARAMETER Experiment Name: Zm_Imbibed_Seeds_P Parameter: Tissue Value: Roots vs. Embryo
  misc_feature: MA Experiment ID: 20000477 Result: Down-regulated in Transcription
  misc_feature: MA Experiment 20000477 PARAMETER Experiment Name: Zm_5mM_SA_P Parameter: Age (day) Value: 10
  misc_feature: MA Experiment 20000477 PARAMETER Experiment Name: Zm_5mM_SA_P Parameter: Organism Value: Zea mays
  misc_feature: MA Experiment 20000477 PARAMETER Experiment Name: Zm_5mM_SA_P Parameter: Plant Line Value: 35A19
  misc_feature: MA Experiment 20000477 PARAMETER Experiment Name: Zm_5mM_SA_P Parameter: Timepoint (hr) Value: 48
  misc_feature: MA Experiment 20000477 PARAMETER Experiment Name: Zm_5mM_SA_P Parameter: Tissue Value: Aerial
  misc_feature: MA Experiment 20000477 PARAMETER Experiment Name: Zm_5mM_SA_P Parameter: Treatment Value: 5mM SA vs. No Treatment
  misc_feature: MA Experiment ID: 20000478 Result: Down-regulated in Transcription
  misc_feature: MA Experiment 20000478 PARAMETER Experiment Name: Zm_5mM_SA_P Parameter: Age (day) Value: 11
  misc_feature: MA Experiment 20000478 PARAMETER Experiment Name: Zm_5mM_SA_P Parameter: Organism Value: Zea mays
  misc_feature: MA Experiment 20000478 PARAMETER Experiment Name: Zm_5mM_SA_P Parameter: Plant Line Value: 35A19
  misc_feature: MA Experiment 20000478 PARAMETER Experiment Name: Zm_5mM_SA_P Parameter: Timepoint (hr) Value: 72
  misc_feature: MA Experiment 20000478 PARAMETER Experiment Name: Zm_5mM_SA_P Parameter: Tissue Value: Aerial
  misc_feature: MA Experiment 20000478 PARAMETER Experiment Name: Zm_5mM_SA_P Parameter: Treatment Value: 5mM SA vs. No Treatment
  misc_feature: MA Experiment ID: 20000479 Result: Down-regulated in Transcription
  misc_feature: MA Experiment 20000479 PARAMETER Experiment Name: Zm_Drought_P Parameter: Age (day) Value: 10
  misc_feature: MA Experiment 20000479 PARAMETER Experiment Name: Zm_Drought_P Parameter: Organism Value: Zea mays
  misc_feature: MA Experiment 20000479 PARAMETER Experiment Name: Zm_Drought_P Parameter: Plant Line Value: 35A19
  misc_feature: MA Experiment 20000479 PARAMETER Experiment Name: Zm_Drought_P Parameter: Timepoint (hr) Value: 48
  misc_feature: MA Experiment 20000479 PARAMETER Experiment Name: Zm_Drought_P Parameter: Tissue Value: Aerial
  misc_feature: MA Experiment 20000479 PARAMETER Experiment Name: Zm_Drought_P Parameter: Treatment Value: Drought vs. No Drought
  misc_feature: MA Experiment ID: 20000480 Result: Down-regulated in Transcription
  misc_feature: MA Experiment 20000480 PARAMETER Experiment Name: Zm_Drought_P Parameter: Age (day) Value: 11
  misc_feature: MA Experiment 20000480 PARAMETER Experiment Name: Zm_Drought_P Parameter: Organism Value: Zea mays
  misc_feature: MA Experiment 20000480 PARAMETER Experiment Name: Zm_Drought_P Parameter: Plant Line Value: 35A19
  misc_feature: MA Experiment 20000480 PARAMETER Experiment Name: Zm_Drought_P Parameter: Timepoint (hr) Value: 72
  misc_feature: MA Experiment 20000480 PARAMETER Experiment Name: Zm_Drought_P Parameter: Tissue Value: Aerial
  misc_feature: MA Experiment 20000480 PARAMETER Experiment Name: Zm_Drought_P Parameter: Treatment Value: Drought vs. No Drought
  misc_feature: MA Experiment ID: 20000492 Result: Down-regulated in Transcription
  misc_feature: MA Experiment 20000492 PARAMETER Experiment Name: Zm_Hybrid_Seed_Dev_P Parameter: DAP Value: 12
  misc_feature: MA Experiment 20000492 PARAMETER Experiment Name: Zm_Hybrid_Seed_Dev_P Parameter: Organism Value: Zea mays
  misc_feature: MA Experiment 20000492 PARAMETER Experiment Name: Zm_Hybrid_Seed_Dev_P Parameter: Plant Line Value: 35A19
  misc_feature: MA Experiment 20000492 PARAMETER Experiment Name: Zm_Hybrid_Seed_Dev_P Parameter: Tissue Value: Fert Kernel vs. Unfert Floret
  misc_feature: MA Experiment ID: 20000534 Result: Down-regulated in Transcription
  misc_feature: MA Experiment 20000534 PARAMETER Experiment Name: Zm_Hybrid_Pollen_P Parameter: Age (day) Value: 8
  misc_feature: MA Experiment 20000534 PARAMETER Experiment Name: Zm_Hybrid_Pollen_P Parameter: Organism Value: Zea mays
  misc_feature: MA Experiment 20000534 PARAMETER Experiment Name: Zm_Hybrid_Pollen_P Parameter: Plant Line Value: 35A19
  misc_feature: MA Experiment 20000534 PARAMETER Experiment Name: Zm_Hybrid_Pollen_P Parameter: Tissue Value: Pollen vs. Aerial

SEQ ID NO: 10387 - protein, 231 aa, Zea mays subsp. mays; identical to SEQ ID NO: 10176
  peptide (1)..(231): Ceres Seq. ID no. 12342068
  misc_feature (56)..(227): Pfam Name: Phosphorylase family Pfam Description: Phosphorylase family
  misc_feature (56)..(227): Pfam Name: Phosphorylase family Pfam Description: Phosphorylase family
  misc_feature (111)..(230): Homolog of NCBI NO: 34897886 NR Description: ESTs AU032452(S10068),C23571(S10068) correspond a region of the predicted gene.~Similar to P.trichocarpa x P.
  misc_feature (56)..(230): Homolog of NCBI NO: 481815 NR Description: vegetative storage protein win4.5 - western poplar x cottonwood (fragment) >gi|309839|gb|AAA16342.1| storage protein [Populus balsamifera subsp. trichocarpa x Populus
  misc_feature (27)..(226): Homolog of NCBI NO: 99650 NR Description: major storage protein - Carolina poplar
  misc_feature (56)..(226): Homolog of NCBI NO: 4775662 NR Description: major storage protein [Populus x canadensis]
  misc_feature (40)..(229): Homolog of NCBI NO: 7487318 NR Description: hypothetical protein T22A6.180 - Arabidopsis >gi|5051777|emb|CAB45070.1| putative protein [Arabidopsis >gi|7269285|emb|CAB79345.1| putative protein [Arabidopsis
  misc_feature (56)..(230): Homolog of NCBI NO: 481815 NR Description: vegetative storage protein win4.5 - western poplar x cottonwood (fragment) >gi|309839|gb|AAA16342.1| storage protein [Populus balsamifera subsp. trichocarpa x Populus
  misc_feature (56)..(226): Homolog of NCBI NO: 4775662 NR Description: major storage protein [Populus x canadensis]
  misc_feature (56)..(226): Homolog of NCBI NO: 728987 NR Description: BARK STORAGE PROTEIN B PRECURSOR bark storage protein >gi|445117|prf||1908423A bark storage
  misc_feature (56)..(226): Homolog of NCBI NO: 728986 NR Description: BARK STORAGE PROTEIN A PRECURSOR
  misc_feature (40)..(227): Homolog of NCBI NO: 30686500 NR Description: expressed protein [Arabidopsis thaliana] unknown protein [Arabidopsis thaliana]
  misc_feature (40)..(227): Homolog of NCBI NO: 21593613 NR Description: unknown [Arabidopsis thaliana]
  misc_feature (27)..(226): Homolog of NCBI NO: 421813 NR Description: storage protein, bark - cottonwood
  misc_feature (40)..(229): Homolog of NCBI NO: 7487318 NR Description: hypothetical protein T22A6.180 - Arabidopsis >gi|5051777|emb|CAB45070.1| putative protein [Arabidopsis >gi|7269285|emb|CAB79345.1| putative protein [Arabidopsis
  misc_feature (27)..(226): Homolog of NCBI NO: 99650 NR Description: major storage protein - Carolina poplar
  misc_feature (111)..(230): Homolog of NCBI NO: 34897886 NR Description: ESTs AU032452(S10068),C23571(S10068) correspond a region of the predicted gene.~Similar to P.trichocarpa x P.
  misc_feature (27)..(226): Homolog of NCBI NO: 421813 NR Description: storage protein, bark - cottonwood
  misc_feature (40)..(227): Homolog of NCBI NO: 21593613 NR Description: unknown [Arabidopsis thaliana]
  misc_feature (40)..(227): Homolog of NCBI NO: 30686500 NR Description: expressed protein [Arabidopsis thaliana] unknown protein [Arabidopsis thaliana]
  misc_feature (56)..(226): Homolog of NCBI NO: 728986 NR Description: BARK STORAGE PROTEIN A PRECURSOR
  misc_feature (56)..(226): Homolog of NCBI NO: 728987 NR Description: BARK STORAGE PROTEIN B PRECURSOR bark storage protein >gi|445117|prf||1908423A bark storage

SEQ ID NO: 10388 - protein, 218 aa, Zea mays subsp. mays; identical to SEQ ID NO: 10177
  peptide (1)..(218): Ceres Seq. ID no. 12342069
  misc_feature (43)..(214): Pfam Name: Phosphorylase family Pfam Description: Phosphorylase family
  misc_feature (43)..(214): Pfam Name: Phosphorylase family Pfam Description: Phosphorylase family
  misc_feature (98)..(217): Homolog of NCBI NO: 34897886 NR Description: ESTs AU032452(S10068),C23571(S10068) correspond a region of the predicted gene.~Similar to P.trichocarpa x P.
  misc_feature (43)..(217): Homolog of NCBI NO: 481815 NR Description: vegetative storage protein win4.5 - western poplar x cottonwood (fragment) >gi|309839|gb|AAA16342.1| storage protein [Populus balsamifera subsp. trichocarpa x Populus
  misc_feature (14)..(213): Homolog of NCBI NO: 99650 NR Description: major storage protein - Carolina poplar
  misc_feature (43)..(213): Homolog of NCBI NO: 4775662 NR Description: major storage protein [Populus x canadensis]
  misc_feature (27)..(216): Homolog of NCBI NO: 7487318 NR Description: hypothetical protein T22A6.180 - Arabidopsis >gi|5051777|emb|CAB45070.1| putative protein [Arabidopsis >gi|7269285|emb|CAB79345.1| putative protein [Arabidopsis
  misc_feature (14)..(213): Homolog of NCBI NO: 421813 NR Description: storage protein, bark - cottonwood
  misc_feature (27)..(214): Homolog of NCBI NO: 21593613 NR Description: unknown [Arabidopsis thaliana]
  misc_feature (27)..(214): Homolog of NCBI NO: 30686500 NR Description: expressed protein [Arabidopsis thaliana] unknown protein [Arabidopsis thaliana]
  misc_feature (43)..(213): Homolog of NCBI NO: 728986 NR Description: BARK STORAGE PROTEIN A PRECURSOR
  misc_feature (43)..(213): Homolog of NCBI NO: 728987 NR Description: BARK STORAGE PROTEIN B PRECURSOR bark storage protein >gi|445117|prf||1908423A bark storage
  misc_feature (98)..(217): Homolog of NCBI NO: 34897886 NR Description: ESTs AU032452(S10068),C23571(S10068) correspond a region of the predicted gene.~Similar to P.trichocarpa x P.
  misc_feature (43)..(217): Homolog of NCBI NO: 481815 NR Description: vegetative storage protein win4.5 - western poplar x cottonwood (fragment) >gi|309839|gb|AAA16342.1| storage protein [Populus balsamifera subsp. trichocarpa x Populus
  misc_feature (14)..(213): Homolog of NCBI NO: 99650 NR Description: major storage protein - Carolina poplar
  misc_feature (43)..(213): Homolog of NCBI NO: 4775662 NR Description: major storage protein [Populus x canadensis]
  misc_feature (27)..(216): Homolog of NCBI NO: 7487318 NR Description: hypothetical protein T22A6.180 - Arabidopsis >gi|5051777|emb|CAB45070.1| putative protein [Arabidopsis >gi|7269285|emb|CAB79345.1| putative protein [Arabidopsis
  misc_feature (14)..(213): Homolog of NCBI NO: 421813 NR Description: storage protein, bark - cottonwood
  misc_feature (27)..(214): Homolog of NCBI NO: 21593613 NR Description: unknown [Arabidopsis thaliana]
  misc_feature (27)..(214): Homolog of NCBI NO: 30686500 NR Description: expressed protein [Arabidopsis thaliana] unknown protein [Arabidopsis thaliana]
  misc_feature (43)..(213): Homolog of NCBI NO: 728986 NR Description: BARK STORAGE PROTEIN A PRECURSOR
  misc_feature (43)..(213): Homolog of NCBI NO: 728987 NR Description: BARK STORAGE PROTEIN B PRECURSOR bark storage protein >gi|445117|prf||1908423A bark storage

SEQ ID NO: 10389 - protein, 172 aa, Zea mays subsp. mays; identical to SEQ ID NO: 10178
  peptide (1)..(172): Ceres Seq. ID no. 12342070
  misc_feature (1)..(168): Pfam Name: Phosphorylase family Pfam Description: Phosphorylase family
  misc_feature (1)..(168): Pfam Name: Phosphorylase family Pfam Description: Phosphorylase family
  misc_feature (52)..(171): Homolog of NCBI NO: 34897886 NR Description: ESTs AU032452(S10068),C23571(S10068) correspond a region of the predicted gene.~Similar to P.trichocarpa x P.
  misc_feature (1)..(171): Homolog of NCBI NO: 481815 NR Description: vegetative storage protein win4.5 - western poplar x cottonwood (fragment) >gi|309839|gb|AAA16342.1| storage protein [Populus balsamifera subsp. trichocarpa x Populus
  misc_feature (1)..(167): Homolog of NCBI NO: 99650 NR Description: major storage protein - Carolina poplar
  misc_feature (1)..(167): Homolog of NCBI NO: 4775662 NR Description: major storage protein [Populus x canadensis]
  misc_feature (1)..(170): Homolog of NCBI NO: 7487318 NR Description: hypothetical protein T22A6.180 - Arabidopsis >gi|5051777|emb|CAB45070.1| putative protein [Arabidopsis >gi|7269285|emb|CAB79345.1| putative protein [Arabidopsis
  misc_feature (1)..(171): Homolog of NCBI NO: 481815 NR Description: vegetative storage protein win4.5 - western poplar x cottonwood (fragment) >gi|309839|gb|AAA16342.1| storage protein [Populus balsamifera subsp. trichocarpa x Populus
  misc_feature (1)..(167): Homolog of NCBI NO: 4775662 NR Description: major storage protein [Populus x canadensis]
  misc_feature (1)..(167): Homolog of NCBI NO: 728987 NR Description: BARK STORAGE PROTEIN B PRECURSOR bark storage protein >gi|445117|prf||1908423A bark storage
  misc_feature (1)..(167): Homolog of NCBI NO: 728986 NR Description: BARK STORAGE PROTEIN A PRECURSOR
  misc_feature (1)..(168): Homolog of NCBI NO: 30686500 NR Description: expressed protein [Arabidopsis thaliana] unknown protein [Arabidopsis thaliana]
  misc_feature (1)..(168): Homolog of NCBI NO: 21593613 NR Description: unknown [Arabidopsis thaliana]
  misc_feature (1)..(167): Homolog of NCBI NO: 421813 NR Description: storage protein, bark - cottonwood
  misc_feature (1)..(170): Homolog of NCBI NO: 7487318 NR Description: hypothetical protein T22A6.180 - Arabidopsis >gi|5051777|emb|CAB45070.1| putative protein [Arabidopsis >gi|7269285|emb|CAB79345.1| putative protein [Arabidopsis
  misc_feature (1)..(167): Homolog of NCBI NO: 99650 NR Description: major storage protein - Carolina poplar
  misc_feature (52)..(171): Homolog of NCBI NO: 34897886 NR Description: ESTs AU032452(S10068),C23571(S10068) correspond a region of the predicted gene.~Similar to P.trichocarpa x P.
  misc_feature (1)..(167): Homolog of NCBI NO: 421813 NR Description: storage protein, bark - cottonwood
  misc_feature (1)..(168): Homolog of NCBI NO: 21593613 NR Description: unknown [Arabidopsis thaliana]
  misc_feature (1)..(168): Homolog of NCBI NO: 30686500 NR Description: expressed protein [Arabidopsis thaliana] unknown protein [Arabidopsis thaliana]
  misc_feature (1)..(167): Homolog of NCBI NO: 728986 NR Description: BARK STORAGE PROTEIN A PRECURSOR
  misc_feature (1)..(167): Homolog of NCBI NO: 728987 NR Description: BARK STORAGE PROTEIN B PRECURSOR bark storage protein >gi|445117|prf||1908423A bark storage

SEQ ID NO: 10390 - DNA, 2266 bp, Zea mays subsp. mays
  misc_feature (1)..(2266): Ceres Seq. ID no. 13492661
  misc_feature: MA Experiment ID: 108527 Result: Down-regulated in Transcription
  misc_feature: MA Experiment 108527 PARAMETER Experiment Name: Zm_5mM_NO_P Parameter: Age (day) Value: 8
  misc_feature: MA Experiment 108527 PARAMETER Experiment Name: Zm_5mM_NO_P Parameter: Organism Value: Zea mays
  misc_feature: MA Experiment 108527 PARAMETER Experiment Name: Zm_5mM_NO_P Parameter: Plant Line Value: 35A19
  misc_feature: MA Experiment 108527 PARAMETER Experiment Name: Zm_5mM_NO_P Parameter: Timepoint (hr) Value: 6
  misc_feature: MA Experiment 108527 PARAMETER Experiment Name: Zm_5mM_NO_P Parameter: Tissue Value: Aerial
  misc_feature: MA Experiment 108527 PARAMETER Experiment Name: Zm_5mM_NO_P Parameter: Treatment Value: 5mM NO vs. No Treatment
  misc_feature: MA Experiment ID: 108528 Result: Up-regulated in Transcription
  misc_feature: MA Experiment 108528 PARAMETER Experiment Name: Zm_Imbibed_Seeds_P Parameter: Age (day) Value: 5 vs. 2
  misc_feature: MA Experiment 108528 PARAMETER Experiment Name: Zm_Imbibed_Seeds_P Parameter: Organism Value: Zea mays
  misc_feature: MA Experiment 108528 PARAMETER Experiment Name: Zm_Imbibed_Seeds_P Parameter: Plant Line Value: 35A19
  misc_feature: MA Experiment 108528 PARAMETER Experiment Name: Zm_Imbibed_Seeds_P Parameter: Tissue Value: Aerial vs. Embryo
  misc_feature: MA Experiment ID: 108530 Result: Up-regulated in Transcription
  misc_feature: MA Experiment 108530 PARAMETER Experiment Name: Zm_Imbibed_Seeds_P Parameter: Age (day) Value: 6 vs. 2
  misc_feature: MA Experiment 108530 PARAMETER Experiment Name: Zm_Imbibed_Seeds_P Parameter: Organism Value: Zea mays
  misc_feature: MA Experiment 108530 PARAMETER Experiment Name: Zm_Imbibed_Seeds_P Parameter: Plant Line Value: 35A19
  misc_feature: MA Experiment 108530 PARAMETER Experiment Name: Zm_Imbibed_Seeds_P Parameter: Tissue Value: Aerial vs. Embryo
  misc_feature: MA Experiment ID: 108536 Result: Down-regulated in Transcription
  misc_feature: MA Experiment 108536 PARAMETER Experiment Name: Zm_Meristem_P Parameter: Age (day) Value: 8
  misc_feature: MA Experiment 108536 PARAMETER Experiment Name: Zm_Meristem_P Parameter: Organism Value: Zea mays
  misc_feature: MA Experiment 108536 PARAMETER Experiment Name: Zm_Meristem_P Parameter: Plant Line Value: 35A19
  misc_feature: MA Experiment 108536 PARAMETER Experiment Name: Zm_Meristem_P Parameter: Tissue Value: Shoot Meristem vs. Above Shoot Meristem
  misc_feature: MA Experiment ID: 108545 Result: Up-regulated in Transcription
  misc_feature: MA Experiment 108545 PARAMETER Experiment Name: Zm_Imbibed_Seeds_P Parameter: Age (day) Value: 3 vs. 2
  misc_feature: MA Experiment 108545 PARAMETER Experiment Name: Zm_Imbibed_Seeds_P Parameter: Organism Value: Zea mays
  misc_feature: MA Experiment 108545 PARAMETER Experiment Name: Zm_Imbibed_Seeds_P Parameter: Plant Line Value: 35A19
  misc_feature: MA Experiment 108545 PARAMETER Experiment Name: Zm_Imbibed_Seeds_P Parameter: Tissue Value: Aerial vs. Embryo
  misc_feature: MA Experiment ID: 108547 Result: Up-regulated in Transcription
  misc_feature: MA Experiment 108547 PARAMETER Experiment Name: Zm_Imbibed_Seeds_P Parameter: Age (day) Value: 4 vs. 2
  misc_feature: MA Experiment 108547 PARAMETER Experiment Name: Zm_Imbibed_Seeds_P Parameter: Organism Value: Zea mays
  misc_feature: MA Experiment 108547 PARAMETER Experiment Name: Zm_Imbibed_Seeds_P Parameter: Plant Line Value: 35A19
  misc_feature: MA Experiment 108547 PARAMETER Experiment Name: Zm_Imbibed_Seeds_P Parameter: Tissue Value: Aerial vs. Embryo
  misc_feature: MA Experiment ID: 108556 Result: Down-regulated in Transcription
  misc_feature: MA Experiment 108556 PARAMETER Experiment Name: Zm_Drought_P Parameter: Age (day) Value: 9
  misc_feature: MA Experiment 108556 PARAMETER Experiment Name: Zm_Drought_P Parameter: Organism Value: Zea mays
  misc_feature: MA Experiment 108556 PARAMETER Experiment Name: Zm_Drought_P Parameter: Plant Line Value: 35A19
  misc_feature: MA Experiment 108556 PARAMETER Experiment Name: Zm_Drought_P Parameter: Timepoint (hr) Value: 24
  misc_feature: MA Experiment 108556 PARAMETER Experiment Name: Zm_Drought_P Parameter: Tissue Value: Aerial
  misc_feature: MA Experiment 108556 PARAMETER Experiment Name: Zm_Drought_P Parameter: Treatment Value: Drought vs. No Drought
  misc_feature: MA Experiment ID: 20000477 Result: Down-regulated in Transcription
  misc_feature: MA Experiment 20000477 PARAMETER Experiment Name: Zm_5mM_SA_P Parameter: Age (day) Value: 10
  misc_feature: MA Experiment 20000477 PARAMETER Experiment Name: Zm_5mM_SA_P Parameter: Organism Value: Zea mays
  misc_feature: MA Experiment 20000477 PARAMETER Experiment Name: Zm_5mM_SA_P Parameter: Plant Line Value: 35A19
  misc_feature: MA Experiment 20000477 PARAMETER Experiment Name: Zm_5mM_SA_P Parameter: Timepoint (hr) Value: 48
  misc_feature: MA Experiment 20000477 PARAMETER Experiment Name: Zm_5mM_SA_P Parameter: Tissue Value: Aerial
  misc_feature: MA Experiment 20000477 PARAMETER Experiment Name: Zm_5mM_SA_P Parameter: Treatment Value: 5mM SA vs. No Treatment
  misc_feature: MA Experiment ID: 20000478 Result: Down-regulated in Transcription
  misc_feature: MA Experiment 20000478 PARAMETER Experiment Name: Zm_5mM_SA_P Parameter: Age (day) Value: 11
  misc_feature: MA Experiment 20000478 PARAMETER Experiment Name: Zm_5mM_SA_P Parameter: Organism Value: Zea mays
  misc_feature: MA Experiment 20000478 PARAMETER Experiment Name: Zm_5mM_SA_P Parameter: Plant Line Value: 35A19
  misc_feature: MA Experiment 20000478 PARAMETER Experiment Name: Zm_5mM_SA_P Parameter: Timepoint (hr) Value: 72
  misc_feature: MA Experiment 20000478 PARAMETER Experiment Name: Zm_5mM_SA_P Parameter: Tissue Value: Aerial
  misc_feature: MA Experiment 20000478 PARAMETER Experiment Name: Zm_5mM_SA_P Parameter: Treatment Value: 5mM SA vs. No Treatment
  misc_feature: MA Experiment ID: 20000479 Result: Down-regulated in Transcription
  misc_feature: MA Experiment 20000479 PARAMETER Experiment Name: Zm_Drought_P Parameter: Age (day) Value: 10
  misc_feature: MA Experiment 20000479 PARAMETER Experiment Name: Zm_Drought_P Parameter: Organism Value: Zea mays
  misc_feature: MA Experiment 20000479 PARAMETER Experiment Name: Zm_Drought_P Parameter: Plant Line Value: 35A19
  misc_feature: MA Experiment 20000479 PARAMETER Experiment Name: Zm_Drought_P Parameter: Timepoint (hr) Value: 48
  misc_feature: MA Experiment 20000479 PARAMETER Experiment Name: Zm_Drought_P Parameter: Tissue Value: Aerial
  misc_feature: MA Experiment 20000479 PARAMETER Experiment Name: Zm_Drought_P Parameter: Treatment Value: Drought vs. No Drought
  misc_feature: MA Experiment ID: 20000480 Result: Down-regulated in Transcription
  misc_feature: MA Experiment 20000480 PARAMETER Experiment Name: Zm_Drought_P Parameter: Age (day) Value: 11
  misc_feature: MA Experiment 20000480 PARAMETER Experiment Name: Zm_Drought_P Parameter: Organism Value: Zea mays
  misc_feature: MA Experiment 20000480 PARAMETER Experiment Name: Zm_Drought_P Parameter: Plant Line Value: 35A19
  misc_feature: MA Experiment 20000480 PARAMETER Experiment Name: Zm_Drought_P Parameter: Timepoint (hr) Value: 72
  misc_feature: MA Experiment 20000480 PARAMETER Experiment Name: Zm_Drought_P Parameter: Tissue Value: Aerial
  misc_feature: MA Experiment 20000480 PARAMETER Experiment Name: Zm_Drought_P Parameter: Treatment Value: Drought vs. No Drought
  misc_feature: MA Experiment ID: 20000488 Result: Up-regulated in Transcription
  misc_feature: MA Experiment 20000488 PARAMETER Experiment Name: Zm_50mM_NH4NO3_L_to_H_P Parameter: Organism Value: Zea mays
  misc_feature: MA Experiment 20000488 PARAMETER Experiment Name: Zm_50mM_NH4NO3_L_to_H_P Parameter: Timepoint (hr) Value: 8
  misc_feature: MA Experiment 20000488 PARAMETER Experiment Name: Zm_50mM_NH4NO3_L_to_H_P Parameter: Tissue Value: Leaves
  misc_feature: MA Experiment 20000488 PARAMETER Experiment Name: Zm_50mM_NH4NO3_L_to_H_P Parameter: Treatment Value: 50mM NH4NO3 vs. 100mM Mannitol
  misc_feature: MA Experiment ID: 20000534 Result: Down-regulated in Transcription
  misc_feature: MA Experiment 20000534 PARAMETER Experiment Name: Zm_Hybrid_Pollen_P Parameter: Age (day) Value: 8
  misc_feature: MA Experiment 20000534 PARAMETER Experiment Name: Zm_Hybrid_Pollen_P Parameter: Organism Value: Zea mays
  misc_feature: MA Experiment 20000534 PARAMETER Experiment Name: Zm_Hybrid_Pollen_P Parameter: Plant Line Value: 35A19
  misc_feature: MA Experiment 20000534 PARAMETER Experiment Name: Zm_Hybrid_Pollen_P Parameter: Tissue Value: Pollen vs. Aerial
  misc_feature: MA Experiment ID: 20000626 Result: Down-regulated in Transcription
  misc_feature: MA Experiment 20000626 PARAMETER Experiment Name: Zm_Herbicide-Treatments_P Parameter: Timepoint (hr) Value: 12
  misc_feature: MA Experiment 20000626 PARAMETER Experiment Name: Zm_Herbicide-Treatments_P Parameter: Tissue Value: Aerial
  misc_feature: MA Experiment 20000626 PARAMETER Experiment Name: Zm_Herbicide-Treatments_P Parameter: Treatment Value: Roundup vs. No Treatment
  misc_feature: MA Experiment ID: 20000630 Result: Down-regulated in Transcription
  misc_feature: MA Experiment 20000630 PARAMETER Experiment Name: Zm_Herbicide-Treatments_P Parameter: Timepoint (hr) Value: 4
  misc_feature: MA Experiment 20000630 PARAMETER Experiment Name: Zm_Herbicide-Treatments_P Parameter: Tissue Value: Aerial
  misc_feature: MA Experiment 20000630 PARAMETER Experiment Name: Zm_Herbicide-Treatments_P Parameter: Treatment Value: Roundup vs. No Treatment
gttgtgtgcgaccgacgacgcacagacgatcagagaggtctcctgccgccgtgccacggacgcgaccgacgcgtaaaagttacgctccgcctaggtcgcgcacgggcgccttgcatccgcgccccagtggcctcatttccaggaggcctggggcctgggcacggaacgtgcagcgggcctgtgctttatgccaaacacgaaagggttattaggccccgctcaatattggttttggtctaagagccaagcctggaacgcttggttgggctacgatcctttcggcccacgattgctgtgagatcatcgactgaaagcatgtgatggcggcaatgctttccgctgcttttctttaccgtcctcctagtagacactgacattttaaagactacgattctagtggttgtaataaacagcgacacgtgactgtcgactgtcgttatagccggcagtaaccgccatacagcttgtttcacttgtctcactgagtcactatcagcttctttcatccataaccaaagcaatttgttttctcaccattccttttaaaaaaaggtgaaataaacatgagtccgagtgagcactgagtcgcagaaatatcaaacctaggaccggagacgaggtgctacttcttcaaaatctgaactgtgccatcacaaaagaaagaaagaaagaaaaaagaagagaaatccacaccacagccaccgcaagatcccgggcgcccaatcacccttctccacggagattcctagcctcagccacagcccacatctgcctcatcgtctccctgaggctcccgtcgcgccacgtgttccagcatcccggacgcaccaatggcatccaagcatcagatttatttttattttctggcaacattcaagatagaacttgatcgcggcggtgtttcctccgtcgctttaaataccttcgtcgcctccacaagtccacagcatctcaagccaccatcgatcttcaagtctcgctacgtagcagtgcaataaaaaaagcagccgcaatggcgagcagcaccatggccctctcctccacggccttcgccggcaaggccgtgaacgtgccgtcgtcgtccgccttcggcgaggcccgcgtgacgatgcgcaagacggcggcgaaggccaagccagcggcggcgtccgggagcccgtggtacggccccgaccgcgtgctgtacctgggcccactgtccggcgagccgccgagctacctgacgggcgagttcccgggcgactacggctgggacaccgcggggctgtcggcggacccggagacgttcgccaagaaccgggagctggaggtgatccactcccgctgggccatgctgggcgcgctcggctgcgtcttcccggagctgctcgcccgcaacggcgtcaagttcggcgaggccgtgtggttcaaggccggctcccagatcttcagcgagggtggactggactacctcgggaacccgagcctcatccacgcgcagagcatcctcgccatctgggcctgccaggtcgtgctcatgggcgccgtcgagggctaccgcatcgccggcggcccgctcggcgaggtcgtcgacccgctctatcccggcggcagcttcgacccgctcggcctcgccgacgaccccgaggccttcgctgagctcaaggtgaaggagctcaagaacggccgcctcgccatgttctccatgttcggattcttcgtccaggccatcgtcaccgggaagggcccgctcgagaacctcgctgaccacattgccgaccccgtcaacaacaacgcttgggcctacgccaccaacttcgtccccggcaagtgagggaggcgccgccggtgacctttaggtgtccggatgcatgtgagcgcacgctggttttcggtttgtaccatgatgtaaactattgttcaatcaacaaggaataattgtgttcattgtcattatttttcccctctctttttcgttcctgccgattttatctaaatcaggtgtttgataaacggcatgattggtttcctgcttggccgtgtccagtctcaccaccagtgttgaccgtgtgcatgcacatgattggtgacctacactggctgagcgtagtctgaatgtacgagcacaacctagtcattttaccaccgcttccacatgcacgcgcagaaacgctagaaggaacgttcgctggttacccagaccggcggtaaccaatcacgcgaaaaaagagtagccgaattttacatattagagttcacacatcctagattaagcaccaagaattcg

SEQ ID NO: 10391 - protein, 266 aa, Zea mays subsp. mays
  peptide (1)..(266): Ceres Seq. ID no. 13492662
  misc_feature (65)..(233): Pfam Name: Chlorophyll A-B binding protein Pfam Description: Chlorophyll A-B binding protein
  misc_feature (1)..(266): Homolog of NCBI NO: 115786 NR Description: Chlorophyll A-B binding protein, chloroplast
  misc_feature (1)..(266): Homolog of NCBI NO: 115815 NR Description: Chlorophyll A-B binding protein M9, chloroplast
  misc_feature (1)..(266): Homolog of NCBI NO: 283038 NR Description: chlorophyll a/b-binding protein (cab-m7) - maize >gi|22230|emb|CAA37474.1| light harvesting chlorophyll a
  misc_feature (1)..(266): Homolog of NCBI NO: 34910682 NR Description: chlorophyll a/b binding protein [Oryza sativa
  misc_feature (1)..(266): Homolog of NCBI NO: 1657859 NR Description: chlorophyll a/b-binding protein WCAB precursor
  misc_feature (1)..(266): Homolog of NCBI NO: 115825 NR Description: Chlorophyll A-B binding protein 3C, chloroplast
  misc_feature (1)..(266): Homolog of NCBI NO: 3036948 NR Description: light harvesting chlorophyll a/b-binding protein
  misc_feature (1)..(266): Homolog of NCBI NO: 170404 NR Description: chlorophyll a/b-binding protein Cab-3C
  misc_feature (1)..(266): Homolog of NCBI NO: 115804 NR Description: Chlorophyll A-B binding protein 25, chloroplast
  misc_feature (1)..(266): Homolog of NCBI NO: 320618 NR Description: chlorophyll a/b-binding protein I precursor - rice
MASSTMALSSTAFAGKAVNVPSSSAFGEARVTMRKTAAKAKPAAASGSPWYGPDRVLYLGPLSGEPPSYLTGEFPGDYGWDTAGLSADPETFAKNRELEVIHSRWAMLGALGCVFPELLARNGVKFGEAVWFKAGSQIFSEGGLDYLGNPSLIHAQSILAIWACQVVLMGAVEGYRIAGGPLGEVVDPLYPGGSFDPLGLADDPEAFAELKVKELKNGRLAMFSMFGFFVQAIVTGKGPLENLADHIADPVNNNAWAYATNFVPGK

SEQ ID NO: 10392 - protein, 261 aa, Zea mays subsp. mays
  peptide (1)..(261): Ceres Seq. ID no. 13492663
  misc_feature (60)..(228): Pfam Name: Chlorophyll A-B binding protein Pfam Description: Chlorophyll A-B binding protein
  misc_feature (1)..(261): Homolog of NCBI NO: 115786 NR Description: Chlorophyll A-B binding protein, chloroplast
  misc_feature (1)..(261): Homolog of NCBI NO: 283038 NR Description: chlorophyll a/b-binding protein (cab-m7) - maize >gi|22230|emb|CAA37474.1| light harvesting chlorophyll a
  misc_feature (1)..(261): Homolog of NCBI NO: 115815 NR Description: Chlorophyll A-B binding protein M9, chloroplast
  misc_feature (1)..(261): Homolog of NCBI NO: 34910682 NR Description: chlorophyll a/b binding protein [Oryza sativa
  misc_feature (1)..(261): Homolog of NCBI NO: 1657859 NR Description: chlorophyll a/b-binding protein WCAB precursor
  misc_feature (1)..(261): Homolog of NCBI NO: 115825 NR Description: Chlorophyll A-B binding protein 3C, chloroplast
  misc_feature (1)..(261): Homolog of NCBI NO: 3036948 NR Description: light harvesting chlorophyll a/b-binding protein
  misc_feature (1)..(261): Homolog of NCBI NO: 170404 NR Description: chlorophyll a/b-binding protein Cab-3C
  misc_feature (1)..(261): Homolog of NCBI NO: 115804 NR Description: Chlorophyll A-B binding protein 25, chloroplast
  misc_feature (1)..(261): Homolog of NCBI NO: 320618 NR Description: chlorophyll a/b-binding protein I precursor - rice
MALSSTAFAGKAVNVPSSSAFGEARVTMRKTAAKAKPAAASGSPWYGPDRVLYLGPLSGEPPSYLTGEFPGDYGWDTAGLSADPETFAKNRELEVIHSRWAMLGALGCVFPELLARNGVKFGEAVWFKAGSQIFSEGGLDYLGNPSLIHAQSILAIWACQVVLMGAVEGYRIAGGPLGEVVDPLYPGGSFDPLGLADDPEAFAELKVKELKNGRLAMFSMFGFFVQAIVTGKGPLENLADHIADPVNNNAWAYATNFVPGK

SEQ ID NO: 10393 - protein, 234 aa, Zea mays subsp. mays
  peptide (1)..(234): Ceres Seq. ID no. 13492664
  misc_feature (33)..(201): Pfam Name: Chlorophyll A-B binding protein Pfam Description: Chlorophyll A-B binding protein
  misc_feature (1)..(234): Homolog of NCBI NO: 115786 NR Description: Chlorophyll A-B binding protein, chloroplast
  misc_feature (1)..(234): Homolog of NCBI NO: 283038 NR Description: chlorophyll a/b-binding protein (cab-m7) - maize >gi|22230|emb|CAA37474.1| light harvesting chlorophyll a
  misc_feature (1)..(234): Homolog of NCBI NO: 115815 NR Description: Chlorophyll A-B binding protein M9, chloroplast
  misc_feature (1)..(234): Homolog of NCBI NO: 34910682 NR Description: chlorophyll a/b binding protein [Oryza sativa
  misc_feature (1)..(234): Homolog of NCBI NO: 1657859 NR Description: chlorophyll a/b-binding protein WCAB precursor
  misc_feature (1)..(234): Homolog of NCBI NO: 115825 NR Description: Chlorophyll A-B binding protein 3C, chloroplast
  misc_feature (1)..(234): Homolog of NCBI NO: 3036948 NR Description: light harvesting chlorophyll a/b-binding protein
  misc_feature (1)..(234): Homolog of NCBI NO: 170404 NR Description: chlorophyll a/b-binding protein Cab-3C
  misc_feature (1)..(234): Homolog of NCBI NO: 115804 NR Description: Chlorophyll A-B binding protein 25, chloroplast
  misc_feature (1)..(234): Homolog of NCBI NO: 320618 NR Description: chlorophyll a/b-binding protein I precursor - rice
MRKTAAKAKPAAASGSPWYGPDRVLYLGPLSGEPPSYLTGEFPGDYGWDTAGLSADPETFAKNRELEVIHSRWAMLGALGCVFPELLARNGVKFGEAVWFKAGSQIFSEGGLDYLGNPSLIHAQSILAIWACQVVLMGAVEGYRIAGGPLGEVVDPLYPGGSFDPLGLADDPEAFAELKVKELKNGRLAMFSMFGFFVQAIVTGKGPLENLADHIADPVNNNAWAYATNFVPGK

SEQ ID NO: 10394 - DNA, 1153 bp, Zea mays subsp. mays
  misc_feature (1)..(1153): Ceres Seq. ID no. 12400804
  misc_feature: MA Experiment ID: 108527 Result: Down-regulated in Transcription
  misc_feature: MA Experiment 108527 PARAMETER Experiment Name: Zm_5mM_NO_P Parameter: Age (day) Value: 8
  misc_feature: MA Experiment 108527 PARAMETER Experiment Name: Zm_5mM_NO_P Parameter: Organism Value: Zea mays
  misc_feature: MA Experiment 108527 PARAMETER Experiment Name: Zm_5mM_NO_P Parameter: Plant Line Value: 35A19
  misc_feature: MA Experiment 108527 PARAMETER Experiment Name: Zm_5mM_NO_P Parameter: Timepoint (hr) Value: 6
  misc_feature: MA Experiment 108527 PARAMETER Experiment Name: Zm_5mM_NO_P Parameter: Tissue Value: Aerial
  misc_feature: MA Experiment 108527 PARAMETER Experiment Name: Zm_5mM_NO_P Parameter: Treatment Value: 5mM NO vs. No Treatment
  misc_feature: MA Experiment ID: 108535 Result: Down-regulated in Transcription
  misc_feature: MA Experiment 108535 PARAMETER Experiment Name: Zm_Meristem_P Parameter: Age (day) Value: 8
  misc_feature: MA Experiment 108535 PARAMETER Experiment Name: Zm_Meristem_P Parameter: Organism Value: Zea mays
  misc_feature: MA Experiment 108535 PARAMETER Experiment Name: Zm_Meristem_P Parameter: Plant Line Value: 35A19
  misc_feature: MA Experiment 108535 PARAMETER Experiment Name: Zm_Meristem_P Parameter: Tissue Value: Root Meristem vs. Above Root Meristem
  misc_feature: MA Experiment ID: 20000488 Result: Down-regulated in Transcription
  misc_feature: MA Experiment 20000488 PARAMETER Experiment Name: Zm_50mM_NH4NO3_L_to_H_P Parameter: Organism Value: Zea mays
  misc_feature: MA Experiment 20000488 PARAMETER Experiment Name: Zm_50mM_NH4NO3_L_to_H_P Parameter: Timepoint (hr) Value: 8
  misc_feature: MA Experiment 20000488 PARAMETER Experiment Name: Zm_50mM_NH4NO3_L_to_H_P Parameter: Tissue Value: Leaves
  misc_feature: MA Experiment 20000488 PARAMETER Experiment Name: Zm_50mM_NH4NO3_L_to_H_P Parameter: Treatment Value: 50mM NH4NO3 vs. 100mM Mannitol
  misc_feature: MA Experiment ID: 20001613 Result: Down-regulated in Transcription
  misc_feature: MA Experiment 20001613 PARAMETER Experiment Name: Zm_50ppm_KNO3_L-to-H_P Parameter: Age (day) Value: 20
  misc_feature: MA Experiment 20001613 PARAMETER Experiment Name: Zm_50ppm_KNO3_L-to-H_P Parameter: Organism Value: Zea mays
  misc_feature: MA Experiment 20001613 PARAMETER Experiment Name: Zm_50ppm_KNO3_L-to-H_P Parameter: Plant Line Value: 35A19
  misc_feature: MA Experiment 20001613 PARAMETER Experiment Name: Zm_50ppm_KNO3_L-to-H_P Parameter: Timepoint (hr) Value: 24
  misc_feature: MA Experiment 20001613 PARAMETER Experiment Name: Zm_50ppm_KNO3_L-to-H_P Parameter: Tissue Value: Roots
  misc_feature: MA Experiment 20001613 PARAMETER Experiment Name: Zm_50ppm_KNO3_L-to-H_P Parameter: Treatment Value: 50ppm KNO3 vs. 50ppm KCl
gcacgagaccattacctagaacatcctaatcaaaaaattccgtcgtcgtcgtcagcagcttctgcttgctttgtgggggaaggagagagagagagagcgagagagagatctagtagagaggctagtaggtggtcctcgaacgaagatgttggcggtgttcagcgggcaggtggtggaggtgccggcggagctggtggcggcgggcagccggacgccgtcgcccaagacgaaggcgtcgcagctcgtggggcgcttcctggccgcctccgagccggccgtgtccgtgcagctcggcgaccacggccacctcgcttactcccacaccaaccaggcgctcctccgccccaggtcgttcgcggccaaggacgaggtgttctgcctgttcgaaggggtgctggacaacctgggtcggctgagccagcagcacgggctgtcaagcaagggcgccaacgaggtgctcctcgtcatcgaggcctacaagacgctgcgcgaccgcgcgccctacccggccagcttcatgctcgcccagctcaccggctcctacgccttcgtcctcttcgacaagtccaccaactccctgctcgtcgcatccgaccccgagggcagggtgccgctcttctgggggatcaccgccgacggctgcgtcgccttctccgacgacatcgacatgctcaaaggctcatgcggcaagtcgctcgcgccgttcccgcaaggctgcttctactccaacgcgctcggagggctcaagtgctacgagaaccccaagcacaaggtcaccgctgtccccgccgacgaagaagagatctgcggtgccactttcaaggtggtggaagggtctactgtcctgacggcgctgcactgatcgatcatcagctggcggaggcgatgccatgatgatgatgcagaactttgtacatgcgttggtggatggtggtgtaacatagtggctgccaacaagtcatgctcatgcaaaccgatgaatctatctctgtatcatcgatctcggttgcttgctagtccagactccagacatggctatatatatatagctggtgctaataaataggagtataatcgtcatatcgatcggttgcgtgtggaatgccaatcatgtgtgtaatctgttggcaaataacaaacctctgttcctccc

SEQ ID NO: 10395 - protein, 297 aa, Zea mays subsp. mays
  peptide (1)..(297): Ceres Seq. ID no. 12400805
  misc_feature (75)..(290): Homolog of NCBI NO: 7489387 NR Description: licheninase (EC 3.2.1.73) - barley
ARDHYLEHPNQKIPSSSSAASACFVGEGERERARERSSREASRWSSNEDVGGVQRAGGGGAGGAGGGGQPDAVAQDEGVAARGALPGRLRAGRVRAARRPRPPRLLPHQPGAPPPQVVRGQGRGVLPVRRGAGQPGSAEPAARAVKQGRQRGAPRHRGLQDAARPRALPGQLHARPAHRLLRLRPLRQVHQLPARRIRPRGQGAALLGDHRRRLRRLLRRHRHAQRLMRQVARAVPARLLLLQRARRAQVLREPQAQGHRCPRRRRRDLRCHFQGGGRVYCPDGAALIDHQLAEAMP

SEQ ID NO: 10396 - protein, 238 aa, Zea mays subsp. mays
  peptide (1)..(238): Ceres Seq. ID no. 12400806
  misc_feature (2)..(238): Homolog of NCBI NO: 7489671 NR Description: hypothetical protein wali7 - wheat (fragment)
  misc_feature (1)..(234): Homolog of NCBI NO: 15239658 NR Description: aluminium-induced protein - like; protein id: supported by cDNA: gi_14532643, supported by cDNA: gi_21280808
  misc_feature (1)..(236): Homolog of NCBI NO: 7488881 NR Description: hypothetical protein ARG10 - mung bean
  misc_feature (1)..(229): Homolog of NCBI NO: 7488440 NR Description: aluminum-induced protein - rape
  misc_feature (1)..(236): Homolog of NCBI NO: 13958130 NR Description: aluminium induced protein [Avicennia marina]
  misc_feature (1)..(236): Homolog of NCBI NO: 34541994 NR Description: Al-induced protein [Gossypium hirsutum]
  misc_feature (1)..(227): Homolog of NCBI NO: 20340249 NR Description: aluminum-induced protein-like protein
  misc_feature (1)..(227): Homolog of NCBI NO: 30017570 NR Description: unknown protein [Oryza sativa (japonica
  misc_feature (1)..(227): Homolog of NCBI NO: 15239993 NR Description: aluminum-induced protein-like; protein id: supported by cDNA: 12484., supported by cDNA: gi_15028024
  misc_feature (1)..(227): Homolog of NCBI NO: 15228883 NR Description: unknown protein; protein id: At3g22850.1, by cDNA: gi_18252900 [Arabidopsis thaliana] contains similarity to unknown
MLAVFSGQVVEVPAELVAAGSRTPSPKTKASQLVGRFLAASEPAVSVQLGDHGHLAYSHTNQALLRPRSFAAKDEVFCLFEGVLDNLGRLSQQHGLSSKGANEVLLVIEAYKTLRDRAPYPASFMLAQLTGSYAFVLFDKSTNSLLVASDPEGRVPLFWGITADGCVAFSDDIDMLKGSCGKSLAPFPQGCFYSNALGGLKCYENPKHKVTAVPADEEEICGATFKVVEGSTVLTALH

SEQ ID NO: 10397 - DNA, 1828 bp, Zea mays subsp. mays
  misc_feature (1)..(1828): Ceres Seq. ID no. 12372212
  misc_feature: MA Experiment ID: 108504 Result: Down-regulated in Transcription
  misc_feature: MA Experiment 108504 PARAMETER Experiment Name: Zm_Drought_P Parameter: Age (day) Value: 8
  misc_feature: MA Experiment 108504 PARAMETER Experiment Name: Zm_Drought_P Parameter: Organism Value: Zea mays
  misc_feature: MA Experiment 108504 PARAMETER Experiment Name: Zm_Drought_P Parameter: Plant Line Value: 35A19
  misc_feature: MA Experiment 108504 PARAMETER Experiment Name: Zm_Drought_P Parameter: Timepoint (hr) Value: 12
  misc_feature: MA Experiment 108504 PARAMETER Experiment Name: Zm_Drought_P Parameter: Tissue Value: Aerial
  misc_feature: MA Experiment 108504 PARAMETER Experiment Name: Zm_Drought_P Parameter: Treatment Value: Drought vs. No Drought
  misc_feature: MA Experiment ID: 108515 Result: Down-regulated in Transcription
  misc_feature: MA Experiment 108515 PARAMETER Experiment Name: Zm_2mM_SA_P Parameter: Age (day) Value: 8
  misc_feature: MA Experiment 108515 PARAMETER Experiment Name: Zm_2mM_SA_P Parameter: Organism Value: Zea mays
  misc_feature: MA Experiment 108515 PARAMETER Experiment Name: Zm_2mM_SA_P Parameter: Plant Line Value: 35A19
  misc_feature: MA Experiment 108515 PARAMETER Experiment Name: Zm_2mM_SA_P Parameter: Timepoint (hr) Value: 12
  misc_feature: MA Experiment 108515 PARAMETER Experiment Name: Zm_2mM_SA_P Parameter: Tissue Value: Aerial
  misc_feature: MA Experiment 108515 PARAMETER Experiment Name: Zm_2mM_SA_P Parameter: Treatment Value: 2mM SA vs. No Treatment
  misc_feature: MA Experiment ID: 108527 Result: Down-regulated in Transcription
  misc_feature: MA Experiment 108527 PARAMETER Experiment Name: Zm_5mM_NO_P Parameter: Age (day) Value: 8
  misc_feature: MA Experiment 108527 PARAMETER Experiment Name: Zm_5mM_NO_P Parameter: Organism Value: Zea mays
  misc_feature: MA Experiment 108527 PARAMETER Experiment Name: Zm_5mM_NO_P Parameter: Plant Line Value: 35A19
  misc_feature: MA Experiment 108527 PARAMETER Experiment Name: Zm_5mM_NO_P Parameter: Timepoint (hr) Value: 6
  misc_feature: MA Experiment 108527 PARAMETER Experiment Name: Zm_5mM_NO_P Parameter: Tissue Value: Aerial
  misc_feature: MA Experiment 108527 PARAMETER Experiment Name: Zm_5mM_NO_P Parameter: Treatment Value: 5mM NO vs. No Treatment
  misc_feature: MA Experiment ID: 108528 Result: Up-regulated in Transcription
  misc_feature: MA Experiment 108528 PARAMETER Experiment Name: Zm_Imbibed_Seeds_P Parameter: Age (day) Value: 5 vs. 2
  misc_feature: MA Experiment 108528 PARAMETER Experiment Name: Zm_Imbibed_Seeds_P Parameter: Organism Value: Zea mays
  misc_feature: MA Experiment 108528 PARAMETER Experiment Name: Zm_Imbibed_Seeds_P Parameter: Plant Line Value: 35A19
  misc_feature: MA Experiment 108528 PARAMETER Experiment Name: Zm_Imbibed_Seeds_P Parameter: Tissue Value: Aerial vs. Embryo
  misc_feature: MA Experiment ID: 108530 Result: Up-regulated in Transcription
  misc_feature: MA Experiment 108530 PARAMETER Experiment Name: Zm_Imbibed_Seeds_P Parameter: Age (day) Value: 6 vs. 2
  misc_feature: MA Experiment 108530 PARAMETER Experiment Name: Zm_Imbibed_Seeds_P Parameter: Organism Value: Zea mays
  misc_feature: MA Experiment 108530 PARAMETER Experiment Name: Zm_Imbibed_Seeds_P Parameter: Plant Line Value: 35A19
  misc_feature: MA Experiment 108530 PARAMETER Experiment Name: Zm_Imbibed_Seeds_P Parameter: Tissue Value: Aerial vs. Embryo
  misc_feature: MA Experiment ID: 108536 Result: Down-regulated in Transcription
  misc_feature: MA Experiment 108536 PARAMETER Experiment Name: Zm_Meristem_P Parameter: Age (day) Value: 8
  misc_feature: MA Experiment 108536 PARAMETER Experiment Name: Zm_Meristem_P Parameter: Organism Value: Zea mays
  misc_feature: MA Experiment 108536 PARAMETER Experiment Name: Zm_Meristem_P Parameter: Plant Line Value: 35A19
  misc_feature: MA Experiment 108536 PARAMETER Experiment Name: Zm_Meristem_P Parameter: Tissue Value: Shoot Meristem vs. Above Shoot Meristem
  misc_feature: MA Experiment ID: 108543 Result: Up-regulated in Transcription
  misc_feature: MA Experiment ID: 108545 Result: Up-regulated in Transcription
  misc_feature: MA Experiment 108545 PARAMETER Experiment Name: Zm_Imbibed_Seeds_P Parameter: Age (day) Value: 3 vs. 2
  misc_feature: MA Experiment 108545 PARAMETER Experiment Name: Zm_Imbibed_Seeds_P Parameter: Organism Value: Zea mays
  misc_feature: MA Experiment 108545 PARAMETER Experiment Name: Zm_Imbibed_Seeds_P Parameter: Plant Line Value: 35A19
  misc_feature: MA Experiment 108545 PARAMETER Experiment Name: Zm_Imbibed_Seeds_P Parameter: Tissue Value: Aerial vs. Embryo
  misc_feature: MA Experiment ID: 108547 Result: Up-regulated in Transcription
  misc_feature: MA Experiment 108547 PARAMETER Experiment Name: Zm_Imbibed_Seeds_P Parameter: Age (day) Value: 4 vs. 2
  misc_feature: MA Experiment 108547 PARAMETER Experiment Name: Zm_Imbibed_Seeds_P Parameter: Organism Value: Zea mays
  misc_feature: MA Experiment 108547 PARAMETER Experiment Name: Zm_Imbibed_Seeds_P Parameter: Plant Line Value: 35A19
  misc_feature: MA Experiment 108547 PARAMETER Experiment Name: Zm_Imbibed_Seeds_P Parameter: Tissue Value: Aerial vs. Embryo
  misc_feature: MA Experiment ID: 108556 Result: Down-regulated in Transcription
  misc_feature: MA Experiment 108556 PARAMETER Experiment Name: Zm_Drought_P Parameter: Age (day) Value: 9
  misc_feature: MA Experiment 108556 PARAMETER Experiment Name: Zm_Drought_P Parameter: Organism Value: Zea mays
  misc_feature: MA Experiment 108556 PARAMETER Experiment Name: Zm_Drought_P Parameter: Plant Line Value: 35A19
  misc_feature: MA Experiment 108556 PARAMETER Experiment Name: Zm_Drought_P Parameter: Timepoint (hr) Value: 24
  misc_feature: MA Experiment 108556 PARAMETER Experiment Name: Zm_Drought_P Parameter: Tissue Value: Aerial
  misc_feature: MA Experiment 108556 PARAMETER Experiment Name: Zm_Drought_P Parameter: Treatment Value: Drought vs. No Drought
  misc_feature: MA Experiment ID: 108559 Result: Down-regulated in Transcription
  misc_feature: MA Experiment 108559 PARAMETER Experiment Name: Zm_5mM_NO_P Parameter: Age (day) Value: 8
  misc_feature: MA Experiment 108559 PARAMETER Experiment Name: Zm_5mM_NO_P Parameter: Organism Value: Zea mays
  misc_feature: MA Experiment 108559 PARAMETER Experiment Name: Zm_5mM_NO_P Parameter: Plant Line Value: 35A19
  misc_feature: MA Experiment 108559 PARAMETER Experiment Name: Zm_5mM_NO_P Parameter: Timepoint (hr) Value: 12
  misc_feature: MA Experiment 108559 PARAMETER Experiment Name: Zm_5mM_NO_P Parameter: Tissue Value: Aerial
  misc_feature: MA Experiment 108559 PARAMETER Experiment Name: Zm_5mM_NO_P Parameter: Treatment Value: 5mM NO vs. No Treatment
  misc_feature: MA Experiment ID: 108597 Result: Down-regulated in Transcription
  misc_feature: MA Experiment 108597 PARAMETER Experiment Name: Zm_100uM_ABA_P Parameter: Age (day) Value: 9
  misc_feature: MA Experiment 108597 PARAMETER Experiment Name: Zm_100uM_ABA_P Parameter: Organism Value: Zea mays
  misc_feature: MA Experiment 108597 PARAMETER Experiment Name: Zm_100uM_ABA_P Parameter: Plant Line Value: 35A19
  misc_feature: MA Experiment 108597 PARAMETER Experiment Name: Zm_100uM_ABA_P Parameter: Timepoint (hr) Value: 24
  misc_feature: MA Experiment 108597 PARAMETER Experiment Name: Zm_100uM_ABA_P Parameter: Tissue Value: Aerial
  misc_feature: MA Experiment 108597 PARAMETER Experiment Name: Zm_100uM_ABA_P Parameter: Treatment Value: 100uM ABA vs. No Treatment
  misc_feature: MA Experiment ID: 20000477 Result: Down-regulated in Transcription
  misc_feature: MA Experiment 20000477 PARAMETER Experiment Name: Zm_5mM_SA_P Parameter: Age (day) Value: 10
  misc_feature: MA Experiment 20000477 PARAMETER Experiment Name: Zm_5mM_SA_P Parameter: Organism Value: Zea mays
  misc_feature: MA Experiment 20000477 PARAMETER Experiment Name: Zm_5mM_SA_P Parameter: Plant Line Value: 35A19
  misc_feature: MA Experiment 20000477 PARAMETER Experiment Name: Zm_5mM_SA_P Parameter: Timepoint (hr) Value: 48
  misc_feature: MA Experiment 20000477 PARAMETER Experiment Name: Zm_5mM_SA_P Parameter: Tissue Value: Aerial
  misc_feature: MA Experiment 20000477 PARAMETER Experiment Name: Zm_5mM_SA_P Parameter: Treatment Value: 5mM SA vs. No Treatment
  misc_feature: MA Experiment ID: 20000478 Result: Down-regulated in Transcription
  misc_feature: MA Experiment 20000478 PARAMETER Experiment Name: Zm_5mM_SA_P Parameter: Age (day) Value: 11
  misc_feature: MA Experiment 20000478 PARAMETER Experiment Name: Zm_5mM_SA_P Parameter: Organism Value: Zea mays
  misc_feature: MA Experiment 20000478 PARAMETER Experiment Name: Zm_5mM_SA_P Parameter: Plant Line Value: 35A19
  misc_feature: MA Experiment 20000478 PARAMETER Experiment Name: Zm_5mM_SA_P Parameter: Timepoint (hr) Value: 72
  misc_feature: MA Experiment 20000478 PARAMETER Experiment Name: Zm_5mM_SA_P Parameter: Tissue Value: Aerial
  misc_feature: MA Experiment 20000478 PARAMETER Experiment Name: Zm_5mM_SA_P Parameter: Treatment Value: 5mM SA vs. No Treatment
  misc_feature: MA Experiment ID: 20000479 Result: Down-regulated in Transcription
  misc_feature: MA Experiment 20000479 PARAMETER Experiment Name: Zm_Drought_P Parameter: Age (day) Value: 10
  misc_feature: MA Experiment 20000479 PARAMETER Experiment Name: Zm_Drought_P Parameter: Organism Value: Zea mays
  misc_feature: MA Experiment 20000479 PARAMETER Experiment Name: Zm_Drought_P Parameter: Plant Line Value: 35A19
  misc_feature: MA Experiment 20000479 PARAMETER Experiment Name: Zm_Drought_P Parameter: Timepoint (hr) Value: 48
  misc_feature: MA Experiment 20000479 PARAMETER Experiment Name: Zm_Drought_P Parameter: Tissue Value: Aerial
  misc_feature: MA Experiment 20000479 PARAMETER Experiment Name: Zm_Drought_P Parameter: Treatment Value: Drought vs. No Drought
  misc_feature: MA Experiment ID: 20000480 Result: Down-regulated in Transcription
  misc_feature: MA Experiment 20000480 PARAMETER Experiment Name: Zm_Drought_P Parameter: Age (day) Value: 11
  misc_feature: MA Experiment 20000480 PARAMETER Experiment Name: Zm_Drought_P Parameter: Organism Value: Zea mays
  misc_feature: MA Experiment 20000480 PARAMETER Experiment Name: Zm_Drought_P Parameter: Plant Line Value: 35A19
  misc_feature: MA Experiment 20000480 PARAMETER Experiment Name: Zm_Drought_P Parameter: Timepoint (hr) Value: 72
  misc_feature: MA Experiment 20000480 PARAMETER Experiment Name: Zm_Drought_P Parameter: Tissue Value: Aerial
  misc_feature: MA Experiment 20000480 PARAMETER Experiment Name: Zm_Drought_P Parameter: Treatment Value: Drought vs. No Drought
  misc_feature: MA Experiment ID: 20000488 Result: Down-regulated in Transcription
  misc_feature: MA Experiment 20000488 PARAMETER Experiment Name: Zm_50mM_NH4NO3_L_to_H_P Parameter: Organism Value: Zea mays
  misc_feature: MA Experiment 20000488 PARAMETER Experiment Name: Zm_50mM_NH4NO3_L_to_H_P Parameter: Timepoint (hr) Value: 8
  misc_feature: MA Experiment 20000488 PARAMETER Experiment Name: Zm_50mM_NH4NO3_L_to_H_P Parameter: Tissue Value: Leaves
  misc_feature: MA Experiment 20000488 PARAMETER Experiment Name: Zm_50mM_NH4NO3_L_to_H_P Parameter: Treatment Value: 50mM NH4NO3 vs. 100mM Mannitol
  misc_feature: MA Experiment ID: 20000532 Result: Down-regulated in Transcription
  misc_feature: MA Experiment 20000532 PARAMETER Experiment Name: Zm_0.001percent_MeJA_P Parameter: Age (day) Value: 10
  misc_feature: MA Experiment 20000532 PARAMETER Experiment Name: Zm_0.001percent_MeJA_P Parameter: Organism Value: Zea mays
  misc_feature: MA Experiment 20000532 PARAMETER Experiment Name: Zm_0.001percent_MeJA_P Parameter: Plant Line Value: 35A19
  misc_feature: MA Experiment 20000532 PARAMETER Experiment Name: Zm_0.001percent_MeJA_P Parameter: Timepoint (hr) Value: 48
  misc_feature: MA Experiment 20000532 PARAMETER Experiment Name: Zm_0.001percent_MeJA_P Parameter: Tissue Value: Aerial
  misc_feature: MA Experiment 20000532 PARAMETER Experiment Name: Zm_0.001percent_MeJA_P Parameter: Treatment Value: 0.001percent MeJA vs. No Treatment
  misc_feature: MA Experiment ID: 20000533 Result: Down-regulated in Transcription
  misc_feature: MA Experiment 20000533 PARAMETER Experiment Name: Zm_0.001percent_MeJA_P Parameter: Age (day) Value: 11
  misc_feature: MA Experiment 20000533 PARAMETER Experiment Name: Zm_0.001percent_MeJA_P Parameter: Organism Value: Zea mays
  misc_feature: MA Experiment 20000533 PARAMETER Experiment Name: Zm_0.001percent_MeJA_P Parameter: Plant Line Value: 35A19
  misc_feature: MA Experiment 20000533 PARAMETER Experiment Name: Zm_0.001percent_MeJA_P Parameter: Timepoint (hr) Value: 72
  misc_feature: MA Experiment 20000533 PARAMETER Experiment Name: Zm_0.001percent_MeJA_P Parameter: Tissue Value: Aerial
  misc_feature: MA Experiment 20000533 PARAMETER Experiment Name: Zm_0.001percent_MeJA_P Parameter: Treatment Value: 0.001percent MeJA vs. No Treatment
  misc_feature: MA Experiment ID: 20000626 Result: Down-regulated in Transcription
  misc_feature: MA Experiment 20000626 PARAMETER Experiment Name: Zm_Herbicide-Treatments_P Parameter: Timepoint (hr) Value: 12
  misc_feature: MA Experiment 20000626 PARAMETER Experiment Name: Zm_Herbicide-Treatments_P Parameter: Tissue Value: Aerial
  misc_feature: MA Experiment 20000626 PARAMETER Experiment Name: Zm_Herbicide-Treatments_P Parameter: Treatment Value: Roundup vs. No Treatment
atcgatctctcccctcctcacttcctcccctcacgggggcagccacgtacaaaggcaggcagctcgccaacgcccagcaccctctcgccgcgccaccccacgccgtgcgcctttaaagagagcgcacgacaagcttaaaggttcccacgccgccgctcgcgcttgtcttggcgccgcgacacagctggtcggtgcctttgatccgttccttccttttccagctgcagaggttacagagtcccgagccgtcgcgcgcgcgaaagcagaggagcggcaatggcggtggccgcgcggctcggcgccgtcttggcgtgcgtcatcttggcggccgtggcggtggcgccgcggccggtggcggggatcctcgacccggtcgacttcctcgcgctgcaggcggtgcggcggtcgctggacgacatgcccgggtccgcgttcttcgacgggtgggacttcaccgccgacccgtgcgggttccccggtgtgttctgcgacgcaccgggtggtggcgctcgcgctcggcgacccgcgggcggggtctccggggctgacggggaggctggacccagcgctgggccggctgtccgcgctcaccgagctctcgctcgtgcccgggcgcgtcgagggggagctcccggcgtcgctggcgtcgtgctcgaacctccgcttcctggccgtcagcaagaacctcctctccggccagatacctgacggcttcagcgcgctgtccaacctgcggacgctcgacgccagcttcaaccagatctccggcaccatcccgccgtccatcgccgcgctgccgtcgatcaccaacctcatcctctgccacaaccagcttaccggcggcgttccatcgttcctggactcgtccccgctcctgcggctggatctcaagcacaacgcgctctccggcggcgtgcctaccctgccggccgggctgcagtacctgtcgctgtccgcgaacaagctcaccggcacggtcgatcaggtgctgcccgggctgtcccggctcaacttcctcgacctcagcatgaaccagcttgagggcccgatcccggcgtcggtgctctcgctgccgctgtccgtgctgcagttgcagcgcaacttcttctcagggccggtgcagccgtcgaacgacgtgacgatcccggtggtggacctgagctacaacaggttctggggccagctctcgccactgctggcgggcgtcgggcagctgtaccttaacaacaaccggttcaccggcgaggtccccgcgcggctggtgcaggagctggtgggctccggcggcctgcaggtgctgtacctgcagcacaacttcctgacgggcatcgcgatatcgccgtcatcgtcgctcccctccaccgtctcgctctgcctgatgtacaactgcatggtgccgccggtgtacgcgccgtgcccgatcaaggccgggtcgcagaacacgcggccggcggaccagtgcccggagtggaggggctgagcctgatgtcggggtgagcttgatcgtgtctcagcaacgccagtgccaatgccggatcgcctccgatcaccggttgggaatagcgggaaagcagaactgaaggtcaatgattctttgattgatttgggtatagttacaggcaagtaagtgccttaataatccggatttacaggtgtgtgtttttgtttagttggtgtatgtgcgtttgtgtatctctgtgctgtatagtgagcagtactccctcccggagcttctatcgcactgccgcatgatgacgctgtttgcatctgatgatggatggtgttagtaagaggcagtgaagttattatttatcgaatcatgtcgctg

SEQ ID NO: 10398 - protein, 492 aa, Zea mays subsp. mays
  peptide (1)..(492): Ceres Seq. ID no. 12372213
  misc_feature (141)..(492): Homolog of NCBI NO: 25406734 NR Description: protein F21B7.6 [imported] - Arabidopsis thaliana F21B7.6 [Arabidopsis thaliana]
  misc_feature (141)..(492): Homolog of NCBI NO: 30678566 NR Description: leucine rich repeat protein family [Arabidopsis
  misc_feature (150)..(492): Homolog of NCBI NO: 15236232 NR Description: leucine rich repeat protein family; protein id:
  misc_feature (138)..(487): Homolog of NCBI NO: 15229088 NR Description: leucine rich repeat protein family; protein id:
  misc_feature (195)..(468): Homolog of NCBI NO: 18390097 NR Description: putative receptor protein kinase [Sorghum bicolor]
  misc_feature (137)..(487): Homolog of NCBI NO: 15231699 NR Description: leucine rich repeat protein family; protein id:
  misc_feature (148)..(470): Homolog of NCBI NO: 34898088 NR Description: ESTs C22657(S0014),C22656(S0014) correspond to a of the predicted gene.~Similar to receptor protein kinase, ERECTA
  misc_feature (162)..(468): Homolog of NCBI NO: 15241760 NR Description: putative protein; protein id: At5g62230.1
  misc_feature (162)..(468): Homolog of NCBI NO: 15225286 NR Description: putative receptor-like protein kinase, ERECTA; id: At2g26330.1, supported by cDNA: gi_1345131, supported by
  misc_feature (181)..(463): Homolog of NCBI NO: 15528705 NR Description: putative receptor protein kinase [Oryza sativa
SISPLLTSSPHGGSHVQRQAARQRPAPSRRATPRRAPLKRAHDKLKGSHAAARACLGAATQLVGAFDPFLPFPAAEVTESRAVARAKAEERQWRWPRGSAPSWRASSWRPWRWRRGRWRGSSTRSTSSRCRRCGGRWTTCPGPRSSTGGTSPPTRAGSPVCSATHRVVALALGDPRAGSPGLTGRLDPALGRLSALTELSLVPGRVEGELPASLASCSNLRFLAVSKNLLSGQIPDGFSALSNLRTLDASFNQISGTIPPSIAALPSITNLILCHNQLTGGVPSFLDSSPLLRLDLKHNALSGGVPTLPAGLQYLSLSANKLTGTVDQVLPGLSRLNFLDLSMNQLEGPIPASVLSLPLSVLQLQRNFFSGPVQPSNDVTIPVVDLSYNRFWGQLSPLLAGVGQLYLNNNRFTGEVPARLVQELVGSGGLQVLYLQHNFLTGIAISPSSSLPSTVSLCLMYNCMVPPVYAPCPIKAGSQNTRPADQCPEWRG

SEQ ID NO: 10399 - DNA, 958 bp, Zea mays subsp. mays
  misc_feature (1)..(958): Ceres Seq. ID no. 12340928
  misc_feature: MA Experiment ID: 108528 Result: Up-regulated in Transcription
  misc_feature: MA Experiment 108528 PARAMETER Experiment Name: Zm_Imbibed_Seeds_P Parameter: Age (day) Value: 5 vs. 2
  misc_feature: MA Experiment 108528 PARAMETER Experiment Name: Zm_Imbibed_Seeds_P Parameter: Organism Value: Zea mays
  misc_feature: MA Experiment 108528 PARAMETER Experiment Name: Zm_Imbibed_Seeds_P Parameter: Plant Line Value: 35A19
  misc_feature: MA Experiment 108528 PARAMETER Experiment Name: Zm_Imbibed_Seeds_P Parameter: Tissue Value: Aerial vs. Embryo
  misc_feature: MA Experiment ID: 108530 Result: Up-regulated in Transcription
  misc_feature: MA Experiment 108530 PARAMETER Experiment Name: Zm_Imbibed_Seeds_P Parameter: Age (day) Value: 6 vs. 2
  misc_feature: MA Experiment 108530 PARAMETER Experiment Name: Zm_Imbibed_Seeds_P Parameter: Organism Value: Zea mays
  misc_feature: MA Experiment 108530 PARAMETER Experiment Name: Zm_Imbibed_Seeds_P Parameter: Plant Line Value: 35A19
  misc_feature: MA Experiment 108530 PARAMETER Experiment Name: Zm_Imbibed_Seeds_P Parameter: Tissue Value: Aerial vs. Embryo
  misc_feature: MA Experiment ID: 108535 Result: Down-regulated in Transcription
  misc_feature: MA Experiment 108535 PARAMETER Experiment Name: Zm_Meristem_P Parameter: Age (day) Value: 8
  misc_feature: MA Experiment 108535 PARAMETER Experiment Name: Zm_Meristem_P Parameter: Organism Value: Zea mays
  misc_feature: MA Experiment 108535 PARAMETER Experiment Name: Zm_Meristem_P Parameter: Plant Line Value: 35A19
  misc_feature: MA Experiment 108535 PARAMETER Experiment Name: Zm_Meristem_P Parameter: Tissue Value: Root Meristem vs. Above Root Meristem
  misc_feature: MA Experiment ID: 108543 Result: Down-regulated in Transcription
  misc_feature: MA Experiment ID: 108544 Result: Down-regulated in Transcription
  misc_feature: MA Experiment ID: 108547 Result: Up-regulated in Transcription
  misc_feature: MA Experiment 108547 PARAMETER Experiment Name: Zm_Imbibed_Seeds_P Parameter: Age (day) Value: 4 vs. 2
  misc_feature: MA Experiment 108547 PARAMETER Experiment Name: Zm_Imbibed_Seeds_P Parameter: Organism Value: Zea mays
  misc_feature: MA Experiment 108547 PARAMETER Experiment Name: Zm_Imbibed_Seeds_P Parameter: Plant Line Value: 35A19
  misc_feature: MA Experiment 108547 PARAMETER Experiment Name: Zm_Imbibed_Seeds_P Parameter: Tissue Value: Aerial vs. Embryo
aacaagcatcagagctcggtgtcacaaaacctgaccgatggcggcccggtgctccacagctgcctccgtggtcagaacaggatcgcgagacctctccccctccttttccttcacagccgcggcgctcccctcggcgcgtctgaggccggtaggagcgtgggtccgcggtggagggtacacctgcaggctccgcgccgtctgcgccatgggctccgcgccgtcgtcgtcccaatccccgtcgccgcacacgccttcaggacaaacccaagggaaagcagattataaatcactgagtgaagaggagtggaagaagcgcctgactgaagagcagtattatgttactcggcagaagggcactgaaagagcattcactggggaatactggaatactaaaaccccaggcatttatcagtgtgtctgctgcgacacccctctgtttcagtcatcaaccaaatttgatagtggtactgggtggccatcctattataaaccaattggtgaaaatgtcaagagcaagcttgatatgtcaatcatttttatgccccggaccgaggtgctctgtgcaacctgtgatgctcatctggggcatgtcttcgatgacgggccaccaccaacagggaagagatactgtatcaatagtgcatctctgaaattgaagccccaatagttgctggatactttagcaagaagtcaactataacgctggtccgccctatgtaaacttcggggttatgtatataaactactcgagttgtagcatatttattattctctttgttatgtaatatatgtgttcacaaaccgatgaaagtatgaaacaaacagccgctacttcactctggtattctggtctagaattaaggtgttgtttggttgacgaattgtaacgtaaatggcaacggtaatggtttgcactcgagtgacagttgacaacggtaataaatttaaatagatcttt

SEQ ID NO: 10400 - protein, 209 aa, Zea mays subsp. mays
  peptide (1)..(209): Ceres Seq. ID no. 12340929
  misc_feature (87)..(206): Pfam Name: SelR domain Pfam Description: SelR domain
  misc_feature (86)..(208): Homolog of NCBI NO: 33597872 NR Description: peptide methionine sulfoxide reductase parapertussis] >gi|33602775|ref|NP_890335.1| peptide methionine reductase [Bordetella bronchiseptica]
  misc_feature (86)..(208): Homolog of NCBI NO: 33594433 NR Description: peptide methionine sulfoxide reductase pertussis] >gi|33564508|emb|CAE43823.1| peptide methionine
  misc_feature (86)..(209): Homolog of NCBI NO: 37523908 NR Description: hypothetical protein glr4339 [Gloeobacter
  misc_feature (62)..(206): Homolog of NCBI NO: 21593253 NR Description: transcriptional regulator, putative [Arabidopsis >gi|26449723|dbj|BAC41985.1| putative transcriptional regulator
  misc_feature (86)..(209): Homolog of NCBI NO: 37523588 NR Description: hypothetical protein gll4019 [Gloeobacter
  misc_feature (86)..(205): Homolog of NCBI NO: 23040381 NR Description: hypothetical protein [Trichodesmium erythraeum
  misc_feature (86)..(209): Homolog of NCBI NO: 22298757 NR Description: ORF_ID:tlr1214~hypothetical protein
  misc_feature (53)..(206): Homolog of NCBI NO: 30695559 NR Description: transcriptional regulator -related [Arabidopsis
  misc_feature (83)..(209): Homolog of NCBI NO: 23103339 NR Description: hypothetical protein [Azotobacter vinelandii]
  misc_feature (88)..(209): Homolog of NCBI NO: 23472103 NR Description: hypothetical protein [Pseudomonas syringae pv.
MAARCSTAASVVRTGSRDLSPSFSFTAAALPSARLRPVGAWVRGGGYTCRLRAVCAMGSAPSSSQSPSPHTPSGQTQGKADYKSLSEEEWKKRLTEEQYYVTRQKGTERAFTGEYWNTKTPGIYQCVCCDTPLFQSSTKFDSGTGWPSYYKPIGENVKSKLDMSIIFMPRTEVLCATCDAHLGHVFDDGPPPTGKRYCINSASLKLKPQ

SEQ ID NO: 10401 - protein, 153 aa, Zea mays subsp. mays
  peptide (1)..(153): Ceres Seq. ID no. 12340930
  misc_feature (31)..(150): Pfam Name: SelR domain Pfam Description: SelR domain
  misc_feature (1)..(150): Homolog of NCBI NO: 30695559 NR Description: transcriptional regulator -related [Arabidopsis
  misc_feature (6)..(150): Homolog of NCBI NO: 21593253 NR Description: transcriptional regulator, putative [Arabidopsis >gi|26449723|dbj|BAC41985.1| putative transcriptional regulator
  misc_feature (30)..(153): Homolog of NCBI NO: 22298757 NR Description: ORF_ID:tlr1214~hypothetical protein
  misc_feature (30)..(153): Homolog of NCBI NO: 37523588 NR Description: hypothetical protein gll4019 [Gloeobacter
  misc_feature (30)..(149): Homolog of NCBI NO: 23040381 NR Description: hypothetical protein [Trichodesmium erythraeum
  misc_feature (30)..(152): Homolog of NCBI NO: 33597872 NR Description: peptide methionine sulfoxide reductase parapertussis] >gi|33602775|ref|NP_890335.1| peptide methionine reductase [Bordetella bronchiseptica]
  misc_feature (30)..(152): Homolog of NCBI NO: 33594433 NR Description: peptide methionine sulfoxide reductase pertussis] >gi|33564508|emb|CAE43823.1| peptide methionine
  misc_feature (30)..(153): Homolog of NCBI NO: 37523908 NR Description: hypothetical protein glr4339 [Gloeobacter
  misc_feature (27)..(153): Homolog of NCBI NO: 23103339 NR Description: hypothetical protein [Azotobacter vinelandii]
  misc_feature (32)..(153): Homolog of NCBI NO: 23472103 NR Description: hypothetical protein [Pseudomonas syringae pv.
MGSAPSSSQSPSPHTPSGQTQGKADYKSLSEEEWKKRLTEEQYYVTRQKGTERAFTGEYWNTKTPGIYQCVCCDTPLFQSSTKFDSGTGWPSYYKPIGENVKSKLDMSIIFMPRTEVLCATCDAHLGHVFDDGPPPTGKRYCINSASLKLKPQ

SEQ ID NO: 10402 - protein, 104 aa, Zea mays subsp. mays
  peptide (1)..(104): Ceres Seq. ID no. 12340931
MLLGRRALKEHSLGNTGILKPQAFISVSAATPLCFSHQPNLIVVLGGHPIINQLVKMSRASLICQSFLCPGPRCSVQPVMLIWGMSSMTGHHQQGRDTVSIVHL

SEQ ID NO: 10403 - DNA, 1199 bp, Zea mays subsp. mays
  misc_feature (1)..(1199): Ceres Seq. ID no. 12355415
  misc_feature: MA Experiment ID: 108522 Result: Down-regulated in Transcription
  misc_feature: MA Experiment 108522 PARAMETER Experiment Name: Zm_42deg_Heat_P Parameter: Age (day) Value: 8
  misc_feature: MA Experiment 108522 PARAMETER Experiment Name: Zm_42deg_Heat_P Parameter: Organism Value: Zea mays
  misc_feature: MA Experiment 108522 PARAMETER Experiment Name: Zm_42deg_Heat_P Parameter: Plant Line Value: 35A19
  misc_feature: MA Experiment 108522 PARAMETER Experiment Name: Zm_42deg_Heat_P Parameter: Temperature (deg C) Value: 42 vs. 22
  misc_feature: MA Experiment 108522 PARAMETER Experiment Name: Zm_42deg_Heat_P Parameter: Timepoint (hr) Value: 1
  misc_feature: MA Experiment 108522 PARAMETER Experiment Name: Zm_42deg_Heat_P Parameter: Tissue Value: Aerial
  misc_feature: MA Experiment ID: 108527 Result: Down-regulated in Transcription
  misc_feature: MA Experiment 108527 PARAMETER Experiment Name: Zm_5mM_NO_P Parameter: Age (day) Value: 8
  misc_feature: MA Experiment 108527 PARAMETER Experiment Name: Zm_5mM_NO_P Parameter: Organism Value: Zea mays
  misc_feature: MA Experiment 108527 PARAMETER Experiment Name: Zm_5mM_NO_P Parameter: Plant Line Value: 35A19
  misc_feature: MA Experiment 108527 PARAMETER Experiment Name: Zm_5mM_NO_P Parameter: Timepoint (hr) Value: 6
  misc_feature: MA Experiment 108527 PARAMETER Experiment Name: Zm_5mM_NO_P Parameter: Tissue Value: Aerial
  misc_feature: MA Experiment 108527 PARAMETER Experiment Name: Zm_5mM_NO_P Parameter: Treatment Value: 5mM NO vs. No Treatment
  misc_feature: MA Experiment ID: 108529 Result: Up-regulated in Transcription
  misc_feature: MA Experiment 108529 PARAMETER Experiment Name: Zm_Imbibed_Seeds_P Parameter: Age (day) Value: 5 vs. 2
  misc_feature: MA Experiment 108529 PARAMETER Experiment Name: Zm_Imbibed_Seeds_P Parameter: Organism Value: Zea mays
  misc_feature: MA Experiment 108529 PARAMETER Experiment Name: Zm_Imbibed_Seeds_P Parameter: Plant Line Value: 35A19
  misc_feature: MA Experiment 108529 PARAMETER Experiment Name: Zm_Imbibed_Seeds_P Parameter: Tissue Value: Roots vs. Embryo
  misc_feature: MA Experiment ID: 108535 Result: Down-regulated in Transcription
  misc_feature: MA Experiment 108535 PARAMETER Experiment Name: Zm_Meristem_P Parameter: Age (day) Value: 8
  misc_feature: MA Experiment 108535 PARAMETER Experiment Name: Zm_Meristem_P Parameter: Organism Value: Zea mays
  misc_feature: MA Experiment 108535 PARAMETER Experiment Name: Zm_Meristem_P Parameter: Plant Line Value: 35A19
  misc_feature: MA Experiment 108535 PARAMETER Experiment Name: Zm_Meristem_P Parameter: Tissue Value: Root Meristem vs. Above Root Meristem
  misc_feature: MA Experiment ID: 108543 Result: Up-regulated in Transcription
  misc_feature: MA Experiment ID: 108556 Result: Down-regulated in Transcription
  misc_feature: MA Experiment 108556 PARAMETER Experiment Name: Zm_Drought_P Parameter: Age (day) Value: 9
  misc_feature: MA Experiment 108556 PARAMETER Experiment Name: Zm_Drought_P Parameter: Organism Value: Zea mays
  misc_feature: MA Experiment 108556 PARAMETER Experiment Name: Zm_Drought_P Parameter: Plant Line Value: 35A19
  misc_feature: MA Experiment 108556 PARAMETER Experiment Name: Zm_Drought_P Parameter: Timepoint (hr) Value: 24
  misc_feature: MA Experiment 108556 PARAMETER Experiment Name: Zm_Drought_P Parameter: Tissue Value: Aerial
  misc_feature: MA Experiment 108556 PARAMETER Experiment Name: Zm_Drought_P Parameter: Treatment Value: Drought vs. No Drought
  misc_feature: MA Experiment ID: 20000477 Result: Down-regulated in Transcription
  misc_feature: MA Experiment 20000477 PARAMETER Experiment Name: Zm_5mM_SA_P Parameter: Age (day) Value: 10
  misc_feature: MA Experiment 20000477 PARAMETER Experiment Name: Zm_5mM_SA_P Parameter: Organism Value: Zea mays
  misc_feature: MA Experiment 20000477 PARAMETER Experiment Name: Zm_5mM_SA_P Parameter: Plant Line Value: 35A19
  misc_feature: MA Experiment 20000477 PARAMETER Experiment Name: Zm_5mM_SA_P Parameter: Timepoint (hr) Value: 48
  misc_feature: MA Experiment 20000477 PARAMETER Experiment Name: Zm_5mM_SA_P Parameter: Tissue Value: Aerial
  misc_feature: MA Experiment 20000477 PARAMETER Experiment Name: Zm_5mM_SA_P Parameter: Treatment Value: 5mM SA vs. No Treatment
  misc_feature: MA Experiment ID: 20000478 Result: Down-regulated in Transcription
  misc_feature: MA Experiment 20000478 PARAMETER Experiment Name: Zm_5mM_SA_P Parameter: Age (day) Value: 11
  misc_feature: MA Experiment 20000478 PARAMETER Experiment Name: Zm_5mM_SA_P Parameter: Organism Value: Zea mays
  misc_feature: MA Experiment 20000478 PARAMETER Experiment Name: Zm_5mM_SA_P Parameter: Plant Line Value: 35A19
  misc_feature: MA Experiment 20000478 PARAMETER Experiment Name: Zm_5mM_SA_P Parameter: Timepoint (hr) Value: 72
  misc_feature: MA Experiment 20000478 PARAMETER Experiment Name: Zm_5mM_SA_P Parameter: Tissue Value: Aerial
  misc_feature: MA Experiment 20000478 PARAMETER Experiment Name: Zm_5mM_SA_P Parameter: Treatment Value: 5mM SA vs. No Treatment
  misc_feature: MA Experiment ID: 20000479 Result: Down-regulated in Transcription
  misc_feature: MA Experiment 20000479 PARAMETER Experiment Name: Zm_Drought_P Parameter: Age (day) Value: 10
  misc_feature: MA Experiment 20000479 PARAMETER Experiment Name: Zm_Drought_P Parameter: Organism Value: Zea mays
  misc_feature: MA Experiment 20000479 PARAMETER Experiment Name: Zm_Drought_P Parameter: Plant Line Value: 35A19
  misc_feature: MA Experiment 20000479 PARAMETER Experiment Name: Zm_Drought_P Parameter: Timepoint (hr) Value: 48
  misc_feature: MA Experiment 20000479 PARAMETER Experiment Name: Zm_Drought_P Parameter: Tissue Value: Aerial
  misc_feature: MA Experiment 20000479 PARAMETER Experiment Name: Zm_Drought_P Parameter: Treatment Value: Drought vs. No Drought
  misc_feature: MA Experiment ID: 20000480 Result: Down-regulated in Transcription
  misc_feature: MA Experiment 20000480 PARAMETER Experiment Name: Zm_Drought_P Parameter: Age (day) Value: 11
  misc_feature: MA Experiment 20000480 PARAMETER Experiment Name: Zm_Drought_P Parameter: Organism Value: Zea mays
  misc_feature: MA Experiment 20000480 PARAMETER Experiment Name: Zm_Drought_P Parameter: Plant Line Value: 35A19
  misc_feature: MA Experiment 20000480 PARAMETER Experiment Name: Zm_Drought_P Parameter: Timepoint (hr) Value: 72
  misc_feature: MA Experiment 20000480 PARAMETER Experiment Name: Zm_Drought_P Parameter: Tissue Value: Aerial
  misc_feature: MA Experiment 20000480 PARAMETER Experiment Name: Zm_Drought_P Parameter: Treatment Value: Drought vs. No Drought
  misc_feature: MA Experiment ID: 20000535 Result: Down-regulated in Transcription
  misc_feature: MA Experiment 20000535 PARAMETER Experiment Name: Zm_Hybrid_Seed_Dev_P Parameter: DAP Value: 30 vs. 12
  misc_feature: MA Experiment 20000535 PARAMETER Experiment Name: Zm_Hybrid_Seed_Dev_P Parameter: Organism Value: Zea mays
  misc_feature: MA Experiment 20000535 PARAMETER Experiment Name: Zm_Hybrid_Seed_Dev_P Parameter: Plant Line Value: 35A19
  misc_feature: MA Experiment 20000535 PARAMETER Experiment Name: Zm_Hybrid_Seed_Dev_P Parameter: Tissue Value: Embryo vs. Unfert Floret
  misc_feature: MA Experiment ID: 20000626 Result: Down-regulated in Transcription
  misc_feature: MA Experiment 20000626 PARAMETER Experiment Name: Zm_Herbicide-Treatments_P Parameter: Timepoint (hr) Value: 12
  misc_feature: MA Experiment 20000626 PARAMETER Experiment Name: Zm_Herbicide-Treatments_P Parameter: Tissue Value: Aerial
  misc_feature: MA Experiment 20000626 PARAMETER Experiment Name: Zm_Herbicide-Treatments_P Parameter: Treatment Value: Roundup vs. No Treatment
  misc_feature: MA Experiment ID: 20000630 Result: Down-regulated in Transcription
  misc_feature: MA Experiment 20000630 PARAMETER Experiment Name: Zm_Herbicide-Treatments_P Parameter: Timepoint (hr) Value: 4
  misc_feature: MA Experiment 20000630 PARAMETER Experiment Name: Zm_Herbicide-Treatments_P Parameter: Tissue Value: Aerial
  misc_feature: MA Experiment 20000630 PARAMETER Experiment Name: Zm_Herbicide-Treatments_P Parameter: Treatment Value: Roundup vs. No Treatment
aacaaaactcgtcagtagctgagtagccactgtgctcttgagaaggatgacgagccccatgcacgcgcggaaggctaagctcaagacccacttcatctccgccaaagcgaagctcaagcacaacgtcaccccgcgtcgcgtcgtcctgctggctgccgccgctacctccgccttcctcctcctattcaccctccgcaccctccactctgccgcgtcacgcagcgccagagcaagcgccgctgccaccgttgccgctgccattgcctccacgtctccagcgtccgtcgccgccgaccacgccgaccagctggagcagcaccaccatcaagagtgcgccaaggtgccgtcgtccgtcgcagaggcgctggtccactacgcgacgtccaacgagacgccgcaccagacggtggcggaggccggggccgccgcgcgcgtgctggcgcggcgtgcgccgtgtagcctcctggtgctggggctgggacccgacagcgcgctctgggcggcactcaaccacggcggccgcacgctcttcctcgaggcggacgccggccggatcgcctcggcccgcgccgcgcactcggccgggatcgacctccaggcccancnngtcgctctccaacaagaggccatgacgccgtccgacgatctcctggctctccgcaactnnnccgactgcgctgcctccccgccgaaacctctcaccgtggaccacctagagcaatctccgtgcacgctggcgccgcgcgggctaccggaaacgttctacgaggcggagtgggacgtgatcatggtgaacgccccggtgcctggagcgatctacacggccgcggtggcggctagggcgcggcgcccggggactggggaaaccgacgtgctggtccacggcgtggatgacactaccgaggagagcttcgccagggcattcttgtgtgagccgtacctgaaagaggaagctagcaggctccggcacttctccattcctagccacatggacaaggacgccatgccattttgcccattaatacgctaatgatataattgctatactgaataatcactcgtagatttaatctgaagttcatactttttttttctgttctggtgaaacagcatttgacactgtgatttctgtattttgtgatttggtgtttagattttgctcattttatcggtgtttgtgtataataattcactactgg

SEQ ID NO: 10404 - protein, 327 aa, Zea mays subsp. mays
  peptide (1)..(327): Ceres Seq. ID no. 12355416
  misc_feature (94)..(323): Pfam Name: Protein of unknown function (DUF579) Pfam Description: Protein of unknown function (DUF579)
  misc_feature (70)..(324): Homolog of NCBI NO: 15234881 NR Description: putative protein; protein id: At4g09990.1
  misc_feature (94)..(325): Homolog of NCBI NO: 18398986 NR Description: expressed protein; protein id: At1g33800.1, by cDNA: 114466., supported by cDNA: gi_17979548, supported by gi_20453344 [Arabidopsis thaliana] >gi|25354651|pir||E86461
  misc_feature (96)..(324): Homolog of NCBI NO: 15217566 NR Description: unknown protein; protein id: At1g09610.1
  misc_feature (96)..(324): Homolog of NCBI NO: 25402555 NR Description: hypothetical protein [imported] - Arabidopsis >gi|3482933|gb|AAC33218.1| Similar to cdc2 protein kinases
  misc_feature (94)..(324): Homolog of NCBI NO: 18409879 NR Description: hypothetical protein; protein id: At1g71690.1
  misc_feature (94)..(324): Homolog of NCBI NO: 25354648 NR Description: hypothetical protein F14O23.3 [imported] - thaliana >gi|7239492|gb|AAF43218.1|AC012654_2 EST gb|AI999169
  misc_feature (105)..(323): Homolog of NCBI NO: 15220402 NR Description: unknown protein; protein id: At1g67330.1 thaliana] >gi|9828617|gb|AAG00240.1|AC002130_5 F1N21.15
  misc_feature (105)..(312): Homolog of NCBI NO: 21537399 NR Description: unknown [Arabidopsis thaliana]
  misc_feature (105)..(312): Homolog of NCBI NO: 18396558 NR Description: expressed protein; protein id: At1g27930.1, by cDNA: 1367., supported by cDNA: gi_15215712 [Arabidopsis
  misc_feature (14)..(323): Homolog of NCBI NO: 15229700 NR Description: putative protein; protein id: At3g50220.1, by cDNA: 35440. [Arabidopsis thaliana] >gi|11282604|pir||T45568
  misc_feature (186)..(186): Xaa is any aa, unknown or other
  misc_feature (187)..(187): Xaa is any aa, unknown or other
  misc_feature (207)..(207): Xaa is any aa, unknown or other
  misc_feature (208)..(208): Xaa is any aa, unknown or other
MTSPMHARKAKLKTHFISAKAKLKHNVTPRRVVLLAAAATSAFLLLFTLRTLHSAASRSARASAAATVAAAIASTSPASVAADHADQLEQHHHQECAKVPSSVAEALVHYATSNETPHQTVAEAGAAARVLARRAPCSLLVLGLGPDSALWAALNHGGRTLFLEADAGRIASARAAHSAGIDLQAXXVALQQEAMTPSDDLLALRNXXDCAASPPKPLTVDHLEQSPCTLAPRGLPETFYEAEWDVIMVNAPVPGAIYTAAVAARARRPGTGETDVLVHGVDDTTEESFARAFLCEPYLKEEASRLRHFSIPSHMDKDAMPFCPLIR

SEQ ID NO: 10405 - protein, 323 aa, Zea mays subsp. mays
  peptide (1)..(323): Ceres Seq. ID no. 12355417
  misc_feature (90)..(319): Pfam Name: Protein of unknown function (DUF579) Pfam Description: Protein of unknown function (DUF579)
  misc_feature (66)..(320): Homolog of NCBI NO: 15234881 NR Description: putative protein; protein id: At4g09990.1
  misc_feature (90)..(321): Homolog of NCBI NO: 18398986 NR Description: expressed protein; protein id: At1g33800.1, by cDNA: 114466., supported by cDNA: gi_17979548, supported by gi_20453344 [Arabidopsis thaliana] >gi|25354651|pir||E86461
  misc_feature (92)..(320): Homolog of NCBI NO: 15217566 NR Description: unknown protein; protein id: At1g09610.1
  misc_feature (92)..(320): Homolog of NCBI NO: 25402555 NR Description: hypothetical protein [imported] - Arabidopsis >gi|3482933|gb|AAC33218.1| Similar to cdc2 protein kinases
  misc_feature (90)..(320): Homolog of NCBI NO: 18409879 NR Description: hypothetical protein; protein id: At1g71690.1
  misc_feature (90)..(320): Homolog of NCBI NO: 25354648 NR Description: hypothetical protein F14O23.3 [imported] - thaliana >gi|7239492|gb|AAF43218.1|AC012654_2 EST gb|AI999169
  misc_feature (101)..(319): Homolog of NCBI NO: 15220402 NR Description: unknown protein; protein id: At1g67330.1 thaliana] >gi|9828617|gb|AAG00240.1|AC002130_5 F1N21.15
  misc_feature (101)..(308): Homolog of NCBI NO: 21537399 NR Description: unknown [Arabidopsis thaliana]
  misc_feature (101)..(308): Homolog of NCBI NO: 18396558 NR Description: expressed protein; protein id: At1g27930.1, by cDNA: 1367., supported by cDNA: gi_15215712 [Arabidopsis
  misc_feature (10)..(319): Homolog of NCBI NO: 15229700 NR Description: putative protein; protein id: At3g50220.1, by cDNA: 35440. [Arabidopsis thaliana] >gi|11282604|pir||T45568
  misc_feature (182)..(182): Xaa is any aa, unknown or other
  misc_feature (183)..(183): Xaa is any aa, unknown or other
  misc_feature (203)..(203): Xaa is any aa, unknown or other
  misc_feature (204)..(204): Xaa is any aa, unknown or other
MHARKAKLKTHFISAKAKLKHNVTPRRVVLLAAAATSAFLLLFTLRTLHSAASRSARASAAATVAAAIASTSPASVAADHADQLEQHHHQECAKVPSSVAEALVHYATSNETPHQTVAEAGAAARVLARRAPCSLLVLGLGPDSALWAALNHGGRTLFLEADAGRIASARAAHSAGIDLQAXXVALQQEAMTPSDDLLALRNXXDCAASPPKPLTVDHLEQSPCTLAPRGLPETFYEAEWDVIMVNAPVPGAIYTAAVAARARRPGTGETDVLVHGVDDTTEESFARAFLCEPYLKEEASRLRHFSIPSHMDKDAMPFCPLIR

SEQ ID NO: 10406 - DNA, 1349 bp, Zea mays subsp. mays
  misc_feature (1)..(1349): Ceres Seq. ID no. 12357275
  misc_feature: MA Experiment ID: 108527 Result: Down-regulated in Transcription
  misc_feature: MA Experiment 108527 PARAMETER Experiment Name: Zm_5mM_NO_P Parameter: Age (day) Value: 8
  misc_feature: MA Experiment 108527 PARAMETER Experiment Name: Zm_5mM_NO_P Parameter: Organism Value: Zea mays
  misc_feature: MA Experiment 108527 PARAMETER Experiment Name: Zm_5mM_NO_P Parameter: Plant Line Value: 35A19
  misc_feature: MA Experiment 108527 PARAMETER Experiment Name: Zm_5mM_NO_P Parameter: Timepoint (hr) Value: 6
  misc_feature: MA Experiment 108527 PARAMETER Experiment Name: Zm_5mM_NO_P Parameter: Tissue Value: Aerial
  misc_feature: MA Experiment 108527 PARAMETER Experiment Name: Zm_5mM_NO_P Parameter: Treatment Value: 5mM NO vs. No Treatment
  misc_feature: MA Experiment ID: 108544 Result: Up-regulated in Transcription
  misc_feature: MA Experiment ID: 20000477 Result: Down-regulated in Transcription
  misc_feature: MA Experiment 20000477 PARAMETER Experiment Name: Zm_5mM_SA_P Parameter: Age (day) Value: 10
  misc_feature: MA Experiment 20000477 PARAMETER Experiment Name: Zm_5mM_SA_P Parameter: Organism Value: Zea mays
  misc_feature: MA Experiment 20000477 PARAMETER Experiment Name: Zm_5mM_SA_P Parameter: Plant Line Value: 35A19
  misc_feature: MA Experiment 20000477 PARAMETER Experiment Name: Zm_5mM_SA_P Parameter: Timepoint (hr) Value: 48
  misc_feature: MA Experiment 20000477 PARAMETER Experiment Name: Zm_5mM_SA_P Parameter: Tissue Value: Aerial
  misc_feature: MA Experiment 20000477 PARAMETER Experiment Name: Zm_5mM_SA_P Parameter: Treatment Value: 5mM SA vs. No Treatment
cagaccccagacctttccccttccgtccccggccggcgccaacgccactccagtgagccgagggcggagacggtcacggtgggcagagtgacacgccgcacgcctctccgccccgctccgctccagattgcgcgcacccacccatggcgctcgccgcttcccaccacggcctcctgcccttcgcccccgctgccacgcctaccccgtcacgggggcacctgcgcttccgcgccgcgcgccctctgccccgccccgcccggagaatttgttgccaatctatcaactcagctaatgtgttgggagcttcttcaacgacatctgatgaggcagtcccagtcccagttgtccagatagatcaggactcagaccgtgatgcgaccattgtgcagctaagttttggagatcgtttgggggcactacttgacacgatgaaagcactccaaggaccttggccttgatgtcacaaaaggaagtgtgacaactgactcagctgtcacacaaacaaagttccacatcatgcgatttgggcgcaaggttgaggaccctgacatgttagaaaggattcggctaaccatcatcaacaaccttctccagtaccatcctgaatcaagtgagaagttagccatgggtgaattttttgggataaaacctcctgagaagaaggtagatgttgatattgcaacacatatagttgttgaagatgacggaccaaaaagaagcatactttacatagaaaccgccgaccggcctggcctacttcttgagataatcaagatcattgcggacacaaatattgatgtggaatcagctgagattgatactgaaggtttggttgcgaaggacaagtttcatgtaagttacagaggtggaaaactaaacagctccttatctcaggcgctgaccaattgcctgcgttattacctccgaaggcctgagacagatgaagacagctattgattgttgtgtttgtcgaaccttcctatagtgcattagaatcagaaactttggcttcagttccttcgctatgggccccttgtactgctgcaaatggagttttccattgtagctgataaagtgccgacaaggtgcatccatatgtgcataggtggcactgaatcggggctcactggaccagtttgatattgtagtaatatatatacagctgggagcaacataatttaggtttcgatcatcattatcccatttgattcctgttataagggatcacattggaaaaccctcacatgattgatgttgtctgtattctgtaagttggtgcaatccatttgcatgtaaaactcagctgcgtactgtggcgttctatgtagtggaataaataaaagagcatt

SEQ ID NO: 10407 - protein, 146 aa, Zea mays subsp. mays
  peptide (1)..(146): Ceres Seq. ID no. 12357276
  misc_feature (68)..(137): Pfam Name: ACT domain Pfam Description: ACT domain
  misc_feature (1)..(146): Homolog of NCBI NO: 15238305 NR Description: putative protein; protein id: At5g04740.1, by cDNA: 34592., supported by cDNA: gi_18252932 [Arabidopsis
  misc_feature (1)..(146): Homolog of NCBI NO: 21592963 NR Description: unknown [Arabidopsis thaliana]
  misc_feature (1)..(146): Homolog of NCBI NO: 18394414 NR Description: expressed protein; protein id: At1g16880.1, by cDNA: gi_14423501 [Arabidopsis thaliana]
MRFGRKVEDPDMLERIRLTIINNLLQYHPESSEKLAMGEFFGIKPPEKKVDVDIATHIVVEDDGPKRSILYIETADRPGLLLEIIKIIADTNIDVESAEIDTEGLVAKDKFHVSYRGGKLNSSLSQALTNCLRYYLRRPETDEDSY

SEQ ID NO: 10408 - protein, 135 aa, Zea mays subsp. mays
  peptide (1)..(135): Ceres Seq. ID no. 12357277
  misc_feature (57)..(126): Pfam Name: ACT domain Pfam Description: ACT domain
  misc_feature (1)..(135): Homolog of NCBI NO: 15238305 NR Description: putative protein; protein id: At5g04740.1, by cDNA: 34592., supported by cDNA: gi_18252932 [Arabidopsis
  misc_feature (1)..(135): Homolog of NCBI NO: 21592963 NR Description: unknown [Arabidopsis thaliana]
  misc_feature (1)..(135): Homolog of NCBI NO: 18394414 NR Description: expressed protein; protein id: At1g16880.1, by cDNA: gi_14423501 [Arabidopsis thaliana]
MLERIRLTIINNLLQYHPESSEKLAMGEFFGIKPPEKKVDVDIATHIVVEDDGPKRSILYIETADRPGLLLEIIKIIADTNIDVESAEIDTEGLVAKDKFHVSYRGGKLNSSLSQALTNCLRYYLRRPETDEDSY

SEQ ID NO: 10409 - protein, 117 aa, Zea mays subsp. mays
  peptide (1)..(117): Ceres Seq. ID no. 12357278
QTPDLSPSVPGRRQRHSSEPRAETVTVGRVTRRTPLRPAPLQIARTHPWRSPLPTTASCPSPPLPRLPRHGGTCASAPRALCPAPPGEFVANLSTQLMCWELLQRHLMRQSQSQLSR

SEQ ID NO: 10410 - DNA, 1124 bp, Zea mays subsp. mays
  misc_feature (1)..(1124): Ceres Seq. ID no. 12400892
  misc_feature: MA Experiment ID: 108689 Result: Up-regulated in Transcription
  misc_feature: MA Experiment 108689 PARAMETER Experiment Name: Zm_Drought_Roots_P Parameter: Age (day) Value: 9
  misc_feature: MA Experiment 108689 PARAMETER Experiment Name: Zm_Drought_Roots_P Parameter: Organism Value: Zea mays
  misc_feature: MA Experiment 108689 PARAMETER Experiment Name: Zm_Drought_Roots_P Parameter: Plant Line Value: 35A19
  misc_feature: MA Experiment 108689 PARAMETER Experiment Name: Zm_Drought_Roots_P Parameter: Timepoint (hr) Value: 24
  misc_feature: MA Experiment 108689 PARAMETER Experiment Name: Zm_Drought_Roots_P Parameter: Tissue Value: Roots
  misc_feature: MA Experiment 108689 PARAMETER Experiment Name: Zm_Drought_Roots_P Parameter: Treatment Value: Drought vs. No Drought
aaaaaaacaaattagatagagctcgccgagcaagcaagcaagccaactcggccgtccgaacgaaagcgaagcgcggccaaactcactcgctaaacgctcccgttctcctccgcctgcccccaccggctccccttgtacacgagcgccggagacgccatggcggcggcgcagccgaagccggccaagaggctgggcggcatggcggaggcgctcgccatcgccgccgacctcggattccccgcctctaccacgcaggaagatcagactagctccgacaaaagcgatgatttggtgaaggttttgagggaactgactgtcgtgcagaggaacattgccaacttgcaagtggagctacagggaagaaaggatgataaaaacattgctcatttgactcatgtgagtgagatggaaaagaagtgcgagtctttggccagaatgactgcaattttgaaagatgtaattcagaacaaggatcgtattattgctcggctgcaacagccttattcccttgactgcataccagttgaagctgaataccagaaacaattctcggagctacttctgaaagcagcaagtgactatggggcattgacagcatcagtcggcgatttccagtggagccaaaactttagggaatcaccagctgtctggggggaaatgctgcgaccgattcctgctgcacttgcttcctgcacccggttcttcgaggcaatgtctgcgatgagggaatccttttctactcttcagaaactacgcgttggccattcctctctgtcaataaccccaagtgactccagcgacgattcaaagttcttgacgccacctcagtggagagacggctcgatactcgatagctggaagcaaatggatgacatcaacctggagagcagtggaattgacgccatgaatcagaggaggttgtcttggccctccatcaagagggacccgtaggtcgcaggtcacccattggatttaggttcccatgttacataaataggattccaccttgtgtagttggcattgattctctgtatttttaatccgatcacctgcacccatttggcatgttcgacttgtgagagatggtctataagttccttaaatcaatgtcgtggcaaaatttg

SEQ ID NO: 10411 - protein, 264 aa, Zea mays subsp. mays
  peptide (1)..(264): Ceres Seq. ID no. 12400893
  misc_feature (1)..(263): Homolog of NCBI NO: 40253396 NR Description: unknown protein [Oryza sativa (japonica
  misc_feature (7)..(232): Homolog of NCBI NO: 18403146 NR Description: expressed protein; protein id: At2g32980.1, by cDNA: 38147., supported by cDNA: gi_16612287 [Arabidopsis >gi|16612288|gb|AAL27508.1|AF439838_1 At2g32980/T21L14.8
  misc_feature (7)..(232): Homolog of NCBI NO: 21593334 NR Description: unknown [Arabidopsis thaliana]
  misc_feature (70)..(232): Homolog of NCBI NO: 7452463 NR Description: hypothetical protein At2g32980 [imported] -
MAAAQPKPAKRLGGMAEALAIAADLGFPASTTQEDQTSSDKSDDLVKVLRELTVVQRNIANLQVELQGRKDDKNIAHLTHVSEMEKKCESLARMTAILKDVIQNKDRIIARLQQPYSLDCIPVEAEYQKQFSELLLKAASDYGALTASVGDFQWSQNFRESPAVWGEMLRPIPAALASCTRFFEAMSAMRESFSTLQKLRVGHSSLSITPSDSSDDSKFLTPPQWRDGSILDSWKQMDDINLESSGIDAMNQRRLSWPSIKRDP

SEQ ID NO: 10412 - protein, 250 aa, Zea mays subsp. mays
  peptide (1)..(250): Ceres Seq. ID no. 12400894
  misc_feature (1)..(249): Homolog of NCBI NO: 40253396 NR Description: unknown protein [Oryza sativa (japonica
  misc_feature (1)..(218): Homolog of NCBI NO: 18403146 NR Description: expressed protein; protein id: At2g32980.1, by cDNA: 38147., supported by cDNA: gi_16612287 [Arabidopsis >gi|16612288|gb|AAL27508.1|AF439838_1 At2g32980/T21L14.8
  misc_feature (1)..(218): Homolog of NCBI NO: 21593334 NR Description: unknown [Arabidopsis thaliana]
  misc_feature (56)..(218): Homolog of NCBI NO: 7452463 NR Description: hypothetical protein At2g32980 [imported] -
MAEALAIAADLGFPASTTQEDQTSSDKSDDLVKVLRELTVVQRNIANLQVELQGRKDDKNIAHLTHVSEMEKKCESLARMTAILKDVIQNKDRIIARLQQPYSLDCIPVEAEYQKQFSELLLKAASDYGALTASVGDFQWSQNFRESPAVWGEMLRPIPAALASCTRFFEAMSAMRESFSTLQKLRVGHSSLSITPSDSSDDSKFLTPPQWRDGSILDSWKQMDDINLESSGIDAMNQRRLSWPSIKRDP

SEQ ID NO: 10413 - protein, 181 aa, Zea mays subsp. mays
  peptide (1)..(181): Ceres Seq. ID no. 12400895
  misc_feature (1)..(180): Homolog of NCBI NO: 40253396 NR Description: unknown protein [Oryza sativa (japonica
  misc_feature (1)..(149): Homolog of NCBI NO: 18403146 NR Description: expressed protein; protein id: At2g32980.1, by cDNA: 38147., supported by cDNA: gi_16612287 [Arabidopsis >gi|16612288|gb|AAL27508.1|AF439838_1 At2g32980/T21L14.8
  misc_feature (1)..(149): Homolog of NCBI NO: 21593334 NR Description: unknown [Arabidopsis thaliana]
  misc_feature (1)..(149): Homolog of NCBI NO: 7452463 NR Description: hypothetical protein At2g32980 [imported] -
MEKKCESLARMTAILKDVIQNKDRIIARLQQPYSLDCIPVEAEYQKQFSELLLKAASDYGALTASVGDFQWSQNFRESPAVWGEMLRPIPAALASCTRFFEAMSAMRESFSTLQKLRVGHSSLSITPSDSSDDSKFLTPPQWRDGSILDSWKQMDDINLESSGIDAMNQRRLSWPSIKRDP

SEQ ID NO: 10414 - DNA, 1049 bp, Zea mays subsp. mays; identical to SEQ ID NO: 10272
  misc_feature (1)..(1049): Ceres Seq. ID no. 12345528
  misc_feature: MA Experiment ID: 108527 Result: Up-regulated in Transcription
  misc_feature: MA Experiment 108527 PARAMETER Experiment Name: Zm_5mM_NO_P Parameter: Age (day) Value: 8
  misc_feature: MA Experiment 108527 PARAMETER Experiment Name: Zm_5mM_NO_P Parameter: Organism Value: Zea mays
  misc_feature: MA Experiment 108527 PARAMETER Experiment Name: Zm_5mM_NO_P Parameter: Plant Line Value: 35A19
  misc_feature: MA Experiment 108527 PARAMETER Experiment Name: Zm_5mM_NO_P Parameter: Timepoint (hr) Value: 6
  misc_feature: MA Experiment 108527 PARAMETER Experiment Name: Zm_5mM_NO_P Parameter: Tissue Value: Aerial
  misc_feature: MA Experiment 108527 PARAMETER Experiment Name: Zm_5mM_NO_P Parameter: Treatment Value: 5mM NO vs. No Treatment
  misc_feature: MA Experiment ID: 108535 Result: Up-regulated in Transcription
  misc_feature: MA Experiment 108535 PARAMETER Experiment Name: Zm_Meristem_P Parameter: Age (day) Value: 8
  misc_feature: MA Experiment 108535 PARAMETER Experiment Name: Zm_Meristem_P Parameter: Organism Value: Zea mays
  misc_feature: MA Experiment 108535 PARAMETER Experiment Name: Zm_Meristem_P Parameter: Plant Line Value: 35A19
  misc_feature: MA Experiment 108535 PARAMETER Experiment Name: Zm_Meristem_P Parameter: Tissue Value: Root Meristem vs. Above Root Meristem
  misc_feature: MA Experiment ID: 108543 Result: Down-regulated in Transcription
  misc_feature: MA Experiment ID: 108544 Result: Down-regulated in Transcription
  misc_feature: MA Experiment ID: 108547 Result: Down-regulated in Transcription
  misc_feature: MA Experiment 108547 PARAMETER Experiment Name: Zm_Imbibed_Seeds_P Parameter: Age (day) Value: 4 vs. 2
  misc_feature: MA Experiment 108547 PARAMETER Experiment Name: Zm_Imbibed_Seeds_P Parameter: Organism Value: Zea mays
  misc_feature: MA Experiment 108547 PARAMETER Experiment Name: Zm_Imbibed_Seeds_P Parameter: Plant Line Value: 35A19
  misc_feature: MA Experiment 108547 PARAMETER Experiment Name: Zm_Imbibed_Seeds_P Parameter: Tissue Value: Aerial vs. Embryo
  misc_feature: MA Experiment ID: 20000487 Result: Up-regulated in Transcription
  misc_feature: MA Experiment 20000487 PARAMETER Experiment Name: Zm_50mM_NH4NO3_L_to_H_P Parameter: Organism Value: Zea mays
  misc_feature: MA Experiment 20000487 PARAMETER Experiment Name: Zm_50mM_NH4NO3_L_to_H_P Parameter: Timepoint (hr) Value: 4
  misc_feature: MA Experiment 20000487 PARAMETER Experiment Name: Zm_50mM_NH4NO3_L_to_H_P Parameter: Tissue Value: Leaves
  misc_feature: MA Experiment 20000487 PARAMETER Experiment Name: Zm_50mM_NH4NO3_L_to_H_P Parameter: Treatment Value: 50mM NH4NO3 vs. 100mM Mannitol
  misc_feature: MA Experiment ID: 20000488 Result: Up-regulated in Transcription
  misc_feature: MA Experiment 20000488 PARAMETER Experiment Name: Zm_50mM_NH4NO3_L_to_H_P Parameter: Organism Value: Zea mays
  misc_feature: MA Experiment 20000488 PARAMETER Experiment Name: Zm_50mM_NH4NO3_L_to_H_P Parameter: Timepoint (hr) Value: 8
  misc_feature: MA Experiment 20000488 PARAMETER Experiment Name: Zm_50mM_NH4NO3_L_to_H_P Parameter: Tissue Value: Leaves
  misc_feature: MA Experiment 20000488 PARAMETER Experiment Name: Zm_50mM_NH4NO3_L_to_H_P Parameter: Treatment Value: 50mM NH4NO3 vs. 100mM Mannitol
  misc_feature: MA Experiment ID: 20000626 Result: Up-regulated in Transcription
  misc_feature: MA Experiment 20000626 PARAMETER Experiment Name: Zm_Herbicide-Treatments_P Parameter: Timepoint (hr) Value: 12
  misc_feature: MA Experiment 20000626 PARAMETER Experiment Name: Zm_Herbicide-Treatments_P Parameter: Tissue Value: Aerial
  misc_feature: MA Experiment 20000626 PARAMETER Experiment Name: Zm_Herbicide-Treatments_P Parameter: Treatment Value: Roundup vs. No Treatment

SEQ ID NO: 10415 - protein, 192 aa, Zea mays subsp. mays; identical to SEQ ID NO: 10273
  peptide (1)..(192): Ceres Seq. ID no. 12345529
  misc_feature (54)..(185): Pfam Name: Tim17/Tim22/Tim23 family Pfam Description: Tim17/Tim22/Tim23 family
  misc_feature (54)..(185): Pfam Name: Tim17/Tim22/Tim23 family Pfam Description: Tim17/Tim22/Tim23 family
  misc_feature (54)..(185): Pfam Name: Tim17/Tim22/Tim23 family Pfam Description: Tim17/Tim22/Tim23 family
  misc_feature (54)..(185): Pfam Name: Tim17/Tim22/Tim23 family Pfam Description: Tim17/Tim22/Tim23 family
  misc_feature (1)..(192): Homolog of NCBI NO: 37536126 NR Description: putaive mitochondrial inner membrane protein
  misc_feature (1)..(189): Homolog of NCBI NO: 34902184 NR Description: Putative mitochondrial inner membrane protein
  misc_feature (11)..(191): Homolog of NCBI NO: 15218593 NR Description: inner mitochondrial membrane protein; protein id: supported by cDNA: 6793., supported by cDNA: gi_14596208, by cDNA: gi_18377493, supported by cDNA: gi_603055 [Arabidopsis
  misc_feature (11)..(191): Homolog of NCBI NO: 18394498 NR Description: inner mitochondrial membrane protein, putative; id: At1g17530.1, supported by cDNA: gi_13641345, supported by gi_15010569, supported by cDNA: gi_20147386 [Arabidopsis
  misc_feature (11)..(191): Homolog of NCBI NO: 13641346 NR Description: translocase of inner mitochondrial membrane TIM23
  misc_feature (1)..(189): Homolog of NCBI NO: 34902184 NR Description: Putative mitochondrial inner membrane protein
  misc_feature (11)..(191): Homolog of NCBI NO: 18394498 NR Description: inner mitochondrial membrane protein, putative; id: At1g17530.1, supported by cDNA: gi_13641345, supported by gi_15010569, supported by cDNA: gi_20147386 [Arabidopsis
  misc_feature (11)..(191): Homolog of NCBI NO: 15218593 NR Description: inner mitochondrial membrane protein; protein id: supported by cDNA: 6793., supported by cDNA: gi_14596208, by cDNA: gi_18377493, supported by cDNA: gi_603055 [Arabidopsis
  misc_feature (1)..(189): Homolog of NCBI NO: 34902184 NR Description: Putative mitochondrial inner membrane protein
  misc_feature (1)..(192): Homolog of NCBI NO: 37536126 NR Description: putaive mitochondrial inner membrane protein
  misc_feature (90)..(188): Homolog of NCBI NO: 34394286 NR Description: hypothetical protein [Oryza sativa (japonica
  misc_feature (127)..(189): Homolog of NCBI NO: 12039278 NR Description: putative inner mitochondrial membrane protein
  misc_feature (23)..(187): Homolog of NCBI NO: 19075496 NR Description: putative mitochondrial import inner membrane subunit [Schizosaccharomyces pombe] Probable mitochondrial import inner membrane translocase subunit
  misc_feature (8)..(99): Homolog of NCBI NO: 38344267 NR Description: OSJNBa0005N02.5 [Oryza sativa (japonica
  misc_feature (1)..(191): Homolog of NCBI NO: 15229350 NR Description: putative inner mitochondrial membrane protein; id: At3g04800.1 [Arabidopsis thaliana] putative inner mitochondrial membrane protein [Arabidopsis
  misc_feature (11)..(191): Homolog of NCBI NO: 13641346 NR Description: translocase of inner mitochondrial membrane TIM23
  misc_feature (90)..(188): Homolog of NCBI NO: 34394286 NR Description: hypothetical protein [Oryza sativa (japonica
  misc_feature (127)..(189): Homolog of NCBI NO: 12039278 NR Description: putative inner mitochondrial membrane protein
  misc_feature (23)..(187): Homolog of NCBI NO: 19075496 NR Description: putative mitochondrial import inner membrane subunit [Schizosaccharomyces pombe] Probable mitochondrial import inner membrane translocase subunit
  misc_feature (8)..(99): Homolog of NCBI NO: 38344267 NR Description: OSJNBa0005N02.5 [Oryza sativa (japonica
  misc_feature (1)..(191): Homolog of NCBI NO: 15229350 NR Description: putative inner mitochondrial membrane protein; id: At3g04800.1 [Arabidopsis thaliana] putative inner mitochondrial membrane protein [Arabidopsis
  misc_feature (11)..(191): Homolog of NCBI NO: 13641346 NR Description: translocase of inner mitochondrial membrane TIM23
  misc_feature (11)..(191): Homolog of NCBI NO: 18394498 NR Description: inner mitochondrial membrane protein, putative; id: At1g17530.1, supported by cDNA: gi_13641345, supported by gi_15010569, supported by cDNA: gi_20147386 [Arabidopsis
  misc_feature (11)..(191): Homolog of NCBI NO: 15218593 NR Description: inner mitochondrial membrane protein; protein id: supported by cDNA: 6793., supported by cDNA: gi_14596208, by cDNA: gi_18377493, supported by cDNA: gi_603055 [Arabidopsis
  misc_feature (1)..(189): Homolog of NCBI NO: 34902184 NR Description: Putative mitochondrial inner membrane protein
  misc_feature (1)..(192): Homolog of NCBI NO: 37536126 NR Description: putaive mitochondrial inner membrane protein
  misc_feature (90)..(188): Homolog of NCBI NO: 34394286 NR Description: hypothetical protein [Oryza sativa (japonica
  misc_feature (127)..(189): Homolog of NCBI NO: 12039278 NR Description: putative inner mitochondrial membrane protein
  misc_feature (23)..(187): Homolog of NCBI NO: 19075496 NR Description: putative mitochondrial import inner membrane subunit [Schizosaccharomyces pombe] Probable mitochondrial import inner membrane translocase subunit
  misc_feature (8)..(99): Homolog of NCBI NO: 38344267 NR Description: OSJNBa0005N02.5 [Oryza sativa (japonica
  misc_feature (1)..(191): Homolog of NCBI NO: 15229350 NR Description: putative inner mitochondrial membrane protein; id: At3g04800.1 [Arabidopsis thaliana] putative inner mitochondrial membrane protein [Arabidopsis
  misc_feature (11)..(191): Homolog of NCBI NO: 13641346 NR Description: translocase of inner mitochondrial membrane TIM23
  misc_feature (11)..(191): Homolog of NCBI NO: 18394498 NR Description: inner mitochondrial membrane protein, putative; id: At1g17530.1, supported by cDNA: gi_13641345, supported by gi_15010569, supported by cDNA: gi_20147386 [Arabidopsis
  misc_feature (11)..(191): Homolog of NCBI NO: 15218593 NR Description: inner mitochondrial membrane protein; protein id: supported by cDNA: 6793., supported by cDNA: gi_14596208, by cDNA: gi_18377493, supported by cDNA: gi_603055 [Arabidopsis
  misc_feature (1)..(192): Homolog of NCBI NO: 37536126 NR Description: putaive mitochondrial inner membrane protein
  misc_feature (1)..(191): Homolog of NCBI NO: 15229350 NR Description: putative inner mitochondrial membrane protein; id: At3g04800.1 [Arabidopsis thaliana] putative inner mitochondrial membrane protein [Arabidopsis
  misc_feature (8)..(99): Homolog of NCBI NO: 38344267 NR Description: OSJNBa0005N02.5 [Oryza sativa (japonica
  misc_feature (23)..(187): Homolog of NCBI NO: 19075496 NR Description: putative mitochondrial import inner membrane subunit [Schizosaccharomyces pombe] Probable mitochondrial import inner membrane translocase subunit
  misc_feature (127)..(189): Homolog of NCBI NO: 12039278 NR Description: putative inner mitochondrial membrane protein
  misc_feature (90)..(188): Homolog of NCBI NO: 34394286 NR Description: hypothetical protein [Oryza sativa (japonica

SEQ ID NO: 10416 - protein, 187 aa, Zea mays subsp. mays; identical to SEQ ID NO: 10274
  peptide (1)..(187): Ceres Seq. ID no. 12345530
  misc_feature (49)..(180): Pfam Name: Tim17/Tim22/Tim23 family Pfam Description: Tim17/Tim22/Tim23 family
  misc_feature (49)..(180): Pfam Name: Tim17/Tim22/Tim23 family Pfam Description: Tim17/Tim22/Tim23 family
  misc_feature (49)..(180): Pfam Name: Tim17/Tim22/Tim23 family Pfam Description: Tim17/Tim22/Tim23 family
  misc_feature (49)..(180): Pfam Name: Tim17/Tim22/Tim23 family Pfam Description: Tim17/Tim22/Tim23 family
  misc_feature (1)..(187): Homolog of NCBI NO: 37536126 NR Description: putaive mitochondrial inner membrane protein
  misc_feature (1)..(184): Homolog of NCBI NO: 34902184 NR Description: Putative mitochondrial inner membrane protein
  misc_feature (6)..(186): Homolog of NCBI NO: 15218593 NR Description: inner mitochondrial membrane protein; protein id: supported by cDNA: 6793., supported by cDNA: gi_14596208, by cDNA: gi_18377493, supported by cDNA: gi_603055 [Arabidopsis
  misc_feature (6)..(186): Homolog of NCBI NO: 18394498 NR Description: inner mitochondrial membrane protein, putative; id: At1g17530.1, supported by cDNA: gi_13641345, supported by gi_15010569, supported by cDNA: gi_20147386 [Arabidopsis
  misc_feature (6)..(186): Homolog of NCBI NO: 13641346 NR Description: translocase of inner mitochondrial membrane TIM23
  misc_feature (1)..(184): Homolog of NCBI NO: 34902184 NR Description: Putative mitochondrial inner membrane protein
  misc_feature (6)..(186): Homolog of NCBI NO: 18394498 NR Description: inner mitochondrial membrane protein, putative; id: At1g17530.1, supported by cDNA: gi_13641345, supported by gi_15010569, supported by cDNA: gi_20147386 [Arabidopsis
  misc_feature (1)..(184): Homolog of NCBI NO: 34902184 NR Description: Putative mitochondrial inner membrane protein
  misc_feature (1)..(187): Homolog of NCBI NO: 37536126 NR Description: putaive mitochondrial inner membrane protein
  misc_feature (85)..(183): Homolog of NCBI NO: 34394286 NR Description: hypothetical protein [Oryza sativa (japonica
  misc_feature (85)..(183): Homolog of NCBI NO: 34394286 NR Description: hypothetical protein [Oryza sativa (japonica
  misc_feature (122)..(184): Homolog of NCBI NO: 12039278 NR Description: putative inner mitochondrial membrane protein
  misc_feature (18)..(182): Homolog of NCBI NO: 19075496 NR Description: putative mitochondrial import inner membrane subunit [Schizosaccharomyces pombe] Probable mitochondrial import inner membrane translocase subunit
  misc_feature (3)..(94): Homolog of NCBI NO: 38344267 NR Description: OSJNBa0005N02.5 [Oryza sativa (japonica
  misc_feature (1)..(186): Homolog of NCBI NO: 15229350 NR Description: putative inner mitochondrial membrane protein; id: At3g04800.1 [Arabidopsis thaliana] putative inner mitochondrial membrane protein [Arabidopsis
  misc_feature (6)..(186): Homolog of NCBI NO: 13641346 NR Description: translocase of inner mitochondrial membrane TIM23
  misc_feature (122)..(184): Homolog of NCBI NO: 12039278 NR Description: putative inner mitochondrial membrane protein
  misc_feature (18)..(182): Homolog of NCBI NO: 19075496 NR Description: putative mitochondrial import inner membrane subunit [Schizosaccharomyces pombe] Probable mitochondrial import inner membrane translocase subunit
  misc_feature (3)..(94): Homolog of NCBI NO: 38344267 NR Description: OSJNBa0005N02.5 [Oryza sativa (japonica
  misc_feature (1)..(186): Homolog of NCBI NO: 15229350 NR Description: putative inner mitochondrial membrane protein; id: At3g04800.1 [Arabidopsis thaliana] putative inner mitochondrial membrane protein [Arabidopsis
  misc_feature (6)..(186): Homolog of NCBI NO: 13641346 NR Description: translocase of inner mitochondrial membrane TIM23
  misc_feature (6)..(186): Homolog of NCBI NO: 18394498 NR Description: inner mitochondrial membrane protein, putative; id: At1g17530.1, supported by cDNA: gi_13641345, supported by gi_15010569, supported by cDNA: gi_20147386 [Arabidopsis
  misc_feature (6)..(186): Homolog of NCBI NO: 15218593 NR Description: inner mitochondrial membrane protein; protein id: supported by cDNA: 6793., supported by cDNA: gi_14596208, by cDNA: gi_18377493, supported by cDNA: gi_603055 [Arabidopsis
  misc_feature (1)..(184): Homolog of NCBI NO: 34902184 NR Description: Putative mitochondrial inner membrane protein
  misc_feature (1)..(187): Homolog of NCBI NO: 37536126 NR Description: putaive mitochondrial inner membrane protein
  misc_feature (85)..(183): Homolog of NCBI NO: 34394286 NR Description: hypothetical protein [Oryza sativa (japonica
  misc_feature (122)..(184): Homolog of NCBI NO: 12039278 NR Description: putative inner mitochondrial membrane protein
  misc_feature (18)..(182): Homolog of NCBI NO: 19075496 NR Description: putative mitochondrial import inner membrane subunit [Schizosaccharomyces pombe] Probable mitochondrial import inner membrane translocase subunit
  misc_feature (3)..(94): Homolog of NCBI NO: 38344267 NR Description: OSJNBa0005N02.5 [Oryza sativa (japonica
  misc_feature (1)..(186): Homolog of NCBI NO: 15229350 NR Description: putative inner mitochondrial membrane protein; id: At3g04800.1 [Arabidopsis thaliana] putative inner mitochondrial membrane protein [Arabidopsis
  misc_feature (6)..(186): Homolog of NCBI NO: 13641346 NR Description: translocase of inner mitochondrial membrane TIM23
  misc_feature (6)..(186): Homolog of NCBI NO: 18394498 NR Description: inner mitochondrial membrane protein, putative; id: At1g17530.1, supported by cDNA: gi_13641345, supported by gi_15010569, supported by cDNA: gi_20147386 [Arabidopsis
  misc_feature (6)..(186): Homolog of NCBI NO: 15218593 NR Description: inner mitochondrial membrane protein; protein id: supported by cDNA: 6793., supported by cDNA: gi_14596208, by cDNA: gi_18377493, supported by cDNA: gi_603055 [Arabidopsis
  misc_feature (6)..(186): Homolog of NCBI NO: 15218593 NR Description: inner mitochondrial membrane protein; protein id: supported by cDNA: 6793., supported by cDNA: gi_14596208, by cDNA: gi_18377493, supported by cDNA: gi_603055 [Arabidopsis
  misc_feature (1)..(187): Homolog of NCBI NO: 37536126 NR Description: putaive mitochondrial inner membrane protein
  misc_feature (1)..(186): Homolog of NCBI NO: 15229350 NR Description: putative inner mitochondrial membrane protein; id: At3g04800.1 [Arabidopsis thaliana] putative inner mitochondrial membrane protein [Arabidopsis
  misc_feature (3)..(94): Homolog of NCBI NO: 38344267 NR Description: OSJNBa0005N02.5 [Oryza sativa (japonica
  misc_feature (18)..(182): Homolog of NCBI NO: 19075496 NR Description: putative mitochondrial import inner membrane subunit [Schizosaccharomyces pombe] Probable mitochondrial import inner membrane translocase subunit
  misc_feature (122)..(184): Homolog of NCBI NO: 12039278 NR Description: putative inner mitochondrial membrane protein
  misc_feature (85)..(183): Homolog of NCBI NO: 34394286 NR Description: hypothetical protein [Oryza sativa (japonica

SEQ ID NO: 10417 - protein, 177 aa, Zea mays subsp. mays; identical to SEQ ID NO: 10275
  peptide (1)..(177): Ceres Seq. ID no. 12345531
  misc_feature (21)..(121): Pfam Name: Mucin-like glycoprotein Pfam Description: Mucin-like glycoprotein
  misc_feature (21)..(121): Pfam Name: Mucin-like glycoprotein Pfam Description: Mucin-like glycoprotein
  misc_feature (21)..(121): Pfam Name: Mucin-like glycoprotein Pfam Description: Mucin-like glycoprotein
  misc_feature (21)..(121): Pfam Name: Mucin-like glycoprotein Pfam Description: Mucin-like glycoprotein
  misc_feature (3)..(177): Homolog of NCBI NO: 27375632 NR Description: blr0521 [Bradyrhizobium japonicum]
  misc_feature (3)..(177): Homolog of NCBI NO: 27375632 NR Description: blr0521 [Bradyrhizobium japonicum]
  misc_feature (3)..(177): Homolog of NCBI NO: 27375632 NR Description: blr0521 [Bradyrhizobium japonicum]
  misc_feature (3)..(177): Homolog of NCBI NO: 27375632 NR Description: blr0521 [Bradyrhizobium japonicum]
  misc_feature (9)..(177): Homolog of NCBI NO: 186396 NR Description: mucin
  misc_feature (9)..(177): Homolog of NCBI NO: 188864 NR Description: mucin
  misc_feature (9)..(177): Homolog of NCBI NO: 186396 NR Description: mucin
  misc_feature (9)..(177): Homolog of NCBI NO: 188864 NR Description: mucin
  misc_feature (9)..(177): Homolog of NCBI NO: 186396 NR Description: mucin
  misc_feature (9)..(177): Homolog of NCBI NO: 188864 NR Description: mucin
  misc_feature (9)..(177): Homolog of NCBI NO: 188864 NR Description: mucin
  misc_feature (9)..(177): Homolog of NCBI NO: 186396 NR Description: mucin

SEQ ID NO: 10418 - DNA, 1023 bp, Zea mays subsp. mays
  misc_feature (1)..(1023): Ceres Seq. ID no. 12400860
  misc_feature: MA Experiment ID: 108523 Result: Down-regulated in Transcription
  misc_feature: MA Experiment 108523 PARAMETER Experiment Name: Zm_42deg_Heat_P Parameter: Age (day) Value: 8
  misc_feature: MA Experiment 108523 PARAMETER Experiment Name: Zm_42deg_Heat_P Parameter: Organism Value: Zea mays
  misc_feature: MA Experiment 108523 PARAMETER Experiment Name: Zm_42deg_Heat_P Parameter: Plant Line Value: 35A19
  misc_feature: MA Experiment 108523 PARAMETER Experiment Name: Zm_42deg_Heat_P Parameter: Temperature (deg C) Value: 42 vs. 22
  misc_feature: MA Experiment 108523 PARAMETER Experiment Name: Zm_42deg_Heat_P Parameter: Timepoint (hr) Value: 6
  misc_feature: MA Experiment 108523 PARAMETER Experiment Name: Zm_42deg_Heat_P Parameter: Tissue Value: Aerial
  misc_feature: MA Experiment ID: 108528 Result: Up-regulated in Transcription
  misc_feature: MA Experiment 108528 PARAMETER Experiment Name: Zm_Imbibed_Seeds_P Parameter: Age (day) Value: 5 vs. 2
  misc_feature: MA Experiment 108528 PARAMETER Experiment Name: Zm_Imbibed_Seeds_P Parameter: Organism Value: Zea mays
  misc_feature: MA Experiment 108528 PARAMETER Experiment Name: Zm_Imbibed_Seeds_P Parameter: Plant Line Value: 35A19
  misc_feature: MA Experiment 108528 PARAMETER Experiment Name: Zm_Imbibed_Seeds_P Parameter: Tissue Value: Aerial vs. Embryo
  misc_feature: MA Experiment ID: 108530 Result: Up-regulated in Transcription
  misc_feature: MA Experiment 108530 PARAMETER Experiment Name: Zm_Imbibed_Seeds_P Parameter: Age (day) Value: 6 vs. 2
  misc_feature: MA Experiment 108530 PARAMETER Experiment Name: Zm_Imbibed_Seeds_P Parameter: Organism Value: Zea mays
  misc_feature: MA Experiment 108530 PARAMETER Experiment Name: Zm_Imbibed_Seeds_P Parameter: Plant Line Value: 35A19
  misc_feature: MA Experiment 108530 PARAMETER Experiment Name: Zm_Imbibed_Seeds_P Parameter: Tissue Value: Aerial vs. Embryo
  misc_feature: MA Experiment ID: 108536 Result: Down-regulated in Transcription
  misc_feature: MA Experiment 108536 PARAMETER Experiment Name: Zm_Meristem_P Parameter: Age (day) Value: 8
  misc_feature: MA Experiment 108536 PARAMETER Experiment Name: Zm_Meristem_P Parameter: Organism Value: Zea mays
  misc_feature: MA Experiment 108536 PARAMETER Experiment Name: Zm_Meristem_P Parameter: Plant Line Value: 35A19
  misc_feature: MA Experiment 108536 PARAMETER Experiment Name: Zm_Meristem_P Parameter: Tissue Value: Shoot Meristem vs. Above Shoot Meristem
  misc_feature: MA Experiment ID: 108543 Result: Up-regulated in Transcription
  misc_feature: MA Experiment ID: 108545 Result: Up-regulated in Transcription
  misc_feature: MA Experiment 108545 PARAMETER Experiment Name: Zm_Imbibed_Seeds_P Parameter: Age (day) Value: 3 vs. 2
  misc_feature: MA Experiment 108545 PARAMETER Experiment Name: Zm_Imbibed_Seeds_P Parameter: Organism Value: Zea mays
  misc_feature: MA Experiment 108545 PARAMETER Experiment Name: Zm_Imbibed_Seeds_P Parameter: Plant Line Value: 35A19
  misc_feature: MA Experiment 108545 PARAMETER Experiment Name: Zm_Imbibed_Seeds_P Parameter: Tissue Value: Aerial vs. Embryo
  misc_feature: MA Experiment ID: 108546 Result: Down-regulated in Transcription
  misc_feature: MA Experiment 108546 PARAMETER Experiment Name: Zm_Imbibed_Seeds_P Parameter: Age (day) Value: 3 vs. 2
  misc_feature: MA Experiment 108546 PARAMETER Experiment Name: Zm_Imbibed_Seeds_P Parameter: Organism Value: Zea mays
  misc_feature: MA Experiment 108546 PARAMETER Experiment Name: Zm_Imbibed_Seeds_P Parameter: Plant Line Value: 35A19
  misc_feature: MA Experiment 108546 PARAMETER Experiment Name: Zm_Imbibed_Seeds_P Parameter: Tissue Value: Roots vs. Embryo
  misc_feature: MA Experiment ID: 108547 Result: Up-regulated in Transcription
  misc_feature: MA Experiment 108547 PARAMETER Experiment Name: Zm_Imbibed_Seeds_P Parameter: Age (day) Value: 4 vs. 2
  misc_feature: MA Experiment 108547 PARAMETER Experiment Name: Zm_Imbibed_Seeds_P Parameter: Organism Value: Zea mays
  misc_feature: MA Experiment 108547 PARAMETER Experiment Name: Zm_Imbibed_Seeds_P Parameter: Plant Line Value: 35A19
  misc_feature: MA Experiment 108547 PARAMETER Experiment Name: Zm_Imbibed_Seeds_P Parameter: Tissue Value: Aerial vs. Embryo
  misc_feature: MA Experiment ID: 20000535 Result: Down-regulated in Transcription
  misc_feature: MA Experiment 20000535 PARAMETER Experiment Name: Zm_Hybrid_Seed_Dev_P Parameter: DAP Value: 30 vs. 12
  misc_feature: MA Experiment 20000535 PARAMETER Experiment Name: Zm_Hybrid_Seed_Dev_P Parameter: Organism Value: Zea mays
  misc_feature: MA Experiment 20000535 PARAMETER Experiment Name: Zm_Hybrid_Seed_Dev_P Parameter: Plant Line Value: 35A19
  misc_feature: MA Experiment 20000535 PARAMETER Experiment Name: Zm_Hybrid_Seed_Dev_P Parameter: Tissue Value: Embryo vs. Unfert Floret
  misc_feature: MA Experiment ID: 20000626 Result: Down-regulated in Transcription
  misc_feature: MA Experiment 20000626 PARAMETER Experiment Name: Zm_Herbicide-Treatments_P Parameter: Timepoint (hr) Value: 12
  misc_feature: MA Experiment 20000626 PARAMETER Experiment Name: Zm_Herbicide-Treatments_P Parameter: Tissue Value: Aerial
  misc_feature: MA Experiment 20000626 PARAMETER Experiment Name: Zm_Herbicide-Treatments_P Parameter: Treatment Value: Roundup vs. No Treatment
aagttgcattgcatccatcgtgcctgatctccctcccaataagcacgtctgtttctccccagctccaagccggacgacgcagcgtagcagcagagagccagagaccagagatggccgccctcgccgccgcctccacggccgccttcgccgcgaagccgcgcgcgcgcctctccgtggcctgctccgccgccaccggcgacagcagcagcgtgtcgctcgcgtcctccgtgaagacgttctccgccgcgctggcgctgtcgtcggtgctgctgtcctcggccgccacctcccctccgcccgcggccgccgacatcgcggggctgaccccgtgcaaggagtccaaggcgttcgcgaagcgcgagaagaactcgatcaagaagctcaccgcgtcgctgaagaagtacgcgcccgacagcgcccccgcgctcgccatcaacgccaccatcgagaagaccaagcgccggttcgagaactacggcaagttcgggctgctgtgcggcgccgacggcctgccgcacctcatcgtcagcggcgaccagcggcactggggcgagttcgtcaccccgggcctgctcttcctctacatcgccggctggatcgggtgggtcggcaggagctacctcatcgccatcagcggcgagaagaagcccgccatgagggagatcatcatcgacgtcgagctcgccacccgcctcctccccagggggttcatctggcccgtcgccgcctaccgcgagctcatcaacggggacctcgtcgtcgacgacaaggacatcggctactactagctgcgcttgttcacctgcttgcactgtgcatatatattgctgctgccgagctgggcgcttggatagtacgtggggaaacatggatggcttttggtgtaggagctgcatgctttgctagggctatctggtcatgtaggaaatggaagctctgctgtactttaagaaacttgatgaaacctttgtataactcaactgtacctctatctatcccttgtgtgtatttgagaacgatttc

SEQ ID NO: 10419 - protein, 340 aa, Zea mays subsp. mays
  peptide (1)..(340): Ceres Seq. ID no. 12400861
  misc_feature (37)..(259): Pfam Name: HlyD family secretion protein Pfam Description: HlyD family secretion protein
SCIASIVPDLPPNKHVCFSPAPSRTTQRSSREPETRDGRPRRRLHGRLRREAARAPLRGLLRRHRRQQQRVARVLREDVLRRAGAVVGAAVLGRHLPSARGRRHRGADPVQGVQGVREAREELDQEAHRVAEEVRARQRPRARHQRHHREDQAPVRELRQVRAAVRRRRPAAPHRQRRPAALGRVRHPGPALPLHRRLDRVGRQELPHRHQRREEARHEGDHHRRRARHPPPPQGVHLARRRLPRAHQRGPRRRRQGHRLLLAALVHLLALCIYIAAAELGAWIVRGETWMAFGVGAACFARAIWSCRKWKLCCTLRNLMKPLYNSTVPLSIPCVYLRTI

SEQ ID NO: 10420 - protein, 261 aa, Zea mays subsp. mays
  peptide (1)..(261): Ceres Seq. ID no. 12400862
  misc_feature (78)..(255): Pfam Name: Photosystem I reaction centre subunit III Pfam Description: Photosystem I reaction centre subunit III
  misc_feature (37)..(260): Homolog of NCBI NO: 548604 NR Description: Photosystem I reaction centre subunit III,
  misc_feature (37)..(260): Homolog of NCBI NO: 34897038 NR Description: photosystem-1 F subunit precursor [Oryza sativa
  misc_feature (37)..(260): Homolog of NCBI NO: 3885892 NR Description: photosystem-1 F subunit precursor [Oryza sativa]
  misc_feature (52)..(255): Homolog of NCBI NO: 5734518 NR Description: photosystem I subunit III precursor [Arabidopsis >gi|21593588|gb|AAM65555.1| photosystem I subunit III precursor,
  misc_feature (52)..(255): Homolog of NCBI NO: 15221681 NR Description: photosystem I subunit III precursor, putative; id: At1g31330.1, supported by cDNA: 40329., supported by cDNA: supported by cDNA: gi_15081655, supported by cDNA:
  misc_feature (52)..(255): Homolog of NCBI NO: 15450361 NR Description: At1g31330/T19E23_1 [Arabidopsis thaliana]
  misc_feature (53)..(255): Homolog of NCBI NO: 8954295 NR Description: photosystem I reaction center subunit III [Vigna
  misc_feature (57)..(252): Homolog of NCBI NO: 1172664 NR Description: Photosystem I reaction centre subunit III,
  misc_feature (48)..(252): Homolog of NCBI NO: 30013659 NR Description: putative photosystem I subunit III precursor
  misc_feature (44)..(252): Homolog of NCBI NO: 131187 NR Description: Photosystem I reaction centre subunit III,
VALHPSCLISLPISTSVSPQLQAGRRSVAAESQRPEMAALAAASTAAFAAKPRARLSVACSAATGDSSSVSLASSVKTFSAALALSSVLLSSAATSPPPAAADIAGLTPCKESKAFAKREKNSIKKLTASLKKYAPDSAPALAINATIEKTKRRFENYGKFGLLCGADGLPHLIVSGDQRHWGEFVTPGLLFLYIAGWIGWVGRSYLIAISGEKKPAMREIIIDVELATRLLPRGFIWPVAAYRELINGDLVVDDKDIGYY

SEQ ID NO: 10421 - protein, 225 aa, Zea mays subsp. mays
  peptide (1)..(225): Ceres Seq. ID no. 12400863
  misc_feature (42)..(219): Pfam Name: Photosystem I reaction centre subunit III Pfam Description: Photosystem I reaction centre subunit III
  misc_feature (1)..(224): Homolog of NCBI NO: 548604 NR Description: Photosystem I reaction centre subunit III,
  misc_feature (1)..(224): Homolog of NCBI NO: 34897038 NR Description: photosystem-1 F subunit precursor [Oryza sativa
  misc_feature (1)..(224): Homolog of NCBI NO: 3885892 NR Description: photosystem-1 F subunit precursor [Oryza sativa]
  misc_feature (16)..(219): Homolog of NCBI NO: 5734518 NR Description: photosystem I subunit III precursor [Arabidopsis >gi|21593588|gb|AAM65555.1| photosystem I subunit III precursor,
  misc_feature (16)..(219): Homolog of NCBI NO: 15221681 NR Description: photosystem I subunit III precursor, putative; id: At1g31330.1, supported by cDNA: 40329., supported by cDNA: supported by cDNA: gi_15081655, supported by cDNA:
  misc_feature (16)..(219): Homolog of NCBI NO: 15450361 NR Description: At1g31330/T19E23_1 [Arabidopsis thaliana]
  misc_feature (17)..(219): Homolog of NCBI NO: 8954295 NR Description: photosystem I reaction center subunit III [Vigna
  misc_feature (21)..(216): Homolog of NCBI NO: 1172664 NR Description: Photosystem I reaction centre subunit III,
  misc_feature (12)..(216): Homolog of NCBI NO: 30013659 NR Description: putative photosystem I subunit III precursor
  misc_feature (8)..(216): Homolog of NCBI NO: 131187 NR Description: Photosystem I reaction centre subunit III,
MAALAAASTAAFAAKPRARLSVACSAATGDSSSVSLASSVKTFSAALALSSVLLSSAATSPPPAAADIAGLTPCKESKAFAKREKNSIKKLTASLKKYAPDSAPALAINATIEKTKRRFENYGKFGLLCGADGLPHLIVSGDQRHWGEFVTPGLLFLYIAGWIGWVGRSYLIAISGEKKPAMREIIIDVELATRLLPRGFIWPVAAYRELINGDLVVDDKDIGYY

SEQ ID NO: 10422 - DNA, 776 bp, Zea mays subsp. mays
  misc_feature (1)..(776): Ceres Seq. ID no. 12345536
  misc_feature: MA Experiment ID: 108528 Result: Down-regulated in Transcription
  misc_feature: MA Experiment 108528 PARAMETER Experiment Name: Zm_Imbibed_Seeds_P Parameter: Age (day) Value: 5 vs. 2
  misc_feature: MA Experiment 108528 PARAMETER Experiment Name: Zm_Imbibed_Seeds_P Parameter: Organism Value: Zea mays
  misc_feature: MA Experiment 108528 PARAMETER Experiment Name: Zm_Imbibed_Seeds_P Parameter: Plant Line Value: 35A19
  misc_feature: MA Experiment 108528 PARAMETER Experiment Name: Zm_Imbibed_Seeds_P Parameter: Tissue Value: Aerial vs. Embryo
  misc_feature: MA Experiment ID: 108530 Result: Down-regulated in Transcription
  misc_feature: MA Experiment 108530 PARAMETER Experiment Name: Zm_Imbibed_Seeds_P Parameter: Age (day) Value: 6 vs. 2
  misc_feature: MA Experiment 108530 PARAMETER Experiment Name: Zm_Imbibed_Seeds_P Parameter: Organism Value: Zea mays
  misc_feature: MA Experiment 108530 PARAMETER Experiment Name: Zm_Imbibed_Seeds_P Parameter: Plant Line Value: 35A19
  misc_feature: MA Experiment 108530 PARAMETER Experiment Name: Zm_Imbibed_Seeds_P Parameter: Tissue Value: Aerial vs. Embryo
  misc_feature: MA Experiment ID: 108535 Result: Up-regulated in Transcription
  misc_feature: MA Experiment 108535 PARAMETER Experiment Name: Zm_Meristem_P Parameter: Age (day) Value: 8
  misc_feature: MA Experiment 108535 PARAMETER Experiment Name: Zm_Meristem_P Parameter: Organism Value: Zea mays
  misc_feature: MA Experiment 108535 PARAMETER Experiment Name: Zm_Meristem_P Parameter: Plant Line Value: 35A19
  misc_feature: MA Experiment 108535 PARAMETER Experiment Name: Zm_Meristem_P Parameter: Tissue Value: Root Meristem vs. Above Root Meristem
  misc_feature: MA Experiment ID: 20000488 Result: Up-regulated in Transcription
  misc_feature: MA Experiment 20000488 PARAMETER Experiment Name: Zm_50mM_NH4NO3_L_to_H_P Parameter: Organism Value: Zea mays
  misc_feature: MA Experiment 20000488 PARAMETER Experiment Name: Zm_50mM_NH4NO3_L_to_H_P Parameter: Timepoint (hr) Value: 8
  misc_feature: MA Experiment 20000488 PARAMETER Experiment Name: Zm_50mM_NH4NO3_L_to_H_P Parameter: Tissue Value: Leaves
  misc_feature: MA Experiment 20000488 PARAMETER Experiment Name: Zm_50mM_NH4NO3_L_to_H_P Parameter: Treatment Value: 50mM NH4NO3 vs. 100mM Mannitol
  misc_feature: MA Experiment ID: 20001606 Result: Up-regulated in Transcription
  misc_feature: MA Experiment 20001606 PARAMETER Experiment Name: Zm_50ppm_KNO3_L-to-H_P Parameter: Age (day) Value: 19
  misc_feature: MA Experiment 20001606 PARAMETER Experiment Name: Zm_50ppm_KNO3_L-to-H_P Parameter: Organism Value: Zea mays
  misc_feature: MA Experiment 20001606 PARAMETER Experiment Name: Zm_50ppm_KNO3_L-to-H_P Parameter: Plant Line Value: 35A19
  misc_feature: MA Experiment 20001606 PARAMETER Experiment Name: Zm_50ppm_KNO3_L-to-H_P Parameter: Timepoint (hr) Value: 8
  misc_feature: MA Experiment 20001606 PARAMETER Experiment Name: Zm_50ppm_KNO3_L-to-H_P Parameter: Tissue Value: Shoots
  misc_feature: MA Experiment 20001606 PARAMETER Experiment Name: Zm_50ppm_KNO3_L-to-H_P Parameter: Treatment Value: 50ppm KNO3 vs. 50ppm KCl
  misc_feature: MA Experiment ID: 20001612 Result: Up-regulated in Transcription
  misc_feature: MA Experiment 20001612 PARAMETER Experiment Name: Zm_50ppm_KNO3_L-to-H_P Parameter: Age (day) Value: 19
  misc_feature: MA Experiment 20001612 PARAMETER Experiment Name: Zm_50ppm_KNO3_L-to-H_P Parameter: Organism Value: Zea mays
  misc_feature: MA Experiment 20001612 PARAMETER Experiment Name: Zm_50ppm_KNO3_L-to-H_P Parameter: Plant Line Value: 35A19
  misc_feature: MA Experiment 20001612 PARAMETER Experiment Name: Zm_50ppm_KNO3_L-to-H_P Parameter: Timepoint (hr) Value: 8
  misc_feature: MA Experiment 20001612 PARAMETER Experiment Name: Zm_50ppm_KNO3_L-to-H_P Parameter: Tissue Value: Roots
  misc_feature: MA Experiment 20001612 PARAMETER Experiment Name: Zm_50ppm_KNO3_L-to-H_P Parameter: Treatment Value: 50ppm KNO3 vs. 50ppm KCl
agtcgcctccttcctgcgccgccgccgccgccgccgccgccgctaccaccgcctcgcggccgcctgcggctccgcgtttccgcacggaagttggtgaaggtttcttgaggctgagaacatggtgctgaagacggaactttgccgcttcagcggccagaagatttatcctgggaaaggcattagatttatccgtgctgattctcaggtcttcctttttgccaactcgaaatgcaagcgctacttccacaaccgcctgaagcctgcaaagcttacctggacagcaatgtacaggaagcagcacaagaaggatatccatgctgaagcggtaaagaagaggcgccgcgccaccaagaagccatactccaggtcaattgtgggtgcttccttggaagtaatccagaagaagagagctgagaagccagaggtccgcgatgctgctagagaggctgctcttcgtgagatcaaggagcgcatcaagaagaccaaggatgagaagaaagcgaagaaggcggaggtgagcaagtcccagaagacgcagacaaagggtgcggtccagaagggttccaagggccccaagttgggcggcggtggtgggaagcgctgaaagaacttagtgtcgtttctcgacattgcagtcgttccttagccaaagccactttcgtagaacctgtgttgaatttgcaagacttattcaagcgttgcttgtgcgtgctaaataccatggcaagagaacggatttatatttatgcctgaaaaaaatgaccgttcatattctt

SEQ ID NO: 10423 - protein, 161 aa, Zea mays subsp. mays; identical to SEQ ID NO: 1700
  peptide (1)..(161): Ceres Seq. ID no. 12345537
  misc_feature (3)..(73): Pfam Name: Ribosomal protein L24e Pfam Description: Ribosomal protein L24e
  misc_feature (1)..(161): Homolog of NCBI NO: 1710521 NR Description: 60S RIBOSOMAL PROTEIN L24 >gi|7440778|pir||T06178
  misc_feature (4)..(161): Homolog of NCBI NO: 34900364 NR Description: putative 60S ribosomal protein L24 [Oryza sativa
  misc_feature (1)..(160): Homolog of NCBI NO: 6094040 NR Description: 60S ribosomal protein L24
  misc_feature (1)..(156): Homolog of NCBI NO: 10180025 NR Description: 60S ribosomal protein L24 [Prunus avium]
  misc_feature (1)..(161): Homolog of NCBI NO: 18404176 NR Description: 60S ribosomal protein L24; protein id: supported by cDNA: 14564., supported by cDNA: gi_16604375, by cDNA: gi_18252830 [Arabidopsis thaliana]
  misc_feature (1)..(161): Homolog of NCBI NO: 15231730 NR Description: 60S ribosomal protein - like; protein id: supported by cDNA: gi_16648705, supported by cDNA: gi_20260561 thaliana] >gi|26454659|sp|P38666|RL24_ARATH 60S ribosomal protein
  misc_feature (5)..(161): Homolog of NCBI NO: 25295112 NR Description: 60S ribosomal protein L24 [imported] -
  misc_feature (3)..(150): Homolog of NCBI NO: 19075214 NR Description: 60s ribosomal protein L24 [Schizosaccharomyces
  misc_feature (3)..(150): Homolog of NCBI NO: 19115030 NR Description: 60S ribosomal protein L24 [Schizosaccharomyces
  misc_feature (10)..(154): Homolog of NCBI NO: 40741063 NR Description: conserved hypothetical protein [Aspergillus

SEQ ID NO: 10424 - protein, 106 aa, Zea mays subsp. mays; identical to SEQ ID NO: 1701
  peptide (1)..(106): Ceres Seq. ID no. 12345538
  misc_feature (1)..(106): Homolog of NCBI NO: 1710521 NR Description: 60S RIBOSOMAL PROTEIN L24 >gi|7440778|pir||T06178
  misc_feature (1)..(106): Homolog of NCBI NO: 34900364 NR Description: putative 60S ribosomal protein L24 [Oryza sativa
  misc_feature (1)..(105): Homolog of NCBI NO: 6094040 NR Description: 60S ribosomal protein L24
  misc_feature (1)..(101): Homolog of NCBI NO: 10180025 NR Description: 60S ribosomal protein L24 [Prunus avium]
  misc_feature (1)..(106): Homolog of NCBI NO: 18404176 NR Description: 60S ribosomal protein L24; protein id: supported by cDNA: 14564., supported by cDNA: gi_16604375, by cDNA: gi_18252830 [Arabidopsis thaliana]
  misc_feature (1)..(106): Homolog of NCBI NO: 15231730 NR Description: 60S ribosomal protein - like; protein id: supported by cDNA: gi_16648705, supported by cDNA: gi_20260561 thaliana] >gi|26454659|sp|P38666|RL24_ARATH 60S ribosomal protein
  misc_feature (1)..(106): Homolog of NCBI NO: 25295112 NR Description: 60S ribosomal protein L24 [imported] -
  misc_feature (1)..(95): Homolog of NCBI NO: 19075214 NR Description: 60s ribosomal protein L24 [Schizosaccharomyces
  misc_feature (1)..(95): Homolog of NCBI NO: 19115030 NR Description: 60S ribosomal protein L24 [Schizosaccharomyces
  misc_feature (1)..(99): Homolog of NCBI NO: 40741063 NR Description: conserved hypothetical protein [Aspergillus

SEQ ID NO: 10425 - DNA, 949 bp, Zea mays subsp. mays
  misc_feature (1)..(949): Ceres Seq. ID no. 12357451
  misc_feature: MA Experiment ID: 108528 Result: Up-regulated in Transcription
  misc_feature: MA Experiment 108528 PARAMETER Experiment Name: Zm_Imbibed_Seeds_P Parameter: Age (day) Value: 5 vs. 2
  misc_feature: MA Experiment 108528 PARAMETER Experiment Name: Zm_Imbibed_Seeds_P Parameter: Organism Value: Zea mays
  misc_feature: MA Experiment 108528 PARAMETER Experiment Name: Zm_Imbibed_Seeds_P Parameter: Plant Line Value: 35A19
  misc_feature: MA Experiment 108528 PARAMETER Experiment Name: Zm_Imbibed_Seeds_P Parameter: Tissue Value: Aerial vs. Embryo
  misc_feature: MA Experiment ID: 108530 Result: Up-regulated in Transcription
  misc_feature: MA Experiment 108530 PARAMETER Experiment Name: Zm_Imbibed_Seeds_P Parameter: Age (day) Value: 6 vs. 2
  misc_feature: MA Experiment 108530 PARAMETER Experiment Name: Zm_Imbibed_Seeds_P Parameter: Organism Value: Zea mays
  misc_feature: MA Experiment 108530 PARAMETER Experiment Name: Zm_Imbibed_Seeds_P Parameter: Plant Line Value: 35A19
  misc_feature: MA Experiment 108530 PARAMETER Experiment Name: Zm_Imbibed_Seeds_P Parameter: Tissue Value: Aerial vs. Embryo
  misc_feature: MA Experiment ID: 108543 Result: Up-regulated in Transcription
  misc_feature: MA Experiment ID: 108544 Result: Up-regulated in Transcription
  misc_feature: MA Experiment ID: 108547 Result: Up-regulated in Transcription
  misc_feature: MA Experiment 108547 PARAMETER Experiment Name: Zm_Imbibed_Seeds_P Parameter: Age (day) Value: 4 vs. 2
  misc_feature: MA Experiment 108547 PARAMETER Experiment Name: Zm_Imbibed_Seeds_P Parameter: Organism Value: Zea mays
  misc_feature: MA Experiment 108547 PARAMETER Experiment Name: Zm_Imbibed_Seeds_P Parameter: Plant Line Value: 35A19
  misc_feature: MA Experiment 108547 PARAMETER Experiment Name: Zm_Imbibed_Seeds_P Parameter: Tissue Value: Aerial vs. Embryo
  misc_feature: MA Experiment ID: 20000480 Result: Down-regulated in Transcription
  misc_feature: MA Experiment 20000480 PARAMETER Experiment Name: Zm_Drought_P Parameter: Age (day) Value: 11
  misc_feature: MA Experiment 20000480 PARAMETER Experiment Name: Zm_Drought_P Parameter: Organism Value: Zea mays
  misc_feature: MA Experiment 20000480 PARAMETER Experiment Name: Zm_Drought_P Parameter: Plant Line Value: 35A19
  misc_feature: MA Experiment 20000480 PARAMETER Experiment Name: Zm_Drought_P Parameter: Timepoint (hr) Value: 72
  misc_feature: MA Experiment 20000480 PARAMETER Experiment Name: Zm_Drought_P Parameter: Tissue Value: Aerial
  misc_feature: MA Experiment 20000480 PARAMETER Experiment Name: Zm_Drought_P Parameter: Treatment Value: Drought vs. No Drought
aagtcacccaccccatccaaggccctcccaaagtcccaaaggccgccgccgcccgccagcccaccatggccgcgcagtccttcctcctcgccgccactgccgccgccaggtcccccgcggtcttcgccgctccctattcctccgcacgccctttccactcggtccacttcgtcgccggcccgtggggcgccgccgccgccagggcgctcgtcgtcgcggacgccactaagaaggccgtagccgtcctcaagggcgcgtctgaggtcgagggcgtggtcacgctcacgcaggacgacgatggacctacaactgtgaatgtccgtatcactggacttacccctggacttcatggcttccacctccacgagtttggtgatactaccaatgggtgcatatcgacaggaccacattttaatccaaacaatctgacgcacggtgcaccagaagacgaagtccgtcatgcgggtgacctgggaaacattgttgcaaatgctgagggcatagccgaggcaaccattgttgatacccagattcctttgactggcccaaattcagttgttgggagagcatttgtggttcatgagcttgaagatgatttggggaaagggggccatgagctcagcctctctactggaaatgctggtggaagactggcatgtggtgttgttggcctgactccattgtaggttgctcgccgggtgcccgggttgcagttgcagctacgctgttacatccttgccttggtggacttttgtcttcaatcgtgttattgggacagtgacctttttgtattacttggattcattccatgcatgtggtatggtgcgtaatagcctttgcaggtcgactgtataaaaagcaatatttagttgaggaaataagtgttgccacatatccaaatcgatctatgaagcactatgaacatcaaatgttattttgattttgtttc

SEQ ID NO: 10426 - protein, 227 aa, Zea mays subsp. mays; identical to SEQ ID NO: 3431
  peptide (1)..(227): Ceres Seq. ID no. 12357452
  misc_feature (22)..(227): Homolog of NCBI NO: 3915008 NR Description: Superoxide dismutase [Cu-Zn], chloroplast
  misc_feature (22)..(227): Homolog of NCBI NO: 14326463 NR Description: copper/zinc superoxide dismutase precursor
  misc_feature (22)..(227): Homolog of NCBI NO: 7433318 NR Description: superoxide dismutase (EC 1.15.1.1) (Cu-Zn) 2, - wheat >gi|1572627|gb|AAB67991.1| Cu/Zn superoxide dismutase
  misc_feature (22)..(227): Homolog of NCBI NO: 7433305 NR Description: probable superoxide dismutase (EC 1.15.1.1)
  misc_feature (67)..(227): Homolog of NCBI NO: 20900 NR Description: Cu/Zn superoxide dismutase II [Pisum sativum]
  misc_feature (64)..(227): Homolog of NCBI NO: 11358868 NR Description: superoxide dismutase (EC 1.15.1.1) (Cu-Zn)
  misc_feature (64)..(227): Homolog of NCBI NO: 18401659 NR Description: copper/zinc superoxide dismutase (CSD2); protein At2g28190.1, supported by cDNA: 39796., supported by cDNA:
  misc_feature (67)..(227): Homolog of NCBI NO: 134683 NR Description: Superoxide dismutase [Cu-Zn], chloroplast
  misc_feature (64)..(227): Homolog of NCBI NO: 5689611 NR Description: copper/zinc superoxide dismutase [Arabidopsis
  misc_feature (22)..(227): Homolog of NCBI NO: 38073257 NR Description: superoxide dismutase [Trifolium pratense]
  misc_feature (22)..(227): Homolog of NCBI NO: 3915008 NR Description: Superoxide dismutase [Cu-Zn], chloroplast
  misc_feature (22)..(227): Homolog of NCBI NO: 14326463 NR Description: copper/zinc superoxide dismutase precursor
  misc_feature (22)..(227): Homolog of NCBI NO: 7433318 NR Description: superoxide dismutase (EC 1.15.1.1) (Cu-Zn) 2, - wheat >gi|1572627|gb|AAB67991.1| Cu/Zn superoxide dismutase
  misc_feature (22)..(227): Homolog of NCBI NO: 7433305 NR Description: probable superoxide dismutase (EC 1.15.1.1)
  misc_feature (67)..(227): Homolog of NCBI NO: 20900 NR Description: Cu/Zn superoxide dismutase II [Pisum sativum]
  misc_feature (64)..(227): Homolog of NCBI NO: 11358868 NR Description: superoxide dismutase (EC 1.15.1.1) (Cu-Zn)
  misc_feature (64)..(227): Homolog of NCBI NO: 18401659 NR Description: copper/zinc superoxide dismutase (CSD2); protein At2g28190.1, supported by cDNA: 39796., supported by cDNA:
  misc_feature (67)..(227): Homolog of NCBI NO: 134683 NR Description: Superoxide dismutase [Cu-Zn], chloroplast
  misc_feature (64)..(227): Homolog of NCBI NO: 5689611 NR Description: copper/zinc superoxide dismutase [Arabidopsis
  misc_feature (22)..(227): Homolog of NCBI NO: 38073257 NR Description: superoxide dismutase [Trifolium pratense]

SEQ ID NO: 10427 - protein, 206 aa, Zea mays subsp. mays; identical to SEQ ID NO: 3432
  peptide (1)..(206): Ceres Seq. ID no. 12357453
  misc_feature (1)..(206): Homolog of NCBI NO: 3915008 NR Description: Superoxide dismutase [Cu-Zn], chloroplast
  misc_feature (1)..(206): Homolog of NCBI NO: 14326463 NR Description: copper/zinc superoxide dismutase precursor
  misc_feature (1)..(206): Homolog of NCBI NO: 7433318 NR Description: superoxide dismutase (EC 1.15.1.1) (Cu-Zn) 2, - wheat >gi|1572627|gb|AAB67991.1| Cu/Zn superoxide dismutase
  misc_feature (1)..(206): Homolog of NCBI NO: 7433305 NR Description: probable superoxide dismutase (EC 1.15.1.1)
  misc_feature (46)..(206): Homolog of NCBI NO: 20900 NR Description: Cu/Zn superoxide dismutase II [Pisum sativum]
  misc_feature (43)..(206): Homolog of NCBI NO: 11358868 NR Description: superoxide dismutase (EC 1.15.1.1) (Cu-Zn)
  misc_feature (43)..(206): Homolog of NCBI NO: 18401659 NR Description: copper/zinc superoxide dismutase (CSD2); protein At2g28190.1, supported by cDNA: 39796., supported by cDNA:
  misc_feature (46)..(206): Homolog of NCBI NO: 134683 NR Description: Superoxide dismutase [Cu-Zn], chloroplast
  misc_feature (43)..(206): Homolog of NCBI NO: 5689611 NR Description: copper/zinc superoxide dismutase [Arabidopsis
  misc_feature (1)..(206): Homolog of NCBI NO: 38073257 NR Description: superoxide dismutase [Trifolium pratense]
  misc_feature (1)..(206): Homolog of NCBI NO: 3915008 NR Description: Superoxide dismutase [Cu-Zn], chloroplast
  misc_feature (1)..(206): Homolog of NCBI NO: 14326463 NR Description: copper/zinc superoxide dismutase precursor
  misc_feature (1)..(206): Homolog of NCBI NO: 7433318 NR Description: superoxide dismutase (EC 1.15.1.1) (Cu-Zn) 2, - wheat >gi|1572627|gb|AAB67991.1| Cu/Zn superoxide dismutase
  misc_feature (1)..(206): Homolog of NCBI NO: 7433305 NR Description: probable superoxide dismutase (EC 1.15.1.1)
  misc_feature (46)..(206): Homolog of NCBI NO: 20900 NR Description: Cu/Zn superoxide dismutase II [Pisum sativum]
  misc_feature (43)..(206): Homolog of NCBI NO: 11358868 NR Description: superoxide dismutase (EC 1.15.1.1) (Cu-Zn)
  misc_feature (43)..(206): Homolog of NCBI NO: 18401659 NR Description: copper/zinc superoxide dismutase (CSD2); protein At2g28190.1, supported by cDNA: 39796., supported by cDNA:
  misc_feature (46)..(206): Homolog of NCBI NO: 134683 NR Description: Superoxide dismutase [Cu-Zn], chloroplast
  misc_feature (43)..(206): Homolog of NCBI NO: 5689611 NR Description: copper/zinc superoxide dismutase [Arabidopsis
  misc_feature (1)..(206): Homolog of NCBI NO: 38073257 NR Description: superoxide dismutase [Trifolium pratense]

SEQ ID NO: 10428 - DNA, 1777 bp, Zea mays subsp. mays
  misc_feature (1)..(1777): Ceres Seq. ID no. 12400848
  misc_feature: MA Experiment ID: 108504 Result: Up-regulated in Transcription
  misc_feature: MA Experiment 108504 PARAMETER Experiment Name: Zm_Drought_P Parameter: Age (day) Value: 8
  misc_feature: MA Experiment 108504 PARAMETER Experiment Name: Zm_Drought_P Parameter: Organism Value: Zea mays
  misc_feature: MA Experiment 108504 PARAMETER Experiment Name: Zm_Drought_P Parameter: Plant Line Value: 35A19
  misc_feature: MA Experiment 108504 PARAMETER Experiment Name: Zm_Drought_P Parameter: Timepoint (hr) Value: 12
  misc_feature: MA Experiment 108504 PARAMETER Experiment Name: Zm_Drought_P Parameter: Tissue Value: Aerial
  misc_feature: MA Experiment 108504 PARAMETER Experiment Name: Zm_Drought_P Parameter: Treatment Value: Drought vs. No Drought
  misc_feature: MA Experiment ID: 108522 Result: Up-regulated in Transcription
  misc_feature: MA Experiment 108522 PARAMETER Experiment Name: Zm_42deg_Heat_P Parameter: Age (day) Value: 8
  misc_feature: MA Experiment 108522 PARAMETER Experiment Name: Zm_42deg_Heat_P Parameter: Organism Value: Zea mays
  misc_feature: MA Experiment 108522 PARAMETER Experiment Name: Zm_42deg_Heat_P Parameter: Plant Line Value: 35A19
  misc_feature: MA Experiment 108522 PARAMETER Experiment Name: Zm_42deg_Heat_P Parameter: Temperature (deg C) Value: 42 vs. 22
  misc_feature: MA Experiment 108522 PARAMETER Experiment Name: Zm_42deg_Heat_P Parameter: Timepoint (hr) Value: 1
  misc_feature: MA Experiment 108522 PARAMETER Experiment Name: Zm_42deg_Heat_P Parameter: Tissue Value: Aerial
  misc_feature: MA Experiment ID: 108523 Result: Up-regulated in Transcription
  misc_feature: MA Experiment 108523 PARAMETER Experiment Name: Zm_42deg_Heat_P Parameter: Age (day) Value: 8
  misc_feature: MA Experiment 108523 PARAMETER Experiment Name: Zm_42deg_Heat_P Parameter: Organism Value: Zea mays
  misc_feature: MA Experiment 108523 PARAMETER Experiment Name: Zm_42deg_Heat_P Parameter: Plant Line Value: 35A19
  misc_feature: MA Experiment 108523 PARAMETER Experiment Name: Zm_42deg_Heat_P Parameter: Temperature (deg C) Value: 42 vs. 22
  misc_feature: MA Experiment 108523 PARAMETER Experiment Name: Zm_42deg_Heat_P Parameter: Timepoint (hr) Value: 6
  misc_feature: MA Experiment 108523 PARAMETER Experiment Name: Zm_42deg_Heat_P Parameter: Tissue Value: Aerial
  misc_feature: MA Experiment ID: 108528 Result: Up-regulated in Transcription
  misc_feature: MA Experiment 108528 PARAMETER Experiment Name: Zm_Imbibed_Seeds_P Parameter: Age (day) Value: 5 vs. 2
  misc_feature: MA Experiment 108528 PARAMETER Experiment Name: Zm_Imbibed_Seeds_P Parameter: Organism Value: Zea mays
  misc_feature: MA Experiment 108528 PARAMETER Experiment Name: Zm_Imbibed_Seeds_P Parameter: Plant Line Value: 35A19
  misc_feature: MA Experiment 108528 PARAMETER Experiment Name: Zm_Imbibed_Seeds_P Parameter: Tissue Value: Aerial vs. Embryo
  misc_feature: MA Experiment ID: 108530 Result: Up-regulated in Transcription
  misc_feature: MA Experiment 108530 PARAMETER Experiment Name: Zm_Imbibed_Seeds_P Parameter: Age (day) Value: 6 vs. 2
  misc_feature: MA Experiment 108530 PARAMETER Experiment Name: Zm_Imbibed_Seeds_P Parameter: Organism Value: Zea mays
  misc_feature: MA Experiment 108530 PARAMETER Experiment Name: Zm_Imbibed_Seeds_P Parameter: Plant Line Value: 35A19
  misc_feature: MA Experiment 108530 PARAMETER Experiment Name: Zm_Imbibed_Seeds_P Parameter: Tissue Value: Aerial vs. Embryo
  misc_feature: MA Experiment ID: 108556 Result: Up-regulated in Transcription
  misc_feature: MA Experiment 108556 PARAMETER Experiment Name: Zm_Drought_P Parameter: Age (day) Value: 9
  misc_feature: MA Experiment 108556 PARAMETER Experiment Name: Zm_Drought_P Parameter: Organism Value: Zea mays
  misc_feature: MA Experiment 108556 PARAMETER Experiment Name: Zm_Drought_P Parameter: Plant Line Value: 35A19
  misc_feature: MA Experiment 108556 PARAMETER Experiment Name: Zm_Drought_P Parameter: Timepoint (hr) Value: 24
  misc_feature: MA Experiment 108556 PARAMETER Experiment Name: Zm_Drought_P Parameter: Tissue Value: Aerial
  misc_feature: MA Experiment 108556 PARAMETER Experiment Name: Zm_Drought_P Parameter: Treatment Value: Drought vs. No Drought
  misc_feature: MA Experiment ID: 108597 Result: Up-regulated in Transcription
  misc_feature: MA Experiment 108597 PARAMETER Experiment Name: Zm_100uM_ABA_P Parameter: Age (day) Value: 9
  misc_feature: MA Experiment 108597 PARAMETER Experiment Name: Zm_100uM_ABA_P Parameter: Organism Value: Zea mays
  misc_feature: MA Experiment 108597 PARAMETER Experiment Name: Zm_100uM_ABA_P Parameter: Plant Line Value: 35A19
  misc_feature: MA Experiment 108597 PARAMETER Experiment Name: Zm_100uM_ABA_P Parameter: Timepoint (hr) Value: 24
  misc_feature: MA Experiment 108597 PARAMETER Experiment Name: Zm_100uM_ABA_P Parameter: Tissue Value: Aerial
  misc_feature: MA Experiment 108597 PARAMETER Experiment Name: Zm_100uM_ABA_P Parameter: Treatment Value: 100uM ABA vs. No Treatment
acgcacgaatccaacccaagaacccatcaccaccctcgcgtcacatgcgcgcataggcccccggccgcaccgcaggtcgccatcacatcaccaccatgccgcctccgctgcttgtttgtctcctcatctttctcgcccccgtgtcgcggccgtggtctgtcgccgtcgaggccgagccgcagagcccgggcgcgaagcctcgtgtgttcccgctgcgggcgcggcaggtgccggcgggggcgctgccgcggccgccgagcaagctgcgcttccaccacaacgtcagcctcaccgtctcgctcgccgtcggcaagccgccgcagaacgtcactatggtgttcgacaccggcagcgagctctcctggctgctctgcgcgacggggcgccagggcagcgccggcgctgccagcgccatgggcgagtcgttccgcccgagggactcggccacgttcgccgccgtgccctgcggctccgcgcagtgcagctcccgggacctgccggcgccgccgtcctgcgacggggcctcgcgccagtgcagcgtgtcgctgtnctacgcggacgggtccacctccgacggcgcgctcgccaccgacgttttcgccgtcggcgacgcgccgccgctgcggtccgcgttcgggtgcatgtccaccgcgtatgactcctcccccgacggtgtcgcgacggccgggctgctgggcatgaacaggggcacgctctcctttgtgacgcaggccagcacgcgccgcttctcgtactgcatctccgaccgggacgacgccggcgtgctgctcctcggccacagcgacctcccctttctgccgctcaactacacgccgctgtatcagcccaccctgccgctcccctacttcgaccgcgtggcctactctgtccagctcctcggcatccgcgtcggcggcaagcccctgccgatcccggcgtcggtgctcgcgccggaccacaccggcgcagggcagacgatggtggactccggcacgcagttcaccttcctcctcggggatgcatactccgccctgaaagccgagttcttgaaacaaacgaagcccctcctccccgcgctcggcgaccccagctttgcattccaagaagcgctcgacacctgcttccgcgtgccagcggggcgcccgccgccgtcggcgaggctcccgcccgtgaccctgctgttcaatggcgcggagatgtcggtggccggggacaggctgctgtacaaggtccccggcgagcgccggggagccgacggcgtgtggtgcctaacgttcgggaacgcggacatggtgcccctgacggcgtacgtgatcgggcaccaccaccagatgaacctgtgggtcgagtacgacctggagcgcggtcgcgtcgggatcacgcctgtcaagtgcgacgtcgccagcgagcggctcggcctgatgttgtgacgctgcctggcgaaccgtaacctctctggctcgggggtttgttcctccagactccagtggccataaccttgataaacaagttgacagaaaagtcgatttttaacctgccaaacgtttctaagtttggaacttgtttatctttttttttttcatgtgaggaaggaaaacttgcataaccttgatcgtgcgtgtggcatgtacgatgtttagcgtaaactgtaaagtaagtgtagtgcagtgttgtgcttctttattttactgaacacgtagtgatttaacatgatctaagtagtggtgtactactgtactgctgtatattgtatgtaaatattagcttgttgtatatt

SEQ ID NO: 10429 - protein, 444 aa, Zea mays subsp. mays
  peptide (1)..(444): Ceres Seq. ID no. 12400849
  misc_feature (26)..(431): Pfam Name: Eukaryotic aspartyl protease Pfam Description: Eukaryotic aspartyl protease
  misc_feature (1)..(444): Homolog of NCBI NO: 34908230 NR Description: P0406G08.30 [Oryza sativa (japonica
  misc_feature (5)..(441): Homolog of NCBI NO: 34902108 NR Description: hypothetical protein [Oryza sativa (japonica group)] >gi|29893618|gb|AAP06872.1| hypothetical protein [Oryza
  misc_feature (30)..(442): Homolog of NCBI NO: 15241713 NR Description: putative protein; protein id: At5g02190.1
  misc_feature (37)..(442): Homolog of NCBI NO: 7487691 NR Description: hypothetical protein At2g39710 [imported] -
  misc_feature (37)..(442): Homolog of NCBI NO: 18405138 NR Description: expressed protein; protein id: At2g39710.1, by cDNA: gi_13877758, supported by cDNA: gi_15293230 [Arabidopsis >gi|13877759|gb|AAK43957.1|AF370142_1 unknown protein
  misc_feature (37)..(442): Homolog of NCBI NO: 26451756 NR Description: unknown protein [Arabidopsis thaliana]
  misc_feature (1)..(433): Homolog of NCBI NO: 18408451 NR Description: expressed protein; protein id: At1g66180.1, by cDNA: 99625., supported by cDNA: gi_14334807, supported by gi_15293194 [Arabidopsis thaliana] >gi|25404595|pir||F96686
  misc_feature (1)..(433): Homolog of NCBI NO: 21618176 NR Description: unknown [Arabidopsis thaliana]
  misc_feature (1)..(433): Homolog of NCBI NO: 18421660 NR Description: putative protein; protein id: At5g37540.1, by cDNA: gi_15809849, supported by cDNA: gi_20260181 [Arabidopsis >gi|10177438|dbj|BAB10671.1| contains similarity to nucleoid
  misc_feature (69)..(433): Homolog of NCBI NO: 34895664 NR Description: nucleoid DNA-binding protein cnd41-like protein
  misc_feature (152)..(152): Xaa is any aa, unknown or other
MPPPLLVCLLIFLAPVSRPWSVAVEAEPQSPGAKPRVFPLRARQVPAGALPRPPSKLRFHHNVSLTVSLAVGKPPQNVTMVFDTGSELSWLLCATGRQGSAGAASAMGESFRPRDSATFAAVPCGSAQCSSRDLPAPPSCDGASRQCSVSLXYADGSTSDGALATDVFAVGDAPPLRSAFGCMSTAYDSSPDGVATAGLLGMNRGTLSFVTQASTRRFSYCISDRDDAGVLLLGHSDLPFLPLNYTPLYQPTLPLPYFDRVAYSVQLLGIRVGGKPLPIPASVLAPDHTGAGQTMVDSGTQFTFLLGDAYSALKAEFLKQTKPLLPALGDPSFAFQEALDTCFRVPAGRPPPSARLPPVTLLFNGAEMSVAGDRLLYKVPGERRGADGVWCLTFGNADMVPLTAYVIGHHHQMNLWVEYDLERGRVGITPVKCDVASERLGLML

SEQ ID NO: 10430 - protein, 365 aa, Zea mays subsp. mays
  peptide (1)..(365): Ceres Seq. ID no. 12400850
  misc_feature (1)..(352): Pfam Name: Eukaryotic aspartyl protease Pfam Description: Eukaryotic aspartyl protease
  misc_feature (1)..(365): Homolog of NCBI NO: 34908230 NR Description: P0406G08.30 [Oryza sativa (japonica
  misc_feature (1)..(362): Homolog of NCBI NO: 34902108 NR Description: hypothetical protein [Oryza sativa (japonica group)] >gi|29893618|gb|AAP06872.1| hypothetical protein [Oryza
  misc_feature (1)..(363): Homolog of NCBI NO: 15241713 NR Description: putative protein; protein id: At5g02190.1
  misc_feature (1)..(363): Homolog of NCBI NO: 7487691 NR Description: hypothetical protein At2g39710 [imported] -
  misc_feature (1)..(363): Homolog of NCBI NO: 18405138 NR Description: expressed protein; protein id: At2g39710.1, by cDNA: gi_13877758, supported by cDNA: gi_15293230 [Arabidopsis >gi|13877759|gb|AAK43957.1|AF370142_1 unknown protein
  misc_feature (1)..(363): Homolog of NCBI NO: 26451756 NR Description: unknown protein [Arabidopsis thaliana]
  misc_feature (1)..(354): Homolog of NCBI NO: 18408451 NR Description: expressed protein; protein id: At1g66180.1, by cDNA: 99625., supported by cDNA: gi_14334807, supported by gi_15293194 [Arabidopsis thaliana] >gi|25404595|pir||F96686
  misc_feature (1)..(354): Homolog of NCBI NO: 21618176 NR Description: unknown [Arabidopsis thaliana]
  misc_feature (1)..(354): Homolog of NCBI NO: 18421660 NR Description: putative protein; protein id: At5g37540.1, by cDNA: gi_15809849, supported by cDNA: gi_20260181 [Arabidopsis >gi|10177438|dbj|BAB10671.1| contains similarity to nucleoid
  misc_feature (1)..(354): Homolog of NCBI NO: 34895664 NR Description: nucleoid DNA-binding protein cnd41-like protein
  misc_feature (73)..(73): Xaa is any aa, unknown or other
MVFDTGSELSWLLCATGRQGSAGAASAMGESFRPRDSATFAAVPCGSAQCSSRDLPAPPSCDGASRQCSVSLXYADGSTSDGALATDVFAVGDAPPLRSAFGCMSTAYDSSPDGVATAGLLGMNRGTLSFVTQASTRRFSYCISDRDDAGVLLLGHSDLPFLPLNYTPLYQPTLPLPYFDRVAYSVQLLGIRVGGKPLPIPASVLAPDHTGAGQTMVDSGTQFTFLLGDAYSALKAEFLKQTKPLLPALGDPSFAFQEALDTCFRVPAGRPPPSARLPPVTLLFNGAEMSVAGDRLLYKVPGERRGADGVWCLTFGNADMVPLTAYVIGHHHQMNLWVEYDLERGRVGITPVKCDVASERLGLML

SEQ ID NO: 10431 - protein, 338 aa, Zea mays subsp. mays
  peptide (1)..(338): Ceres Seq. ID no. 12400851
  misc_feature (1)..(325): Pfam Name: Eukaryotic aspartyl protease Pfam Description: Eukaryotic aspartyl protease
  misc_feature (1)..(338): Homolog of NCBI NO: 34908230 NR Description: P0406G08.30 [Oryza sativa (japonica
  misc_feature (1)..(335): Homolog of NCBI NO: 34902108 NR Description: hypothetical protein [Oryza sativa (japonica group)] >gi|29893618|gb|AAP06872.1| hypothetical protein [Oryza
  misc_feature (1)..(336): Homolog of NCBI NO: 15241713 NR Description: putative protein; protein id: At5g02190.1
  misc_feature (1)..(336): Homolog of NCBI NO: 7487691 NR Description: hypothetical protein At2g39710 [imported] -
  misc_feature (1)..(336): Homolog of NCBI NO: 18405138 NR Description: expressed protein; protein id: At2g39710.1, by cDNA: gi_13877758, supported by cDNA: gi_15293230 [Arabidopsis >gi|13877759|gb|AAK43957.1|AF370142_1 unknown protein
  misc_feature (1)..(336): Homolog of NCBI NO: 26451756 NR Description: unknown protein [Arabidopsis thaliana]
  misc_feature (1)..(327): Homolog of NCBI NO: 18408451 NR Description: expressed protein; protein id: At1g66180.1, by cDNA: 99625., supported by cDNA: gi_14334807, supported by gi_15293194 [Arabidopsis thaliana] >gi|25404595|pir||F96686
  misc_feature (1)..(327): Homolog of NCBI NO: 21618176 NR Description: unknown [Arabidopsis thaliana]
  misc_feature (1)..(327): Homolog of NCBI NO: 18421660 NR Description: putative protein; protein id: At5g37540.1, by cDNA: gi_15809849, supported by cDNA: gi_20260181 [Arabidopsis >gi|10177438|dbj|BAB10671.1| contains similarity to nucleoid
  misc_feature (1)..(327): Homolog of NCBI NO: 34895664 NR Description: nucleoid DNA-binding protein cnd41-like protein
  misc_feature (46)..(46): Xaa is any aa, unknown or other
MGESFRPRDSATFAAVPCGSAQCSSRDLPAPPSCDGASRQCSVSLXYADGSTSDGALATDVFAVGDAPPLRSAFGCMSTAYDSSPDGVATAGLLGMNRGTLSFVTQASTRRFSYCISDRDDAGVLLLGHSDLPFLPLNYTPLYQPTLPLPYFDRVAYSVQLLGIRVGGKPLPIPASVLAPDHTGAGQTMVDSGTQFTFLLGDAYSALKAEFLKQTKPLLPALGDPSFAFQEALDTCFRVPAGRPPPSARLPPVTLLFNGAEMSVAGDRLLYKVPGERRGADGVWCLTFGNADMVPLTAYVIGHHHQMNLWVEYDLERGRVGITPVKCDVASERLGLML

SEQ ID NO: 10432 - DNA, 1576 bp, Zea mays subsp. mays
  misc_feature (1)..(1576): Ceres Seq. ID no. 12400844
  misc_feature: MA Experiment ID: 20000487 Result: Down-regulated in Transcription
  misc_feature: MA Experiment 20000487 PARAMETER Experiment Name: Zm_50mM_NH4NO3_L_to_H_P Parameter: Organism Value: Zea mays
  misc_feature: MA Experiment 20000487 PARAMETER Experiment Name: Zm_50mM_NH4NO3_L_to_H_P Parameter: Timepoint (hr) Value: 4
  misc_feature: MA Experiment 20000487 PARAMETER Experiment Name: Zm_50mM_NH4NO3_L_to_H_P Parameter: Tissue Value: Leaves
  misc_feature: MA Experiment 20000487 PARAMETER Experiment Name: Zm_50mM_NH4NO3_L_to_H_P Parameter: Treatment Value: 50mM NH4NO3 vs. 100mM Mannitol
tcttccccgtccctgtcgccatctatcactttccccgtttgcgttttggcccgaatctccgtctccgtctccgtctccatctccatctcctagccgccgcggctccactcctcagtcctcagtccgaagcgaactctccctccgcatccactgccaccatgagccgcgatcgctacttccaccgcctcctcgacctccacctccacgccaacgacgacctcttcttccccttccctacccctgcctcgtcctgcccctacatcaccgcctcctccgcncaccancgcttcctcctcgacgaccaccccttctacccaacctcctgcncgctcggcatcacctcccgctccccgatcgangacaccttcgacctcgacctcctcctccccctccccctccacgccgccgtctccgcgcccccgtgcgcggccttcgacttcgaccccttcctcctcgacaccctcggccaccgcatctccgtcctcgagcgcgcgctcgccctcgccccaccccgccgcaagtacacctacgccgccgaggccaacggcaggaagctcaagtggaccgccgaggacaggcccgccgggggccgcaacctcaagtgggaggccgagctcaggaccccgcacaccgacggcttcgaccgcaagtggaagtgggagtccaaggagtccgccaccggttccaccaaggtcaagtgggccaaggagatcaaggggaagggctgcctcgagccttggtccaactcctactccgtcgaggagacctacggtgaggatgaccatgccgacgacgacagggagaagaagaaacccactggcgtccagaagaaagtcaagggggaaaacaagcagcagcagaagaagcagggcaatgtggagatcgtcgagatcgaggacaacactgccggatgcgtcgccatcagaaaggcttttgaaatgaaccactacaagggcaagaggaaggaactttccccacaggatgccgcactgctcatccagatgaactacagggcgcacctggcccatcgctcccaggtgctccgttgccttcgcgacctcgccgtcgccaaggccaagctcaaggagatcaggtccttcttctacaacatcacataccgccgccgcatcgcatatgacaatgaagagcgccagaggtttgctgagaagatcattgtcctgctactgacagttgatgcccttgagggaccggactacatggtccgcaacgcaaggaggtccatgctggaggagctggaggggatgctggagatcgtggagcctcagccgccggggaagccgaggacgcttagccgcaggaggttcgatctcccagaaggcggagccatcgaaaaggagacgagggaggagggcaagtgaagtgcatcggtgggtggtggcatgcttgggcagtttggtatgcgcgatgcggactatagagtttgagtttgtgctgctaccgaaccgtggaccaccttaccccgttgagatgtttgatagctggactttttgtgctgttgtatttgtagaccagaacgttgttctttgtaataaattggcgtgtgctgctttttgcc

SEQ ID NO: 10433 - protein, 458 aa, Zea mays subsp. mays
  peptide (1)..(458): Ceres Seq. ID no. 12400845
  misc_feature (326)..(346): Pfam Name: IQ calmodulin-binding motif Pfam Description: IQ calmodulin-binding motif
  misc_feature (66)..(452): Homolog of NCBI NO: 34897716 NR Description: ESTs AU082316(E3368),D41461(S3973) correspond to
  misc_feature (169)..(455): Homolog of NCBI NO: 15241803 NR Description: KED - like protein; protein id: At5g62390.1, by cDNA: gi_20260357 [Arabidopsis thaliana] dbj|BAA90612.1~gene_id:MMI9.22~similar to unknown protein
  misc_feature (92)..(92): Xaa is any aa, unknown or other
  misc_feature (94)..(94): Xaa is any aa, unknown or other
  misc_feature (109)..(109): Xaa is any aa, unknown or other
  misc_feature (119)..(119): Xaa is any aa, unknown or other
FPVPVAIYHFPRLRFGPNLRLRLRLHLHLLAAAAPLLSPQSEANSPSASTATMSRDRYFHRLLDLHLHANDDLFFPFPTPASSCPYITASSXHXRFLLDDHPFYPTSCXLGITSRSPIXDTFDLDLLLPLPLHAAVSAPPCAAFDFDPFLLDTLGHRISVLERALALAPPRRKYTYAAEANGRKLKWTAEDRPAGGRNLKWEAELRTPHTDGFDRKWKWESKESATGSTKVKWAKEIKGKGCLEPWSNSYSVEETYGEDDHADDDREKKKPTGVQKKVKGENKQQQKKQGNVEIVEIEDNTAGCVAIRKAFEMNHYKGKRKELSPQDAALLIQMNYRAHLAHRSQVLRCLRDLAVAKAKLKEIRSFFYNITYRRRIAYDNEERQRFAEKIIVLLLTVDALEGPDYMVRNARRSMLEELEGMLEIVEPQPPGKPRTLSRRRFDLPEGGAIEKETREEGK

SEQ ID NO: 10434 - protein, 406 aa, Zea mays subsp. mays
  peptide (1)..(406): Ceres Seq. ID no. 12400846
  misc_feature (274)..(294): Pfam Name: IQ calmodulin-binding motif Pfam Description: IQ calmodulin-binding motif
  misc_feature (14)..(400): Homolog of NCBI NO: 34897716 NR Description: ESTs AU082316(E3368),D41461(S3973) correspond to
  misc_feature (117)..(403): Homolog of NCBI NO: 15241803 NR Description: KED - like protein; protein id: At5g62390.1, by cDNA: gi_20260357 [Arabidopsis thaliana] dbj|BAA90612.1~gene_id:MMI9.22~similar to unknown protein
  misc_feature (40)..(40): Xaa is any aa, unknown or other
  misc_feature (42)..(42): Xaa is any aa, unknown or other
  misc_feature (57)..(57): Xaa is any aa, unknown or other
  misc_feature (67)..(67): Xaa is any aa, unknown or other
MSRDRYFHRLLDLHLHANDDLFFPFPTPASSCPYITASSXHXRFLLDDHPFYPTSCXLGITSRSPIXDTFDLDLLLPLPLHAAVSAPPCAAFDFDPFLLDTLGHRISVLERALALAPPRRKYTYAAEANGRKLKWTAEDRPAGGRNLKWEAELRTPHTDGFDRKWKWESKESATGSTKVKWAKEIKGKGCLEPWSNSYSVEETYGEDDHADDDREKKKPTGVQKKVKGENKQQQKKQGNVEIVEIEDNTAGCVAIRKAFEMNHYKGKRKELSPQDAALLIQMNYRAHLAHRSQVLRCLRDLAVAKAKLKEIRSFFYNITYRRRIAYDNEERQRFAEKIIVLLLTVDALEGPDYMVRNARRSMLEELEGMLEIVEPQPPGKPRTLSRRRFDLPEGGAIEKETREEGK

SEQ ID NO: 10435 - protein, 257 aa, Zea mays subsp. mays
  peptide (1)..(257): Ceres Seq. ID no. 12400847
  misc_feature (2)..(172): Pfam Name: Formin Homology 2 Domain Pfam Description: Formin Homology 2 Domain
  misc_feature (17)..(195): Homolog of NCBI NO: 25412275 NR Description: hypothetical protein At2g25050 [imported] - thaliana >gi|4559347|gb|AAD23008.1| hypothetical protein
  misc_feature (2)..(172): Homolog of NCBI NO: 20138131 NR Description: Vegetative cell wall protein gp1 precursor rich glycoprotein 1) >gi|12018147|gb|AAG45420.1|AF309494_1
  misc_feature (17)..(195): Homolog of NCBI NO: 30682634 NR Description: formin homology 2 (FH2) domain-containing protein
  misc_feature (93)..(93): Xaa is any aa, unknown or other
  misc_feature (95)..(95): Xaa is any aa, unknown or other
  misc_feature (109)..(109): Xaa is any aa, unknown or other
  misc_feature (120)..(120): Xaa is any aa, unknown or other
LPRPCRHLSLSPFAFWPESPSPSPSPSPSPSRRGSTPQSSVRSELSLRIHCHHEPRSLLPPPPRPPPPRQRRPLLPLPYPCLVLPLHHRLLRXPXLPPRRPPLLPNLLXARHHLPLPDRXHLRPRPPPPPPPPRRRLRAPVRGLRLRPLPPRHPRPPHLRPRARARPRPTPPQVHLRRRGQRQEAQVDRRGQARRGPQPQVGGRAQDPAHRRLRPQVEVGVQGVRHRFHQGQVGQGDQGEGLPRALVQLLLRRGDLR

SEQ ID NO: 10436 - DNA, 1080 bp, Zea mays subsp. mays
  misc_feature (1)..(1080): Ceres Seq. ID no. 12372229
  misc_feature: MA Experiment ID: 108535 Result: Up-regulated in Transcription
  misc_feature: MA Experiment 108535 PARAMETER Experiment Name: Zm_Meristem_P Parameter: Age (day) Value: 8
  misc_feature: MA Experiment 108535 PARAMETER Experiment Name: Zm_Meristem_P Parameter: Organism Value: Zea mays
  misc_feature: MA Experiment 108535 PARAMETER Experiment Name: Zm_Meristem_P Parameter: Plant Line Value: 35A19
  misc_feature: MA Experiment 108535 PARAMETER Experiment Name: Zm_Meristem_P Parameter: Tissue Value: Root Meristem vs. Above Root Meristem
gtacccgcgccgctcacgcccatccatcccttcgcgcacgcaacgcaaaaacaagcacaaacacgcgcgatccgatctgggccggccaagcagccacccatccatggcgactagggtttggctcaccgccctcctgcttggtttcctcgtcgccgcctcccccttcaccagccgagttgctagagctgaatccgaggaagatgctgctgcagctgaggttgttgaaggggctgatctaggtattgtgggtgatgatacacaggtttccagtgatggacctttaagtcctgctcctggtgtagagacagtagttgtcttcccaaaaaatgctggcaaaattgtactagcaggtgaagaaactgaattactagttggtctgcaaaatgacggtgaatcaattttgaatgttgttgctgttcattcaactctccatcttccttttgaccacaatatgtatggccagaaccttactgttcagaatttcttcaattcatcagttcctgtttctgtgcaagcaaccttcccctacaagttcgttgtgagcaagttcttgcagcctggagcatatgatctggttggttacatagtgtatgagatcgaccagcacccttaccagaatgtattctacaatggcactatcgaggttgttgaggctgtaggcttactcagtgttgagtctgtgttcctcatcacccttggatttgcacttcttggtctgtttggattgtgggcatatggccaggttcagcagctctcgaagaaaacaaagaaggcacccaaggtggagctcggaactggaacaactgatgccaacatcgatgagtggctggagggcacttcgtttgtgcagagaagcaaatccaagaagaagcagacctgagtctctccaggcttagttaaatccttttgaggatctagaatgaggcatttgagggtagcccttcacaagtgacttttgcagaaagatagatgcgtaaggaggtgctgaaaaccgtaaacatcttcattgacattttcgaccttagtgtactttacatggaacaaaattttgttaaaagaaagtatatgctgtggtttctg

SEQ ID NO: 10437 - protein, 292 aa, Zea mays subsp. mays
  peptide (1)..(292): Ceres Seq. ID no. 12372230
  misc_feature (41)..(290): Homolog of NCBI NO: 21555380 NR Description: putative signal sequence receptor, alpha subunit
  misc_feature (41)..(290): Homolog of NCBI NO: 18399609 NR Description: putative signal sequence receptor, alpha subunit alpha); protein id: At2g21160.1, supported by cDNA: 27787.,
  misc_feature (41)..(290): Homolog of NCBI NO: 25335776 NR Description: hypothetical protein At2g21160 [imported] -
  misc_feature (44)..(290): Homolog of NCBI NO: 547391 NR Description: alpha-subunit; putative
  misc_feature (159)..(291): Homolog of NCBI NO: 15227250 NR Description: putative TRAP protein; protein id: At2g16595.1 thaliana] >gi|20197462|gb|AAM15085.1| putative TRAP protein thaliana] >gi|20198182|gb|AAM15448.1| putative TRAP protein
YPRRSRPSIPSRTQRKNKHKHARSDLGRPSSHPSMATRVWLTALLLGFLVAASPFTSRVARAESEEDAAAAEVVEGADLGIVGDDTQVSSDGPLSPAPGVETVVVFPKNAGKIVLAGEETELLVGLQNDGESILNVVAVHSTLHLPFDHNMYGQNLTVQNFFNSSVPVSVQATFPYKFVVSKFLQPGAYDLVGYIVYEIDQHPYQNVFYNGTIEVVEAVGLLSVESVFLITLGFALLGLFGLWAYGQVQQLSKKTKKAPKVELGTGTTDANIDEWLEGTSFVQRSKSKKKQT

SEQ ID NO: 10438 - protein, 258 aa, Zea mays subsp. mays
  peptide (1)..(258): Ceres Seq. ID no. 12372231
  misc_feature (7)..(256): Homolog of NCBI NO: 21555380 NR Description: putative signal sequence receptor, alpha subunit
  misc_feature (7)..(256): Homolog of NCBI NO: 18399609 NR Description: putative signal sequence receptor, alpha subunit alpha); protein id: At2g21160.1, supported by cDNA: 27787.,
  misc_feature (7)..(256): Homolog of NCBI NO: 25335776 NR Description: hypothetical protein At2g21160 [imported] -
  misc_feature (10)..(256): Homolog of NCBI NO: 547391 NR Description: alpha-subunit; putative
  misc_feature (125)..(257): Homolog of NCBI NO: 15227250 NR Description: putative TRAP protein; protein id: At2g16595.1 thaliana] >gi|20197462|gb|AAM15085.1| putative TRAP protein thaliana] >gi|20198182|gb|AAM15448.1| putative TRAP protein
MATRVWLTALLLGFLVAASPFTSRVARAESEEDAAAAEVVEGADLGIVGDDTQVSSDGPLSPAPGVETVVVFPKNAGKIVLAGEETELLVGLQNDGESILNVVAVHSTLHLPFDHNMYGQNLTVQNFFNSSVPVSVQATFPYKFVVSKFLQPGAYDLVGYIVYEIDQHPYQNVFYNGTIEVVEAVGLLSVESVFLITLGFALLGLFGLWAYGQVQQLSKKTKKAPKVELGTGTTDANIDEWLEGTSFVQRSKSKKKQT

SEQ ID NO: 10439 - DNA, 1693 bp, Zea mays subsp. mays
  misc_feature (1)..(1693): Ceres Seq. ID no. 12566679
  misc_feature: MA Experiment ID: 108530 Result: Down-regulated in Transcription
  misc_feature: MA Experiment 108530 PARAMETER Experiment Name: Zm_Imbibed_Seeds_P Parameter: Age (day) Value: 6 vs. 2
  misc_feature: MA Experiment 108530 PARAMETER Experiment Name: Zm_Imbibed_Seeds_P Parameter: Organism Value: Zea mays
  misc_feature: MA Experiment 108530 PARAMETER Experiment Name: Zm_Imbibed_Seeds_P Parameter: Plant Line Value: 35A19
  misc_feature: MA Experiment 108530 PARAMETER Experiment Name: Zm_Imbibed_Seeds_P Parameter: Tissue Value: Aerial vs. Embryo
  misc_feature: MA Experiment ID: 108535 Result: Up-regulated in Transcription
  misc_feature: MA Experiment 108535 PARAMETER Experiment Name: Zm_Meristem_P Parameter: Age (day) Value: 8
  misc_feature: MA Experiment 108535 PARAMETER Experiment Name: Zm_Meristem_P Parameter: Organism Value: Zea mays
  misc_feature: MA Experiment 108535 PARAMETER Experiment Name: Zm_Meristem_P Parameter: Plant Line Value: 35A19
  misc_feature: MA Experiment 108535 PARAMETER Experiment Name: Zm_Meristem_P Parameter: Tissue Value: Root Meristem vs. Above Root Meristem
  misc_feature: MA Experiment ID: 108556 Result: Down-regulated in Transcription
  misc_feature: MA Experiment 108556 PARAMETER Experiment Name: Zm_Drought_P Parameter: Age (day) Value: 9
  misc_feature: MA Experiment 108556 PARAMETER Experiment Name: Zm_Drought_P Parameter: Organism Value: Zea mays
  misc_feature: MA Experiment 108556 PARAMETER Experiment Name: Zm_Drought_P Parameter: Plant Line Value: 35A19
  misc_feature: MA Experiment 108556 PARAMETER Experiment Name: Zm_Drought_P Parameter: Timepoint (hr) Value: 24
  misc_feature: MA Experiment 108556 PARAMETER Experiment Name: Zm_Drought_P Parameter: Tissue Value: Aerial
  misc_feature: MA Experiment 108556 PARAMETER Experiment Name: Zm_Drought_P Parameter: Treatment Value: Drought vs. No Drought
  misc_feature: MA Experiment ID: 20000487 Result: Up-regulated in Transcription
  misc_feature: MA Experiment 20000487 PARAMETER Experiment Name: Zm_50mM_NH4NO3_L_to_H_P Parameter: Organism Value: Zea mays
  misc_feature: MA Experiment 20000487 PARAMETER Experiment Name: Zm_50mM_NH4NO3_L_to_H_P Parameter: Timepoint (hr) Value: 4
  misc_feature: MA Experiment 20000487 PARAMETER Experiment Name: Zm_50mM_NH4NO3_L_to_H_P Parameter: Tissue Value: Leaves
  misc_feature: MA Experiment 20000487 PARAMETER Experiment Name: Zm_50mM_NH4NO3_L_to_H_P Parameter: Treatment Value: 50mM NH4NO3 vs. 100mM Mannitol
  misc_feature: MA Experiment ID: 20000488 Result: Up-regulated in Transcription
  misc_feature: MA Experiment 20000488 PARAMETER Experiment Name: Zm_50mM_NH4NO3_L_to_H_P Parameter: Organism Value: Zea mays
  misc_feature: MA Experiment 20000488 PARAMETER Experiment Name: Zm_50mM_NH4NO3_L_to_H_P Parameter: Timepoint (hr) Value: 8
  misc_feature: MA Experiment 20000488 PARAMETER Experiment Name: Zm_50mM_NH4NO3_L_to_H_P Parameter: Tissue Value: Leaves
  misc_feature: MA Experiment 20000488 PARAMETER Experiment Name: Zm_50mM_NH4NO3_L_to_H_P Parameter: Treatment Value: 50mM NH4NO3 vs. 100mM Mannitol
  misc_feature: MA Experiment ID: 20000492 Result: Up-regulated in Transcription
  misc_feature: MA Experiment 20000492 PARAMETER Experiment Name: Zm_Hybrid_Seed_Dev_P Parameter: DAP Value: 12
  misc_feature: MA Experiment 20000492 PARAMETER Experiment Name: Zm_Hybrid_Seed_Dev_P Parameter: Organism Value: Zea mays
  misc_feature: MA Experiment 20000492 PARAMETER Experiment Name: Zm_Hybrid_Seed_Dev_P Parameter: Plant Line Value: 35A19
  misc_feature: MA Experiment 20000492 PARAMETER Experiment Name: Zm_Hybrid_Seed_Dev_P Parameter: Tissue Value: Fert Kernel vs. Unfert Floret
  misc_feature: MA Experiment ID: 20000626 Result: Up-regulated in Transcription
  misc_feature: MA Experiment 20000626 PARAMETER Experiment Name: Zm_Herbicide-Treatments_P Parameter: Timepoint (hr) Value: 12
  misc_feature: MA Experiment 20000626 PARAMETER Experiment Name: Zm_Herbicide-Treatments_P Parameter: Tissue Value: Aerial
  misc_feature: MA Experiment 20000626 PARAMETER Experiment Name: Zm_Herbicide-Treatments_P Parameter: Treatment Value: Roundup vs. No Treatment
  misc_feature: MA Experiment ID: 20001606 Result: Up-regulated in Transcription
  misc_feature: MA Experiment 20001606 PARAMETER Experiment Name: Zm_50ppm_KNO3_L-to-H_P Parameter: Age (day) Value: 19
  misc_feature: MA Experiment 20001606 PARAMETER Experiment Name: Zm_50ppm_KNO3_L-to-H_P Parameter: Organism Value: Zea mays
  misc_feature: MA Experiment 20001606 PARAMETER Experiment Name: Zm_50ppm_KNO3_L-to-H_P Parameter: Plant Line Value: 35A19
  misc_feature: MA Experiment 20001606 PARAMETER Experiment Name: Zm_50ppm_KNO3_L-to-H_P Parameter: Timepoint (hr) Value: 8
  misc_feature: MA Experiment 20001606 PARAMETER Experiment Name: Zm_50ppm_KNO3_L-to-H_P Parameter: Tissue Value: Shoots
  misc_feature: MA Experiment 20001606 PARAMETER Experiment Name: Zm_50ppm_KNO3_L-to-H_P Parameter: Treatment Value: 50ppm KNO3 vs. 50ppm KCl
actactctggtcgtcctcgcgccgccgcagcagcagcagcgacgcgaccgccggtaatggcttccaccgttgtgctccggaacgccggctcccgccgactcttctgctactccactctccgcgccgccgcaatattgggacccgccgcgccacctgatgcgcccgcggcggcgtcggcccagccgccaccgatggcaggaaccctctgggcgaggtccatggccactttcacgcgcacgaagccacatgtgaacgtcggcaccattgggcacgtcgatcacggcaaaaccacactcactgccgccattaccaaggttctggcagaggcagggaaggccaaagcagttgcttttgacgagatcgacaaggccccggaagagagagccagaggaatcaccattgcaacagctcatgtcgagtatgagacggctaaaaggcattatgctcatgttgattgtccaggtcacgcagattatgtcaagaacatgatcactggagctgctcaaatggatggtggtattcttgtcgtgtcagctcctgatggcccaatgccacaaacaaaggagcacattcttcttgcccgtcaggttggtgtaccttcccttgtgtgcttcttaaacaaagttgatgctgttgatgacccagagctactggaacttgtagagatggagcttcgggagctcctcagtttctacaagttccctggtgatgagattccgatcatccgtgggtctgcgttgtctgctttgcaagggaacaacgatgagataggaaagaatgccattttgaaactaatggatgcagttgatgagtacattcctgatcctgtaaggcagcttgataaggctttcttgatgccgatagaagatgtgttttctatccagggtcgtggaactgttgttactgggcgtgttgagcagggaacaattaaaactggcgaagatgttgagatcttgggtttgacacagagtggtcccttgaagactacagttactggtgttgagatgttcaaaaagatactggaccatggagaggctggtgacaacgttggtcttcttcttcgtggtctaaagcgtggtgatgtcgagcgtggccaggtggtgtgcaaacctggtagtctgaagacatacaaaaagtttgaggcagaaatatacgtcctgacaaaggatgaaggtggccggcacactgcctttgtcacaaattacacaccccaattctacttcaggactgctgatgtcactggaaaggttgagttgcttggtgagacgaagatggttttgcccggtgacaatgtaaccgcgaatttcgagttgatatcgcctgttcctcttgaaactgggcaaagatttgcgatgagggaaggagggaggacagttggtgccggggttgtctccaaagttattagctgatgagtttccagtttcttgcccgtagcaatttagtaaagaaatgaatgctgacatgtttcttggaatgcatgggcaaaaaggcagagctggctggtctggccgccattcattctggacagtaccttgtgctttcttgttgaggtggctcatcataaagcatattttgtagccacttttccgagttgatattagtgggttcttaccaaatttaccgcgaaaattgctggtcatgttgggccgatgcgtcgttcttcgataggagatgaagtgctgttatcagtgcc

SEQ ID NO: 10440 - protein, 468 aa, Zea mays subsp. mays
  peptide (1)..(468): Ceres Seq. ID no. 12566680
  misc_feature (80)..(276): Pfam Name: Elongation factor Tu GTP binding domain Pfam Description: Elongation factor Tu GTP binding domain
  misc_feature (19)..(468): Homolog of NCBI NO: 11181616 NR Description: translational elongation factor EF-TuM [Zea mays]
  misc_feature (19)..(468): Homolog of NCBI NO: 18001149 NR Description: translational elongation factor Tu [Oryza sativa] elongation factor Tu [Oryza sativa] >gi|27573344|gb|AAO20062.1|
  misc_feature (19)..(468): Homolog of NCBI NO: 15236220 NR Description: mitochondrial elongation factor Tu; protein id: [Arabidopsis thaliana] >gi|25090254|sp|Q9ZT91|EFTM_ARATH factor Tu, mitochondrial precursor >gi|7443411|pir||T01400
  misc_feature (67)..(468): Homolog of NCBI NO: 1149571 NR Description: mitochondrial elongation factor Tu [Arabidopsis
  misc_feature (74)..(467): Homolog of NCBI NO: 23054529 NR Description: hypothetical protein [Geobacter metallireducens]
  misc_feature (66)..(467): Homolog of NCBI NO: 22966137 NR Description: hypothetical protein [Rhodospirillum rubrum]
  misc_feature (76)..(467): Homolog of NCBI NO: 22998293 NR Description: hypothetical protein [Magnetococcus sp. MC-1]
  misc_feature (69)..(467): Homolog of NCBI NO: 22965193 NR Description: hypothetical protein [Rhodopseudomonas palustris]
  misc_feature (74)..(466): Homolog of NCBI NO: 15892931 NR Description: elongation factor EF-Tu [Rickettsia conorii]
  misc_feature (76)..(468): Homolog of NCBI NO: 30526332 NR Description: translation elongation factor TU [Lactuca sativa
YSGRPRAAAAAAATRPPVMASTVVLRNAGSRRLFCYSTLRAAAILGPAAPPDAPAAASAQPPPMAGTLWARSMATFTRTKPHVNVGTIGHVDHGKTTLTAAITKVLAEAGKAKAVAFDEIDKAPEERARGITIATAHVEYETAKRHYAHVDCPGHADYVKNMITGAAQMDGGILVVSAPDGPMPQTKEHILLARQVGVPSLVCFLNKVDAVDDPELLELVEMELRELLSFYKFPGDEIPIIRGSALSALQGNNDEIGKNAILKLMDAVDEYIPDPVRQLDKAFLMPIEDVFSIQGRGTVVTGRVEQGTIKTGEDVEILGLTQSGPLKTTVTGVEMFKKILDHGEAGDNVGLLLRGLKRGDVERGQVVCKPGSLKTYKKFEAEIYVLTKDEGGRHTAFVTNYTPQFYFRTADVTGKVELLGETKMVLPGDNVTANFELISPVPLETGQRFAMREGGRTVGAGVVSKVIS

SEQ ID NO: 10441 - protein, 450 aa, Zea mays subsp. mays
  peptide (1)..(450): Ceres Seq. ID no. 12566681
  misc_feature (62)..(258): Pfam Name: Elongation factor Tu GTP binding domain Pfam Description: Elongation factor Tu GTP binding domain
  misc_feature (48)..(449): Homolog of NCBI NO: 22966137 NR Description: hypothetical protein [Rhodospirillum rubrum]
  misc_feature (58)..(449): Homolog of NCBI NO: 22998293 NR Description: hypothetical protein [Magnetococcus sp. MC-1]
  misc_feature (51)..(449): Homolog of NCBI NO: 22965193 NR Description: hypothetical protein [Rhodopseudomonas palustris]
  misc_feature (1)..(450): Homolog of NCBI NO: 18001149 NR Description: translational elongation factor Tu [Oryza sativa] elongation factor Tu [Oryza sativa] >gi|27573344|gb|AAO20062.1|
  misc_feature (49)..(450): Homolog of NCBI NO: 1149571 NR Description: mitochondrial elongation factor Tu [Arabidopsis
  misc_feature (56)..(449): Homolog of NCBI NO: 23054529 NR Description: hypothetical protein [Geobacter metallireducens]
  misc_feature (1)..(450): Homolog of NCBI NO: 15236220 NR Description: mitochondrial elongation factor Tu; protein id: [Arabidopsis thaliana] >gi|25090254|sp|Q9ZT91|EFTM_ARATH factor Tu, mitochondrial precursor >gi|7443411|pir||T01400
  misc_feature (1)..(450): Homolog of NCBI NO: 11181616 NR Description: translational elongation factor EF-TuM [Zea mays]
  misc_feature (56)..(448): Homolog of NCBI NO: 15892931 NR Description: elongation factor EF-Tu [Rickettsia conorii]
  misc_feature (58)..(450): Homolog of NCBI NO: 30526332 NR Description: translation elongation factor TU [Lactuca sativa
MASTVVLRNAGSRRLFCYSTLRAAAILGPAAPPDAPAAASAQPPPMAGTLWARSMATFTRTKPHVNVGTIGHVDHGKTTLTAAITKVLAEAGKAKAVAFDEIDKAPEERARGITIATAHVEYETAKRHYAHVDCPGHADYVKNMITGAAQMDGGILVVSAPDGPMPQTKEHILLARQVGVPSLVCFLNKVDAVDDPELLELVEMELRELLSFYKFPGDEIPIIRGSALSALQGNNDEIGKNAILKLMDAVDEYIPDPVRQLDKAFLMPIEDVFSIQGRGTVVTGRVEQGTIKTGEDVEILGLTQSGPLKTTVTGVEMFKKILDHGEAGDNVGLLLRGLKRGDVERGQVVCKPGSLKTYKKFEAEIYVLTKDEGGRHTAFVTNYTPQFYFRTADVTGKVELLGETKMVLPGDNVTANFELISPVPLETGQRFAMREGGRTVGAGVVSKVIS

SEQ ID NO: 10442 - protein, 405 aa, Zea mays subsp. mays
  peptide (1)..(405): Ceres Seq. ID no. 12566682
  misc_feature (17)..(213): Pfam Name: Elongation factor Tu GTP binding domain Pfam Description: Elongation factor Tu GTP binding domain
  misc_feature (1)..(405): Homolog of NCBI NO: 11181616 NR Description: translational elongation factor EF-TuM [Zea mays]
  misc_feature (1)..(405): Homolog of NCBI NO: 18001149 NR Description: translational elongation factor Tu [Oryza sativa] elongation factor Tu [Oryza sativa] >gi|27573344|gb|AAO20062.1|
  misc_feature (1)..(405): Homolog of NCBI NO: 15236220 NR Description: mitochondrial elongation factor Tu; protein id: [Arabidopsis thaliana] >gi|25090254|sp|Q9ZT91|EFTM_ARATH factor Tu, mitochondrial precursor >gi|7443411|pir||T01400
  misc_feature (4)..(405): Homolog of NCBI NO: 1149571 NR Description: mitochondrial elongation factor Tu [Arabidopsis
  misc_feature (11)..(404): Homolog of NCBI NO: 23054529 NR Description: hypothetical protein [Geobacter metallireducens]
  misc_feature (3)..(404): Homolog of NCBI NO: 22966137 NR Description: hypothetical protein [Rhodospirillum rubrum]
  misc_feature (13)..(404): Homolog of NCBI NO: 22998293 NR Description: hypothetical protein [Magnetococcus sp. MC-1]
  misc_feature (6)..(404): Homolog of NCBI NO: 22965193 NR Description: hypothetical protein [Rhodopseudomonas palustris]
  misc_feature (11)..(403): Homolog of NCBI NO: 15892931 NR Description: elongation factor EF-Tu [Rickettsia conorii]
  misc_feature (13)..(405): Homolog of NCBI NO: 30526332 NR Description: translation elongation factor TU [Lactuca sativa
MAGTLWARSMATFTRTKPHVNVGTIGHVDHGKTTLTAAITKVLAEAGKAKAVAFDEIDKAPEERARGITIATAHVEYETAKRHYAHVDCPGHADYVKNMITGAAQMDGGILVVSAPDGPMPQTKEHILLARQVGVPSLVCFLNKVDAVDDPELLELVEMELRELLSFYKFPGDEIPIIRGSALSALQGNNDEIGKNAILKLMDAVDEYIPDPVRQLDKAFLMPIEDVFSIQGRGTVVTGRVEQGTIKTGEDVEILGLTQSGPLKTTVTGVEMFKKILDHGEAGDNVGLLLRGLKRGDVERGQVVCKPGSLKTYKKFEAEIYVLTKDEGGRHTAFVTNYTPQFYFRTADVTGKVELLGETKMVLPGDNVTANFELISPVPLETGQRFAMREGGRTVGAGVVSKVIS

SEQ ID NO: 10443 - DNA, 519 bp, Zea mays subsp. mays
  misc_feature (1)..(519): Ceres Seq. ID no. 1324806
  misc_feature: MA Experiment ID: 108522 Result: Up-regulated in Transcription
  misc_feature: MA Experiment 108522 PARAMETER Experiment Name: Zm_42deg_Heat_P Parameter: Age (day) Value: 8
  misc_feature: MA Experiment 108522 PARAMETER Experiment Name: Zm_42deg_Heat_P Parameter: Organism Value: Zea mays
  misc_feature: MA Experiment 108522 PARAMETER Experiment Name: Zm_42deg_Heat_P Parameter: Plant Line Value: 35A19
  misc_feature: MA Experiment 108522 PARAMETER Experiment Name: Zm_42deg_Heat_P Parameter: Temperature (deg C) Value: 42 vs. 22
  misc_feature: MA Experiment 108522 PARAMETER Experiment Name: Zm_42deg_Heat_P Parameter: Timepoint (hr) Value: 1
  misc_feature: MA Experiment 108522 PARAMETER Experiment Name: Zm_42deg_Heat_P Parameter: Tissue Value: Aerial
  misc_feature: MA Experiment ID: 108523 Result: Up-regulated in Transcription
  misc_feature: MA Experiment 108523 PARAMETER Experiment Name: Zm_42deg_Heat_P Parameter: Age (day) Value: 8
  misc_feature: MA Experiment 108523 PARAMETER Experiment Name: Zm_42deg_Heat_P Parameter: Organism Value: Zea mays
  misc_feature: MA Experiment 108523 PARAMETER Experiment Name: Zm_42deg_Heat_P Parameter: Plant Line Value: 35A19
  misc_feature: MA Experiment 108523 PARAMETER Experiment Name: Zm_42deg_Heat_P Parameter: Temperature (deg C) Value: 42 vs. 22
  misc_feature: MA Experiment 108523 PARAMETER Experiment Name: Zm_42deg_Heat_P Parameter: Timepoint (hr) Value: 6
  misc_feature: MA Experiment 108523 PARAMETER Experiment Name: Zm_42deg_Heat_P Parameter: Tissue Value: Aerial
  misc_feature: MA Experiment ID: 108559 Result: Up-regulated in Transcription
  misc_feature: MA Experiment 108559 PARAMETER Experiment Name: Zm_5mM_NO_P Parameter: Age (day) Value: 8
  misc_feature: MA Experiment 108559 PARAMETER Experiment Name: Zm_5mM_NO_P Parameter: Organism Value: Zea mays
  misc_feature: MA Experiment 108559 PARAMETER Experiment Name: Zm_5mM_NO_P Parameter: Plant Line Value: 35A19
  misc_feature: MA Experiment 108559 PARAMETER Experiment Name: Zm_5mM_NO_P Parameter: Timepoint (hr) Value: 12
  misc_feature: MA Experiment 108559 PARAMETER Experiment Name: Zm_5mM_NO_P Parameter: Tissue Value: Aerial
  misc_feature: MA Experiment 108559 PARAMETER Experiment Name: Zm_5mM_NO_P Parameter: Treatment Value: 5mM NO vs. No Treatment
  misc_feature: MA Experiment ID: 20000487 Result: Up-regulated in Transcription
  misc_feature: MA Experiment 20000487 PARAMETER Experiment Name: Zm_50mM_NH4NO3_L_to_H_P Parameter: Organism Value: Zea mays
  misc_feature: MA Experiment 20000487 PARAMETER Experiment Name: Zm_50mM_NH4NO3_L_to_H_P Parameter: Timepoint (hr) Value: 4
  misc_feature: MA Experiment 20000487 PARAMETER Experiment Name: Zm_50mM_NH4NO3_L_to_H_P Parameter: Tissue Value: Leaves
  misc_feature: MA Experiment 20000487 PARAMETER Experiment Name: Zm_50mM_NH4NO3_L_to_H_P Parameter: Treatment Value: 50mM NH4NO3 vs. 100mM Mannitol
atcctaatcgaaaaatcgatctattctcgtctgaagcaattcgcccctgtcgtgagcagaaccctacagctcgtattcgcctcatctcgcagcagcagcagaagaacaagggtatggcgaaggatgggggtcccgactggaacggcctgctcaagtggagcctcgcccacggsacggcaccaacccgccgcgtgctctcagcgaggaagacagaaaatggttcatggatgctatgcaagccaacacggtagatgttgtgaagaggatgaaggagatcactcaggtgatgaaaactccagaagatgtcttgcagtctcagggcgtgacccctgagaacatcgaagatatgttggatgagctacaggagcatgttgaatccattgacatggcaaatgatctacattctattggtgggctggatcctctacttggttacttgaaaaattcaaatgctggcatccgagcaaaggcagcagaagttgttagtacaattgtgcagaataatccccacgagtcagc

SEQ ID NO: 10444 - protein, 110 aa, Zea mays subsp. mays
  peptide (1)..(110): Ceres Seq. ID no. 1324807
  misc_feature (58)..(58): Xaa is any aa, unknown or other
ILIEKSIYSRLKQFAPVVSRTLQLVFASSRSSSRRTRVWRRMGVPTGTACSSGASPTXRHQPAACSQRGRQKMVHGCYASQHGRCCEEDEGDHSGDENSRRCLAVSGRDP

SEQ ID NO: 10445 - protein, 98 aa, Zea mays subsp. mays
  peptide (1)..(98): Ceres Seq. ID no. 1324808
  misc_feature (1)..(95): Homolog of NCBI NO: 34897412 NR Description: putative Hsp70 binding protein [Oryza sativa
  misc_feature (1)..(95): Homolog of NCBI NO: 15241689 NR Description: putative protein; protein id: At5g02150.1
  misc_feature (1)..(95): Homolog of NCBI NO: 6478927 NR Description: hypothetical protein [Arabidopsis thaliana]
  misc_feature (1)..(95): Homolog of NCBI NO: 15232329 NR Description: putative protein; protein id: At3g53800.1, by cDNA: 37834. [Arabidopsis thaliana] >gi|11292176|pir||T45920
  misc_feature (1)..(95): Homolog of NCBI NO: 26449490 NR Description: unknown protein [Arabidopsis thaliana]
  misc_feature (1)..(95): Homolog of NCBI NO: 18398480 NR Description: expressed protein; protein id: At3g09350.1, by cDNA: 19154. [Arabidopsis thaliana] unknown protein [Arabidopsis thaliana]
  misc_feature (1)..(95): Homolog of NCBI NO: 21553998 NR Description: unknown [Arabidopsis thaliana]
  misc_feature (1)..(95): Homolog of NCBI NO: 31221541 NR Description: ENSANGP00000019732 [Anopheles gambiae]
MDAMQANTVDVVKRMKEITQVMKTPEDVLQSQGVTPENIEDMLDELQEHVESIDMANDLHSIGGLDPLLGYLKNSNAGIRAKAAEVVSTIVQNNPHES

SEQ ID NO: 10446 - protein, 95 aa, Zea mays subsp. mays
  peptide (1)..(95): Ceres Seq. ID no. 1324809
  misc_feature (1)..(92): Homolog of NCBI NO: 34897412 NR Description: putative Hsp70 binding protein [Oryza sativa
  misc_feature (1)..(92): Homolog of NCBI NO: 15241689 NR Description: putative protein; protein id: At5g02150.1
  misc_feature (1)..(92): Homolog of NCBI NO: 6478927 NR Description: hypothetical protein [Arabidopsis thaliana]
  misc_feature (1)..(92): Homolog of NCBI NO: 15232329 NR Description: putative protein; protein id: At3g53800.1, by cDNA: 37834. [Arabidopsis thaliana] >gi|11292176|pir||T45920
  misc_feature (1)..(92): Homolog of NCBI NO: 26449490 NR Description: unknown protein [Arabidopsis thaliana]
  misc_feature (1)..(92): Homolog of NCBI NO: 18398480 NR Description: expressed protein; protein id: At3g09350.1, by cDNA: 19154. [Arabidopsis thaliana] unknown protein [Arabidopsis thaliana]
  misc_feature (1)..(92): Homolog of NCBI NO: 21553998 NR Description: unknown [Arabidopsis thaliana]
  misc_feature (1)..(92): Homolog of NCBI NO: 31221541 NR Description: ENSANGP00000019732 [Anopheles gambiae]
MQANTVDVVKRMKEITQVMKTPEDVLQSQGVTPENIEDMLDELQEHVESIDMANDLHSIGGLDPLLGYLKNSNAGIRAKAAEVVSTIVQNNPHES

SEQ ID NO: 10447 - DNA, 1534 bp, Zea mays subsp. mays
  misc_feature (1)..(1534): Ceres Seq. ID no. 12351659
  misc_feature: MA Experiment ID: 108529 Result: Up-regulated in Transcription
  misc_feature: MA Experiment 108529 PARAMETER Experiment Name: Zm_Imbibed_Seeds_P Parameter: Age (day) Value: 5 vs. 2
  misc_feature: MA Experiment 108529 PARAMETER Experiment Name: Zm_Imbibed_Seeds_P Parameter: Organism Value: Zea mays
  misc_feature: MA Experiment 108529 PARAMETER Experiment Name: Zm_Imbibed_Seeds_P Parameter: Plant Line Value: 35A19
  misc_feature: MA Experiment 108529 PARAMETER Experiment Name: Zm_Imbibed_Seeds_P Parameter: Tissue Value: Roots vs. Embryo
  misc_feature: MA Experiment ID: 108535 Result: Down-regulated in Transcription
  misc_feature: MA Experiment 108535 PARAMETER Experiment Name: Zm_Meristem_P Parameter: Age (day) Value: 8
  misc_feature: MA Experiment 108535 PARAMETER Experiment Name: Zm_Meristem_P Parameter: Organism Value: Zea mays
  misc_feature: MA Experiment 108535 PARAMETER Experiment Name: Zm_Meristem_P Parameter: Plant Line Value: 35A19
  misc_feature: MA Experiment 108535 PARAMETER Experiment Name: Zm_Meristem_P Parameter: Tissue Value: Root Meristem vs. Above Root Meristem
  misc_feature: MA Experiment ID: 108543 Result: Up-regulated in Transcription
  misc_feature: MA Experiment ID: 108545 Result: Down-regulated in Transcription
  misc_feature: MA Experiment 108545 PARAMETER Experiment Name: Zm_Imbibed_Seeds_P Parameter: Age (day) Value: 3 vs. 2
  misc_feature: MA Experiment 108545 PARAMETER Experiment Name: Zm_Imbibed_Seeds_P Parameter: Organism Value: Zea mays
  misc_feature: MA Experiment 108545 PARAMETER Experiment Name: Zm_Imbibed_Seeds_P Parameter: Plant Line Value: 35A19
  misc_feature: MA Experiment 108545 PARAMETER Experiment Name: Zm_Imbibed_Seeds_P Parameter: Tissue Value: Aerial vs. Embryo
  misc_feature: MA Experiment ID: 108546 Result: Up-regulated in Transcription
  misc_feature: MA Experiment 108546 PARAMETER Experiment Name: Zm_Imbibed_Seeds_P Parameter: Age (day) Value: 3 vs. 2
  misc_feature: MA Experiment 108546 PARAMETER Experiment Name: Zm_Imbibed_Seeds_P Parameter: Organism Value: Zea mays
  misc_feature: MA Experiment 108546 PARAMETER Experiment Name: Zm_Imbibed_Seeds_P Parameter: Plant Line Value: 35A19
  misc_feature: MA Experiment 108546 PARAMETER Experiment Name: Zm_Imbibed_Seeds_P Parameter: Tissue Value: Roots vs. Embryo
  misc_feature: MA Experiment ID: 20000535 Result: Down-regulated in Transcription
  misc_feature: MA Experiment 20000535 PARAMETER Experiment Name: Zm_Hybrid_Seed_Dev_P Parameter: DAP Value: 30 vs. 12
  misc_feature: MA Experiment 20000535 PARAMETER Experiment Name: Zm_Hybrid_Seed_Dev_P Parameter: Organism Value: Zea mays
  misc_feature: MA Experiment 20000535 PARAMETER Experiment Name: Zm_Hybrid_Seed_Dev_P Parameter: Plant Line Value: 35A19
  misc_feature: MA Experiment 20000535 PARAMETER Experiment Name: Zm_Hybrid_Seed_Dev_P Parameter: Tissue Value: Embryo vs. Unfert Floret
actactacttcccccccccgtcctctcgatctctctccccgttcccctgacgagccaggcgtcaagtggcagggaggagaggaggcaccgcgtgtgaggctcaatggggacggggagcgcgcgggcgctggccctggcgctcgccgtgcttctggcctgctccgacgtcgccgtcgtcacggctcaggaaaccgagcggatcgaaggaagcgctggtgatgtgttagaagatgaccctgttgggaggctcaaggtctatgtctatgatctccccagcaaatacaacaagaagctgctcaagaaggatcctaggtgcctgaaccatatgtttgccgctgagatcttcatgcaccggttcctgttgtcaagcgctgtccgaacttttaatcctgaggaagcagattggttctacacacccgtatacacgacgtgtgatctgacccctaagggtcttcccttgcctttcaagtctcctcggatgatgcgtagcgcaatccagctgattgctacgaactggccttactggaatagatcagatggcgcagatcatttctttgtcacaccccatgactttggtgcttgctttcattatcaggaagagaaagccattggacggggaatccttcccttgcttcagcgtgctacgttggttcagacctttggacagaagaaccatgtctgcctgaaggatgggtccatcacgatcccgccatatgcgcctcctcagaaaatgcagactcaccttatccccccggacacccctcgatccatctttgtgtacttccgaggtctgttctatgacaccggcaatgaccccgagggcggatactacgcaagaggtgctcgtgcatcggtctgggagaacttcaagaacaacccgctgtttgacatctcgaccgatcacccaccaacatactacgaagacatgcagcgctcggtgttctgcctctgcccgttgggctgggcaccgtggagtcccaggctagtcgaagccgtggtctttggctgcatcccggtgatcatcgcagacgacatcgtcctccccttcgcggacgccatccccgtgggaggagatcggcgtcttcgttgcagaggatgatgtcccgcagctggacagcatcctgacatccatccccacagacgtcgtgctgaggaagcagcggctccttgcgaacccgtcgatgaagcaggccatgctgttcccccagcctgctcagccaggagatgcgttccaccagatcctgaacggcctagcgcgcaagctcccgcacggcagcaatgtcttcctgaagcctggtgagagggccctgaactggaccgctggaccaccaggcgacctgaaaccttggtagcgtcctgtggatctgagatggatacgacttgttctgaaaggaaatatggagaacatgattatatatatacccgtgcctttgagttaccatgggtgcatagtgctgacaagaagccaaatgtacatcgttctatgttctttttctataactgttatatacatataaatatcttcgtttcttcc

SEQ ID NO: 10448 - protein, 331 aa, Zea mays subsp. mays
  peptide (1)..(331): Ceres Seq. ID no. 12351660
  misc_feature (51)..(320): Pfam Name: Exostosin family Pfam Description: Exostosin family
  misc_feature (9)..(320): Homolog of NCBI NO: 34907048 NR Description: contains EST D24978(R2878)~similar to Arabidopsis
  misc_feature (10)..(320): Homolog of NCBI NO: 34907046 NR Description: contains EST D39982(S1682)~similar to Arabidopsis
  misc_feature (9)..(320): Homolog of NCBI NO: 18424516 NR Description: putative protein; protein id: At5g61840.1, by cDNA: 34861., supported by cDNA: gi_15809825, supported by gi_17978868 [Arabidopsis thaliana] >gi|15809826|gb|AAL06841.1|
  misc_feature (9)..(320): Homolog of NCBI NO: 21592991 NR Description: unknown [Arabidopsis thaliana]
  misc_feature (30)..(320): Homolog of NCBI NO: 15223522 NR Description: unknown protein; protein id: At1g27440.1 thaliana] >gi|9802541|gb|AAF99743.1|AC004557_22 F17L21.23
  misc_feature (9)..(320): Homolog of NCBI NO: 37531708 NR Description: unknown protein [Oryza sativa (japonica
  misc_feature (9)..(320): Homolog of NCBI NO: 18642697 NR Description: Unknown protein [Oryza sativa]
  misc_feature (1)..(322): Homolog of NCBI NO: 34907044 NR Description: hypothetical protein~similar to Arabidopsis
  misc_feature (75)..(320): Homolog of NCBI NO: 23821292 NR Description: pectin-glucuronyltransferase [Nicotiana
  misc_feature (75)..(320): Homolog of NCBI NO: 10176877 NR Description: gb|AAC80624.1~gene_id:MAC9.17~strong similarity unknown protein [Arabidopsis thaliana]
MGTGSARALALALAVLLACSDVAVVTAQETERIEGSAGDVLEDDPVGRLKVYVYDLPSKYNKKLLKKDPRCLNHMFAAEIFMHRFLLSSAVRTFNPEEADWFYTPVYTTCDLTPKGLPLPFKSPRMMRSAIQLIATNWPYWNRSDGADHFFVTPHDFGACFHYQEEKAIGRGILPLLQRATLVQTFGQKNHVCLKDGSITIPPYAPPQKMQTHLIPPDTPRSIFVYFRGLFYDTGNDPEGGYYARGARASVWENFKNNPLFDISTDHPPTYYEDMQRSVFCLCPLGWAPWSPRLVEAVVFGCIPVIIADDIVLPFADAIPVGGDRRLRCRG

SEQ ID NO: 10449 - protein, 257 aa, Zea mays subsp. mays
  peptide (1)..(257): Ceres Seq. ID no. 12351661
  misc_feature (1)..(246): Pfam Name: Exostosin family Pfam Description: Exostosin family
  misc_feature (1)..(246): Homolog of NCBI NO: 34907048 NR Description: contains EST D24978(R2878)~similar to Arabidopsis
  misc_feature (1)..(246): Homolog of NCBI NO: 34907046 NR Description: contains EST D39982(S1682)~similar to Arabidopsis
  misc_feature (1)..(246): Homolog of NCBI NO: 18424516 NR Description: putative protein; protein id: At5g61840.1, by cDNA: 34861., supported by cDNA: gi_15809825, supported by gi_17978868 [Arabidopsis thaliana] >gi|15809826|gb|AAL06841.1|
  misc_feature (1)..(246): Homolog of NCBI NO: 21592991 NR Description: unknown [Arabidopsis thaliana]
  misc_feature (1)..(246): Homolog of NCBI NO: 15223522 NR Description: unknown protein; protein id: At1g27440.1 thaliana] >gi|9802541|gb|AAF99743.1|AC004557_22 F17L21.23
  misc_feature (1)..(246): Homolog of NCBI NO: 37531708 NR Description: unknown protein [Oryza sativa (japonica
  misc_feature (1)..(246): Homolog of NCBI NO: 18642697 NR Description: Unknown protein [Oryza sativa]
  misc_feature (1)..(248): Homolog of NCBI NO: 34907044 NR Description: hypothetical protein~similar to Arabidopsis
  misc_feature (1)..(246): Homolog of NCBI NO: 23821292 NR Description: pectin-glucuronyltransferase [Nicotiana
  misc_feature (1)..(246): Homolog of NCBI NO: 10176877 NR Description: gb|AAC80624.1~gene_id:MAC9.17~strong similarity unknown protein [Arabidopsis thaliana]
MFAAEIFMHRFLLSSAVRTFNPEEADWFYTPVYTTCDLTPKGLPLPFKSPRMMRSAIQLIATNWPYWNRSDGADHFFVTPHDFGACFHYQEEKAIGRGILPLLQRATLVQTFGQKNHVCLKDGSITIPPYAPPQKMQTHLIPPDTPRSIFVYFRGLFYDTGNDPEGGYYARGARASVWENFKNNPLFDISTDHPPTYYEDMQRSVFCLCPLGWAPWSPRLVEAVVFGCIPVIIADDIVLPFADAIPVGGDRRLRCRG

SEQ ID NO: 10450 - protein, 250 aa, Zea mays subsp. mays
  peptide (1)..(250): Ceres Seq. ID no. 12351662
  misc_feature (1)..(239): Pfam Name: Exostosin family Pfam Description: Exostosin family
  misc_feature (1)..(239): Homolog of NCBI NO: 34907048 NR Description: contains EST D24978(R2878)~similar to Arabidopsis
  misc_feature (1)..(239): Homolog of NCBI NO: 34907046 NR Description: contains EST D39982(S1682)~similar to Arabidopsis
  misc_feature (1)..(239): Homolog of NCBI NO: 18424516 NR Description: putative protein; protein id: At5g61840.1, by cDNA: 34861., supported by cDNA: gi_15809825, supported by gi_17978868 [Arabidopsis thaliana] >gi|15809826|gb|AAL06841.1|
  misc_feature (1)..(239): Homolog of NCBI NO: 21592991 NR Description: unknown [Arabidopsis thaliana]
  misc_feature (1)..(239): Homolog of NCBI NO: 15223522 NR Description: unknown protein; protein id: At1g27440.1 thaliana] >gi|9802541|gb|AAF99743.1|AC004557_22 F17L21.23
  misc_feature (1)..(239): Homolog of NCBI NO: 37531708 NR Description: unknown protein [Oryza sativa (japonica
  misc_feature (1)..(239): Homolog of NCBI NO: 18642697 NR Description: Unknown protein [Oryza sativa]
  misc_feature (1)..(241): Homolog of NCBI NO: 34907044 NR Description: hypothetical protein~similar to Arabidopsis
  misc_feature (1)..(239): Homolog of NCBI NO: 23821292 NR Description: pectin-glucuronyltransferase [Nicotiana
  misc_feature (1)..(239): Homolog of NCBI NO: 10176877 NR Description: gb|AAC80624.1~gene_id:MAC9.17~strong similarity unknown protein [Arabidopsis thaliana]
MHRFLLSSAVRTFNPEEADWFYTPVYTTCDLTPKGLPLPFKSPRMMRSAIQLIATNWPYWNRSDGADHFFVTPHDFGACFHYQEEKAIGRGILPLLQRATLVQTFGQKNHVCLKDGSITIPPYAPPQKMQTHLIPPDTPRSIFVYFRGLFYDTGNDPEGGYYARGARASVWENFKNNPLFDISTDHPPTYYEDMQRSVFCLCPLGWAPWSPRLVEAVVFGCIPVIIADDIVLPFADAIPVGGDRRLRCRG

SEQ ID NO: 10451 - DNA, 1159 bp, Zea mays subsp. mays
  misc_feature (1)..(1159): Ceres Seq. ID no. 12400840
  misc_feature: MA Experiment ID: 108522 Result: Down-regulated in Transcription
  misc_feature: MA Experiment 108522 PARAMETER Experiment Name: Zm_42deg_Heat_P Parameter: Age (day) Value: 8
  misc_feature: MA Experiment 108522 PARAMETER Experiment Name: Zm_42deg_Heat_P Parameter: Organism Value: Zea mays
  misc_feature: MA Experiment 108522 PARAMETER Experiment Name: Zm_42deg_Heat_P Parameter: Plant Line Value: 35A19
  misc_feature: MA Experiment 108522 PARAMETER Experiment Name: Zm_42deg_Heat_P Parameter: Temperature (deg C) Value: 42 vs. 22
  misc_feature: MA Experiment 108522 PARAMETER Experiment Name: Zm_42deg_Heat_P Parameter: Timepoint (hr) Value: 1
  misc_feature: MA Experiment 108522 PARAMETER Experiment Name: Zm_42deg_Heat_P Parameter: Tissue Value: Aerial
  misc_feature: MA Experiment ID: 108687 Result: Down-regulated in Transcription
  misc_feature: MA Experiment 108687 PARAMETER Experiment Name: Zm_Embryos-Flowers__P Parameter: Tissue Value: Embryo vs. Aerial+
  misc_feature: MA Experiment ID: 108689 Result: Down-regulated in Transcription
  misc_feature: MA Experiment 108689 PARAMETER Experiment Name: Zm_Drought_Roots_P Parameter: Age (day) Value: 9
  misc_feature: MA Experiment 108689 PARAMETER Experiment Name: Zm_Drought_Roots_P Parameter: Organism Value: Zea mays
  misc_feature: MA Experiment 108689 PARAMETER Experiment Name: Zm_Drought_Roots_P Parameter: Plant Line Value: 35A19
  misc_feature: MA Experiment 108689 PARAMETER Experiment Name: Zm_Drought_Roots_P Parameter: Timepoint (hr) Value: 24
  misc_feature: MA Experiment 108689 PARAMETER Experiment Name: Zm_Drought_Roots_P Parameter: Tissue Value: Roots
  misc_feature: MA Experiment 108689 PARAMETER Experiment Name: Zm_Drought_Roots_P Parameter: Treatment Value: Drought vs. No Drought
  misc_feature: MA Experiment ID: 20000479 Result: Down-regulated in Transcription
  misc_feature: MA Experiment 20000479 PARAMETER Experiment Name: Zm_Drought_P Parameter: Age (day) Value: 10
  misc_feature: MA Experiment 20000479 PARAMETER Experiment Name: Zm_Drought_P Parameter: Organism Value: Zea mays
  misc_feature: MA Experiment 20000479 PARAMETER Experiment Name: Zm_Drought_P Parameter: Plant Line Value: 35A19
  misc_feature: MA Experiment 20000479 PARAMETER Experiment Name: Zm_Drought_P Parameter: Timepoint (hr) Value: 48
  misc_feature: MA Experiment 20000479 PARAMETER Experiment Name: Zm_Drought_P Parameter: Tissue Value: Aerial
  misc_feature: MA Experiment 20000479 PARAMETER Experiment Name: Zm_Drought_P Parameter: Treatment Value: Drought vs. No Drought
  misc_feature: MA Experiment ID: 20000480 Result: Down-regulated in Transcription
  misc_feature: MA Experiment 20000480 PARAMETER Experiment Name: Zm_Drought_P Parameter: Age (day) Value: 11
  misc_feature: MA Experiment 20000480 PARAMETER Experiment Name: Zm_Drought_P Parameter: Organism Value: Zea mays
  misc_feature: MA Experiment 20000480 PARAMETER Experiment Name: Zm_Drought_P Parameter: Plant Line Value: 35A19
  misc_feature: MA Experiment 20000480 PARAMETER Experiment Name: Zm_Drought_P Parameter: Timepoint (hr) Value: 72
  misc_feature: MA Experiment 20000480 PARAMETER Experiment Name: Zm_Drought_P Parameter: Tissue Value: Aerial
  misc_feature: MA Experiment 20000480 PARAMETER Experiment Name: Zm_Drought_P Parameter: Treatment Value: Drought vs. No Drought
atccaggggtcggcatcagcctctctccctcgctctctctgactcgtcgcggcataaacaaacaaaccaaacaaagcaaagcaaaggcaaaaccccacctccaccacacctcgtcgtttgcttttcctcggtgcgggcggtgcggcacaagcccccagaccggttgcctccattactgagctgtgcgtgcgtggtggctgtctgccttgtggcggcgccggtcatggtgatggtggagatggacggtggcgtgggaggaggaggaggaggagggcagacgccggcgccacggcggtggcgcctggcggacgagcggtgtgacctgcgcgccatggagacggactacgtgcggcggtttcaccggcacgagccccgcgaacaccagtgctcctccgccgtcgccaagcacatcaaggcgcccgtccacctcgtctggtctctagtgaggcggtttgatcaaccacagcttttcaagccctttgtgagccggtgtgaaatgaagggcaacattgagattggcagtgtcagggaggttaatgtaaagtctgggctgccagccacaagaagcacggagaggctggaactgttagatgacaatgagcacatactcagcgtcagatttgttggaggtgatcacaggctgcagaactactcgtccatcctcaccgtccaccccgaggtcatcgacggcccgaccggggacgctcgtgatcgagtccttcgtggtggacgtccccgacggcaacaccaaggacgagacctgctacttcgtggaggccctgctcaagtgcaacctcaagtcgctcgcggaggtgtccgagcgacaggtcgtcaaggatcaaacggagccccttgaccggtgatgggggagatacatacatacatgtccgaacgatatgttcggatcactgcattgcattgcttacgatgtgcagagctaatcttcaacggagcccctaggttcctggagaaaagagctttgagggactgctactgctactgctatgccgcgtcgttcaaagttaagtttcctccttgcgattgtgtttgctgtccttttctccggcgttgtacgtcgcacaaggagaaggacaggcagaatatgatgtgctattgtagtattgaaaaatgaaaggaaaaaaagaactgtgaggctctg

SEQ ID NO: 10452 - protein, 284 aa, Zea mays subsp. mays
  peptide (1)..(284): Ceres Seq. ID no. 12400841
  misc_feature (128)..(224): Pfam Name: Pathogenesis-related protein Bet v I family Pfam Description: Pathogenesis-related protein Bet v I family
  misc_feature (112)..(233): Homolog of NCBI NO: 15238661 NR Description: putative protein; protein id: At5g53160.1 thaliana] >gi|9757997|dbj|BAB08419.1| to unknown protein [Arabidopsis thaliana]
  misc_feature (111)..(233): Homolog of NCBI NO: 18378830 NR Description: expressed protein; protein id: At1g01360.1,
  misc_feature (111)..(233): Homolog of NCBI NO: 21593547 NR Description: unknown [Arabidopsis thaliana]
  misc_feature (111)..(233): Homolog of NCBI NO: 25348264 NR Description: hypothetical protein F6F3.16 - Arabidopsis >gi|9665155|gb|AAF97339.1|AC023628_20 Unknown protein
  misc_feature (116)..(233): Homolog of NCBI NO: 18411513 NR Description: Expressed protein; protein id: At4g01026.1,
  misc_feature (116)..(233): Homolog of NCBI NO: 21593105 NR Description: unknown [Arabidopsis thaliana]
  misc_feature (107)..(233): Homolog of NCBI NO: 30687786 NR Description: expressed protein [Arabidopsis thaliana]
  misc_feature (107)..(233): Homolog of NCBI NO: 7486961 NR Description: hypothetical protein T13J8.30 - Arabidopsis >gi|4455351|emb|CAB36761.1| putative protein [Arabidopsis >gi|7269646|emb|CAB79594.1| putative protein [Arabidopsis
  misc_feature (144)..(233): Homolog of NCBI NO: 7486358 NR Description: hypothetical protein F3I3.40 - Arabidopsis >gi|5262156|emb|CAB45785.1| putative protein [Arabidopsis >gi|7267599|emb|CAB80911.1| putative protein [Arabidopsis
  misc_feature (118)..(230): Homolog of NCBI NO: 18404709 NR Description: expressed protein; protein id: At2g38310.1, by cDNA: 32244., supported by cDNA: gi_14517501, supported by gi_15809747 [Arabidopsis thaliana] >gi|7487162|pir||T02514
SRGRHQPLSLALSDSSRHKQTNQTKQSKGKTPPPPHLVVCFSSVRAVRHKPPDRLPPLLSCACVVAVCLVAAPVMVMVEMDGGVGGGGGGGQTPAPRRWRLADERCDLRAMETDYVRRFHRHEPREHQCSSAVAKHIKAPVHLVWSLVRRFDQPQLFKPFVSRCEMKGNIEIGSVREVNVKSGLPATRSTERLELLDDNEHILSVRFVGGDHRLQNYSSILTVHPEVIDGPTGDARDRVLRGGRPRRQHQGRDLLLRGGPAQVQPQVARGGVRATGRQGSNGAP

SEQ ID NO: 10453 - protein, 210 aa, Zea mays subsp. mays
  peptide (1)..(210): Ceres Seq. ID no. 12400842
  misc_feature (54)..(150): Pfam Name: Pathogenesis-related protein Bet v I family Pfam Description: Pathogenesis-related protein Bet v I family
  misc_feature (38)..(159): Homolog of NCBI NO: 15238661 NR Description: putative protein; protein id: At5g53160.1 thaliana] >gi|9757997|dbj|BAB08419.1| to unknown protein [Arabidopsis thaliana]
  misc_feature (37)..(159): Homolog of NCBI NO: 18378830 NR Description: expressed protein; protein id: At1g01360.1,
  misc_feature (37)..(159): Homolog of NCBI NO: 25348264 NR Description: hypothetical protein F6F3.16 - Arabidopsis >gi|9665155|gb|AAF97339.1|AC023628_20 Unknown protein
  misc_feature (37)..(159): Homolog of NCBI NO: 21593547 NR Description: unknown [Arabidopsis thaliana]
  misc_feature (42)..(159): Homolog of NCBI NO: 18411513 NR Description: Expressed protein; protein id: At4g01026.1,
  misc_feature (42)..(159): Homolog of NCBI NO: 21593105 NR Description: unknown [Arabidopsis thaliana]
  misc_feature (33)..(159): Homolog of NCBI NO: 30687786 NR Description: expressed protein [Arabidopsis thaliana]
  misc_feature (33)..(159): Homolog of NCBI NO: 7486961 NR Description: hypothetical protein T13J8.30 - Arabidopsis >gi|4455351|emb|CAB36761.1| putative protein [Arabidopsis >gi|7269646|emb|CAB79594.1| putative protein [Arabidopsis
  misc_feature (70)..(159): Homolog of NCBI NO: 7486358 NR Description: hypothetical protein F3I3.40 - Arabidopsis >gi|5262156|emb|CAB45785.1| putative protein [Arabidopsis >gi|7267599|emb|CAB80911.1| putative protein [Arabidopsis
  misc_feature (44)..(156): Homolog of NCBI NO: 18404709 NR Description: expressed protein; protein id: At2g38310.1, by cDNA: 32244., supported by cDNA: gi_14517501, supported by gi_15809747 [Arabidopsis thaliana] >gi|7487162|pir||T02514
MVMVEMDGGVGGGGGGGQTPAPRRWRLADERCDLRAMETDYVRRFHRHEPREHQCSSAVAKHIKAPVHLVWSLVRRFDQPQLFKPFVSRCEMKGNIEIGSVREVNVKSGLPATRSTERLELLDDNEHILSVRFVGGDHRLQNYSSILTVHPEVIDGPTGDARDRVLRGGRPRRQHQGRDLLLRGGPAQVQPQVARGGVRATGRQGSNGAP

SEQ ID NO: 10454 - protein, 208 aa, Zea mays subsp. mays
  peptide (1)..(208): Ceres Seq. ID no. 12400843
  misc_feature (52)..(148): Pfam Name: Pathogenesis-related protein Bet v I family Pfam Description: Pathogenesis-related protein Bet v I family
  misc_feature (36)..(157): Homolog of NCBI NO: 15238661 NR Description: putative protein; protein id: At5g53160.1 thaliana] >gi|9757997|dbj|BAB08419.1| to unknown protein [Arabidopsis thaliana]
  misc_feature (35)..(157): Homolog of NCBI NO: 18378830 NR Description: expressed protein; protein id: At1g01360.1,
  misc_feature (35)..(157): Homolog of NCBI NO: 25348264 NR Description: hypothetical protein F6F3.16 - Arabidopsis >gi|9665155|gb|AAF97339.1|AC023628_20 Unknown protein
  misc_feature (35)..(157): Homolog of NCBI NO: 21593547 NR Description: unknown [Arabidopsis thaliana]
  misc_feature (40)..(157): Homolog of NCBI NO: 18411513 NR Description: Expressed protein; protein id: At4g01026.1,
  misc_feature (40)..(157): Homolog of NCBI NO: 21593105 NR Description: unknown [Arabidopsis thaliana]
  misc_feature (31)..(157): Homolog of NCBI NO: 30687786 NR Description: expressed protein [Arabidopsis thaliana]
  misc_feature (31)..(157): Homolog of NCBI NO: 7486961 NR Description: hypothetical protein T13J8.30 - Arabidopsis >gi|4455351|emb|CAB36761.1| putative protein [Arabidopsis >gi|7269646|emb|CAB79594.1| putative protein [Arabidopsis
  misc_feature (68)..(157): Homolog of NCBI NO: 7486358 NR Description: hypothetical protein F3I3.40 - Arabidopsis >gi|5262156|emb|CAB45785.1| putative protein [Arabidopsis >gi|7267599|emb|CAB80911.1| putative protein [Arabidopsis
  misc_feature (42)..(154): Homolog of NCBI NO: 18404709 NR Description: expressed protein; protein id: At2g38310.1, by cDNA: 32244., supported by cDNA: gi_14517501, supported by gi_15809747 [Arabidopsis thaliana] >gi|7487162|pir||T02514
MVEMDGGVGGGGGGGQTPAPRRWRLADERCDLRAMETDYVRRFHRHEPREHQCSSAVAKHIKAPVHLVWSLVRRFDQPQLFKPFVSRCEMKGNIEIGSVREVNVKSGLPATRSTERLELLDDNEHILSVRFVGGDHRLQNYSSILTVHPEVIDGPTGDARDRVLRGGRPRRQHQGRDLLLRGGPAQVQPQVARGGVRATGRQGSNGAP

SEQ ID NO: 10455 - DNA, 2062 bp, Zea mays subsp. mays
  misc_feature (1)..(2062): Ceres Seq. ID no. 12372221
  misc_feature: MA Experiment ID: 108535 Result: Up-regulated in Transcription
  misc_feature: MA Experiment 108535 PARAMETER Experiment Name: Zm_Meristem_P Parameter: Age (day) Value: 8
  misc_feature: MA Experiment 108535 PARAMETER Experiment Name: Zm_Meristem_P Parameter: Organism Value: Zea mays
  misc_feature: MA Experiment 108535 PARAMETER Experiment Name: Zm_Meristem_P Parameter: Plant Line Value: 35A19
  misc_feature: MA Experiment 108535 PARAMETER Experiment Name: Zm_Meristem_P Parameter: Tissue Value: Root Meristem vs. Above Root Meristem
  misc_feature: MA Experiment ID: 108544 Result: Down-regulated in Transcription
  misc_feature: MA Experiment ID: 20000487 Result: Up-regulated in Transcription
  misc_feature: MA Experiment 20000487 PARAMETER Experiment Name: Zm_50mM_NH4NO3_L_to_H_P Parameter: Organism Value: Zea mays
  misc_feature: MA Experiment 20000487 PARAMETER Experiment Name: Zm_50mM_NH4NO3_L_to_H_P Parameter: Timepoint (hr) Value: 4
  misc_feature: MA Experiment 20000487 PARAMETER Experiment Name: Zm_50mM_NH4NO3_L_to_H_P Parameter: Tissue Value: Leaves
  misc_feature: MA Experiment 20000487 PARAMETER Experiment Name: Zm_50mM_NH4NO3_L_to_H_P Parameter: Treatment Value: 50mM NH4NO3 vs. 100mM Mannitol
  misc_feature: MA Experiment ID: 20000626 Result: Up-regulated in Transcription
  misc_feature: MA Experiment 20000626 PARAMETER Experiment Name: Zm_Herbicide-Treatments_P Parameter: Timepoint (hr) Value: 12
  misc_feature: MA Experiment 20000626 PARAMETER Experiment Name: Zm_Herbicide-Treatments_P Parameter: Tissue Value: Aerial
  misc_feature: MA Experiment 20000626 PARAMETER Experiment Name: Zm_Herbicide-Treatments_P Parameter: Treatment Value: Roundup vs. No Treatment
  misc_feature: MA Experiment ID: 20000632 Result: Down-regulated in Transcription
  misc_feature: MA Experiment 20000632 PARAMETER Experiment Name: Zm_Herbicide-Treatments_P Parameter: Timepoint (hr) Value: 4
  misc_feature: MA Experiment 20000632 PARAMETER Experiment Name: Zm_Herbicide-Treatments_P Parameter: Tissue Value: Aerial
  misc_feature: MA Experiment 20000632 PARAMETER Experiment Name: Zm_Herbicide-Treatments_P Parameter: Treatment Value: Glean vs. No Treatment
cacgacttctacgcctccaccacgaggcacgcaacaattagaacacatctcgccgccgccgaggacgacggcgatgatgtggcgttcgcgagctcgtgcgctgctcctactccgctcgaccattacccggccaccgccaccacctccacaaccatatcccactcgaaccctaacccgagtcccacctccccgcttcctgtcctcctccccggatcccatccccgattcctcctccgccgccgccgcggatcccttccctgaagccttctcctccccgaccaaggcttctcaagatgccgctgaggccggagaggacaacctgagctcgatgtgggaggaagctggcgacgccgacgacatctttgcctcccccggcagcgccgacgccgtagccgacgatgaggaggtcgcccgcatctgcgccgccgtggagtccacccccgaggacgagatcgcctccaccctcgctgacatgaccgtggacttcaacgagccactcctagccgcagtccttcttgctgctgatcaatgctcctgtaagaagctgatttccctgttcaactatgccgcgaagaataaccccacttccaagagcctctcgaatcttgaggttctcgtgagcaagctagctgattctgctgagatagacaaggcagacgcttacttgctttgggattcgattaaggaaataggctctgtgccaggatcagtgagtacaccgttgttgaatgaaatgattgccatattttggaagcttgagaagtcgaaagcagcgttggaggtgttctccaagttcgatgagtttggttgcactccggacagtgacagctattatcttgtgattgaagcagcacgaaagaagtccttgttccgctctgcttgtgaagtctgtgagaagatgattggctctgcctgcttccccaatggtgagaaggttggcaggattttgatttacctttgtgaggggaagaaggtgaagatggcacactcattataccttgcagtgaaggaaaaaaagattccagtcccaaaactagccttggatttccttgttggtgctttggcaaggaatgatgagaccattggtactgctctggagctgctggaagagtaccaaggggagtcgcttaagcatgcaggcaagtcctttgccacagttgtacatgctttgtgtaggctaagcaaaatggaggatgcaaataatttgttgatgaggatggtgcagcttgaagagtacaaaggggaatctcttaagaatgcaggcaagacatttgccacagttatacatggtttgtgtaggaaaaagaaattggaggatgcaaaagcattgttgatgagaatggtaaatgttgggccagctcctggtaatgcagtgtttaattttgtcatcacagcattgtcaaaacagggagaaatggaggatgcaaaaggtttgatgagaatgatggagagccaagggatcagccctgatatctatacttacagtgtgctcatgagtggctacgtgaaaggaggcatgattgatgaagcccatgatctacttcgtgaagctaagaaaattcatccgaagctaaacagggttgcttatcacatacttatccgtggatactgcaagatggaggacttcgagaaggccaatgagtgcctaaaggagatgaagaaagatgggttgcagccaaatgtggatgagtatgacaaactgattcagtcattgtgtctcaaggctatggactggagaagagctgagaaactcctggaggaaatggaggatagtggtttatgcctaaggggtataagtcgcagcctcataactgcagttaaggagttggaaggggaggaaatgcagtcaaaggcgagccaagaagcatagtttctctaggatactcgaatccatatgtctgctaattaacttttggatagagcctttctttttgagcttttcagctctggtgagcttgcaagaaacatcatctttgtacctgtgtttgtttgttgttatttactacaataattttgcatttatatttaaatgctagactgacaaagaagaatatttagttct

SEQ ID NO: 10456 - protein, 622 aa, Zea mays subsp. mays
  peptide (1)..(622): Ceres Seq. ID no. 12372222
  misc_feature (527)..(561): Pfam Name: PPR repeat Pfam Description: PPR repeat
  misc_feature (26)..(557): Homolog of NCBI NO: 34907634 NR Description: P0674H09.16 [Oryza sativa (japonica
  misc_feature (393)..(622): Homolog of NCBI NO: 34907634 NR Description: P0674H09.16 [Oryza sativa (japonica
  misc_feature (384)..(612): Homolog of NCBI NO: 15232945 NR Description: hypothetical protein; protein id: At3g02650.1 thaliana] >gi|6957728|gb|AAF32472.1| hypothetical protein
  misc_feature (64)..(560): Homolog of NCBI NO: 15232945 NR Description: hypothetical protein; protein id: At3g02650.1 thaliana] >gi|6957728|gb|AAF32472.1| hypothetical protein
  misc_feature (204)..(607): Homolog of NCBI NO: 15234269 NR Description: putative protein; protein id: At4g11690.1
  misc_feature (213)..(592): Homolog of NCBI NO: 37535782 NR Description: putative leaf protein [Oryza sativa (japonica group)] >gi|22165069|gb|AAM93686.1| putative leaf protein [Oryza
  misc_feature (252)..(593): Homolog of NCBI NO: 32488707 NR Description: OSJNBa0088H09.8 [Oryza sativa (japonica
  misc_feature (179)..(605): Homolog of NCBI NO: 38175588 NR Description: pentatricopeptide (PPR) repeat-containing
  misc_feature (205)..(592): Homolog of NCBI NO: 33859440 NR Description: PPR protein [Oryza sativa (indica cultivar-group)]
  misc_feature (183)..(590): Homolog of NCBI NO: 22329519 NR Description: hypothetical protein; protein id: At1g12700.1
TTSTPPPRGTQQLEHISPPPRTTAMMWRSRARALLLLRSTITRPPPPPPQPYPTRTLTRVPPPRFLSSSPDPIPDSSSAAAADPFPEAFSSPTKASQDAAEAGEDNLSSMWEEAGDADDIFASPGSADAVADDEEVARICAAVESTPEDEIASTLADMTVDFNEPLLAAVLLAADQCSCKKLISLFNYAAKNNPTSKSLSNLEVLVSKLADSAEIDKADAYLLWDSIKEIGSVPGSVSTPLLNEMIAIFWKLEKSKAALEVFSKFDEFGCTPDSDSYYLVIEAARKKSLFRSACEVCEKMIGSACFPNGEKVGRILIYLCEGKKVKMAHSLYLAVKEKKIPVPKLALDFLVGALARNDETIGTALELLEEYQGESLKHAGKSFATVVHALCRLSKMEDANNLLMRMVQLEEYKGESLKNAGKTFATVIHGLCRKKKLEDAKALLMRMVNVGPAPGNAVFNFVITALSKQGEMEDAKGLMRMMESQGISPDIYTYSVLMSGYVKGGMIDEAHDLLREAKKIHPKLNRVAYHILIRGYCKMEDFEKANECLKEMKKDGLQPNVDEYDKLIQSLCLKAMDWRRAEKLLEEMEDSGLCLRGISRSLITAVKELEGEEMQSKASQEA

SEQ ID NO: 10457 - protein, 598 aa, Zea mays subsp. mays
  peptide (1)..(598): Ceres Seq. ID no. 12372223
  misc_feature (503)..(537): Pfam Name: PPR repeat Pfam Description: PPR repeat
  misc_feature (2)..(533): Homolog of NCBI NO: 34907634 NR Description: P0674H09.16 [Oryza sativa (japonica
  misc_feature (369)..(598): Homolog of NCBI NO: 34907634 NR Description: P0674H09.16 [Oryza sativa (japonica
  misc_feature (360)..(588): Homolog of NCBI NO: 15232945 NR Description: hypothetical protein; protein id: At3g02650.1 thaliana] >gi|6957728|gb|AAF32472.1| hypothetical protein
  misc_feature (40)..(536): Homolog of NCBI NO: 15232945 NR Description: hypothetical protein; protein id: At3g02650.1 thaliana] >gi|6957728|gb|AAF32472.1| hypothetical protein
  misc_feature (180)..(583): Homolog of NCBI NO: 15234269 NR Description: putative protein; protein id: At4g11690.1
  misc_feature (189)..(568): Homolog of NCBI NO: 37535782 NR Description: putative leaf protein [Oryza sativa (japonica group)] >gi|22165069|gb|AAM93686.1| putative leaf protein [Oryza
  misc_feature (228)..(569): Homolog of NCBI NO: 32488707 NR Description: OSJNBa0088H09.8 [Oryza sativa (japonica
  misc_feature (155)..(581): Homolog of NCBI NO: 38175588 NR Description: pentatricopeptide (PPR) repeat-containing
  misc_feature (181)..(568): Homolog of NCBI NO: 33859440 NR Description: PPR protein [Oryza sativa (indica cultivar-group)]
  misc_feature (159)..(566): Homolog of NCBI NO: 22329519 NR Description: hypothetical protein; protein id: At1g12700.1
MMWRSRARALLLLRSTITRPPPPPPQPYPTRTLTRVPPPRFLSSSPDPIPDSSSAAAADPFPEAFSSPTKASQDAAEAGEDNLSSMWEEAGDADDIFASPGSADAVADDEEVARICAAVESTPEDEIASTLADMTVDFNEPLLAAVLLAADQCSCKKLISLFNYAAKNNPTSKSLSNLEVLVSKLADSAEIDKADAYLLWDSIKEIGSVPGSVSTPLLNEMIAIFWKLEKSKAALEVFSKFDEFGCTPDSDSYYLVIEAARKKSLFRSACEVCEKMIGSACFPNGEKVGRILIYLCEGKKVKMAHSLYLAVKEKKIPVPKLALDFLVGALARNDETIGTALELLEEYQGESLKHAGKSFATVVHALCRLSKMEDANNLLMRMVQLEEYKGESLKNAGKTFATVIHGLCRKKKLEDAKALLMRMVNVGPAPGNAVFNFVITALSKQGEMEDAKGLMRMMESQGISPDIYTYSVLMSGYVKGGMIDEAHDLLREAKKIHPKLNRVAYHILIRGYCKMEDFEKANECLKEMKKDGLQPNVDEYDKLIQSLCLKAMDWRRAEKLLEEMEDSGLCLRGISRSLITAVKELEGEEMQSKASQEA

SEQ ID NO: 10458 - protein, 597 aa, Zea mays subsp. mays
  peptide (1)..(597): Ceres Seq. ID no. 12372224
  misc_feature (502)..(536): Pfam Name: PPR repeat Pfam Description: PPR repeat
  misc_feature (1)..(532): Homolog of NCBI NO: 34907634 NR Description: P0674H09.16 [Oryza sativa (japonica
  misc_feature (368)..(597): Homolog of NCBI NO: 34907634 NR Description: P0674H09.16 [Oryza sativa (japonica
  misc_feature (359)..(587): Homolog of NCBI NO: 15232945 NR Description: hypothetical protein; protein id: At3g02650.1 thaliana] >gi|6957728|gb|AAF32472.1| hypothetical protein
  misc_feature (39)..(535): Homolog of NCBI NO: 15232945 NR Description: hypothetical protein; protein id: At3g02650.1 thaliana] >gi|6957728|gb|AAF32472.1| hypothetical protein
  misc_feature (179)..(582): Homolog of NCBI NO: 15234269 NR Description: putative protein; protein id: At4g11690.1
  misc_feature (188)..(567): Homolog of NCBI NO: 37535782 NR Description: putative leaf protein [Oryza sativa (japonica group)] >gi|22165069|gb|AAM93686.1| putative leaf protein [Oryza
  misc_feature (227)..(568): Homolog of NCBI NO: 32488707 NR Description: OSJNBa0088H09.8 [Oryza sativa (japonica
  misc_feature (154)..(580): Homolog of NCBI NO: 38175588 NR Description: pentatricopeptide (PPR) repeat-containing
  misc_feature (180)..(567): Homolog of NCBI NO: 33859440 NR Description: PPR protein [Oryza sativa (indica cultivar-group)]
  misc_feature (158)..(565): Homolog of NCBI NO: 22329519 NR Description: hypothetical protein; protein id: At1g12700.1
MWRSRARALLLLRSTITRPPPPPPQPYPTRTLTRVPPPRFLSSSPDPIPDSSSAAAADPFPEAFSSPTKASQDAAEAGEDNLSSMWEEAGDADDIFASPGSADAVADDEEVARICAAVESTPEDEIASTLADMTVDFNEPLLAAVLLAADQCSCKKLISLFNYAAKNNPTSKSLSNLEVLVSKLADSAEIDKADAYLLWDSIKEIGSVPGSVSTPLLNEMIAIFWKLEKSKAALEVFSKFDEFGCTPDSDSYYLVIEAARKKSLFRSACEVCEKMIGSACFPNGEKVGRILIYLCEGKKVKMAHSLYLAVKEKKIPVPKLALDFLVGALARNDETIGTALELLEEYQGESLKHAGKSFATVVHALCRLSKMEDANNLLMRMVQLEEYKGESLKNAGKTFATVIHGLCRKKKLEDAKALLMRMVNVGPAPGNAVFNFVITALSKQGEMEDAKGLMRMMESQGISPDIYTYSVLMSGYVKGGMIDEAHDLLREAKKIHPKLNRVAYHILIRGYCKMEDFEKANECLKEMKKDGLQPNVDEYDKLIQSLCLKAMDWRRAEKLLEEMEDSGLCLRGISRSLITAVKELEGEEMQSKASQEA

SEQ ID NO: 10459 - DNA, 1993 bp, Zea mays subsp. mays
  misc_feature (1)..(1993): Ceres Seq. ID no. 12367252
  misc_feature: MA Experiment ID: 108522 Result: Up-regulated in Transcription
  misc_feature: MA Experiment 108522 PARAMETER Experiment Name: Zm_42deg_Heat_P Parameter: Age (day) Value: 8
  misc_feature: MA Experiment 108522 PARAMETER Experiment Name: Zm_42deg_Heat_P Parameter: Organism Value: Zea mays
  misc_feature: MA Experiment 108522 PARAMETER Experiment Name: Zm_42deg_Heat_P Parameter: Plant Line Value: 35A19
  misc_feature: MA Experiment 108522 PARAMETER Experiment Name: Zm_42deg_Heat_P Parameter: Temperature (deg C) Value: 42 vs. 22
  misc_feature: MA Experiment 108522 PARAMETER Experiment Name: Zm_42deg_Heat_P Parameter: Timepoint (hr) Value: 1
  misc_feature: MA Experiment 108522 PARAMETER Experiment Name: Zm_42deg_Heat_P Parameter: Tissue Value: Aerial
  misc_feature: MA Experiment ID: 108523 Result: Up-regulated in Transcription
  misc_feature: MA Experiment 108523 PARAMETER Experiment Name: Zm_42deg_Heat_P Parameter: Age (day) Value: 8
  misc_feature: MA Experiment 108523 PARAMETER Experiment Name: Zm_42deg_Heat_P Parameter: Organism Value: Zea mays
  misc_feature: MA Experiment 108523 PARAMETER Experiment Name: Zm_42deg_Heat_P Parameter: Plant Line Value: 35A19
  misc_feature: MA Experiment 108523 PARAMETER Experiment Name: Zm_42deg_Heat_P Parameter: Temperature (deg C) Value: 42 vs. 22
  misc_feature: MA Experiment 108523 PARAMETER Experiment Name: Zm_42deg_Heat_P Parameter: Timepoint (hr) Value: 6
  misc_feature: MA Experiment 108523 PARAMETER Experiment Name: Zm_42deg_Heat_P Parameter: Tissue Value: Aerial
  misc_feature: MA Experiment ID: 108528 Result: Down-regulated in Transcription
  misc_feature: MA Experiment 108528 PARAMETER Experiment Name: Zm_Imbibed_Seeds_P Parameter: Age (day) Value: 5 vs. 2
  misc_feature: MA Experiment 108528 PARAMETER Experiment Name: Zm_Imbibed_Seeds_P Parameter: Organism Value: Zea mays
  misc_feature: MA Experiment 108528 PARAMETER Experiment Name: Zm_Imbibed_Seeds_P Parameter: Plant Line Value: 35A19
  misc_feature: MA Experiment 108528 PARAMETER Experiment Name: Zm_Imbibed_Seeds_P Parameter: Tissue Value: Aerial vs. Embryo
  misc_feature: MA Experiment ID: 108529 Result: Down-regulated in Transcription
  misc_feature: MA Experiment 108529 PARAMETER Experiment Name: Zm_Imbibed_Seeds_P Parameter: Age (day) Value: 5 vs. 2
  misc_feature: MA Experiment 108529 PARAMETER Experiment Name: Zm_Imbibed_Seeds_P Parameter: Organism Value: Zea mays
  misc_feature: MA Experiment 108529 PARAMETER Experiment Name: Zm_Imbibed_Seeds_P Parameter: Plant Line Value: 35A19
  misc_feature: MA Experiment 108529 PARAMETER Experiment Name: Zm_Imbibed_Seeds_P Parameter: Tissue Value: Roots vs. Embryo
  misc_feature: MA Experiment ID: 108530 Result: Down-regulated in Transcription
  misc_feature: MA Experiment 108530 PARAMETER Experiment Name: Zm_Imbibed_Seeds_P Parameter: Age (day) Value: 6 vs. 2
  misc_feature: MA Experiment 108530 PARAMETER Experiment Name: Zm_Imbibed_Seeds_P Parameter: Organism Value: Zea mays
  misc_feature: MA Experiment 108530 PARAMETER Experiment Name: Zm_Imbibed_Seeds_P Parameter: Plant Line Value: 35A19
  misc_feature: MA Experiment 108530 PARAMETER Experiment Name: Zm_Imbibed_Seeds_P Parameter: Tissue Value: Aerial vs. Embryo
  misc_feature: MA Experiment ID: 108534 Result: Up-regulated in Transcription
  misc_feature: MA Experiment 108534 PARAMETER Experiment Name: Zm_4deg_Cold_P Parameter: Age (hr) Value: 8
  misc_feature: MA Experiment 108534 PARAMETER Experiment Name: Zm_4deg_Cold_P Parameter: Organism Value: Zea mays
  misc_feature: MA Experiment 108534 PARAMETER Experiment Name: Zm_4deg_Cold_P Parameter: Plant Line Value: 35A19
  misc_feature: MA Experiment 108534 PARAMETER Experiment Name: Zm_4deg_Cold_P Parameter: Temperature (deg C) Value: 4 vs. 22
  misc_feature: MA Experiment 108534 PARAMETER Experiment Name: Zm_4deg_Cold_P Parameter: Timepoint (hr) Value: 6
  misc_feature: MA Experiment 108534 PARAMETER Experiment Name: Zm_4deg_Cold_P Parameter: Tissue Value: Aerial
  misc_feature: MA Experiment ID: 108540 Result: Up-regulated in Transcription
  misc_feature: MA Experiment 108540 PARAMETER Experiment Name: Zm_20percent_PEG_P Parameter: Age (day) Value: 8
  misc_feature: MA Experiment 108540 PARAMETER Experiment Name: Zm_20percent_PEG_P Parameter: Organism Value: Zea mays
  misc_feature: MA Experiment 108540 PARAMETER Experiment Name: Zm_20percent_PEG_P Parameter: Plant Line Value: 35A19
  misc_feature: MA Experiment 108540 PARAMETER Experiment Name: Zm_20percent_PEG_P Parameter: Timepoint (hr) Value: 6
  misc_feature: MA Experiment 108540 PARAMETER Experiment Name: Zm_20percent_PEG_P Parameter: Tissue Value: Aerial
  misc_feature: MA Experiment 108540 PARAMETER Experiment Name: Zm_20percent_PEG_P Parameter: Treatment Value: 20percent PEG vs. No Treatment
  misc_feature: MA Experiment ID: 108545 Result: Down-regulated in Transcription
  misc_feature: MA Experiment 108545 PARAMETER Experiment Name: Zm_Imbibed_Seeds_P Parameter: Age (day) Value: 3 vs. 2
  misc_feature: MA Experiment 108545 PARAMETER Experiment Name: Zm_Imbibed_Seeds_P Parameter: Organism Value: Zea mays
  misc_feature: MA Experiment 108545 PARAMETER Experiment Name: Zm_Imbibed_Seeds_P Parameter: Plant Line Value: 35A19
  misc_feature: MA Experiment 108545 PARAMETER Experiment Name: Zm_Imbibed_Seeds_P Parameter: Tissue Value: Aerial vs. Embryo
  misc_feature: MA Experiment ID: 108546 Result: Down-regulated in Transcription
  misc_feature: MA Experiment 108546 PARAMETER Experiment Name: Zm_Imbibed_Seeds_P Parameter: Age (day) Value: 3 vs. 2
  misc_feature: MA Experiment 108546 PARAMETER Experiment Name: Zm_Imbibed_Seeds_P Parameter: Organism Value: Zea mays
  misc_feature: MA Experiment 108546 PARAMETER Experiment Name: Zm_Imbibed_Seeds_P Parameter: Plant Line Value: 35A19
  misc_feature: MA Experiment 108546 PARAMETER Experiment Name: Zm_Imbibed_Seeds_P Parameter: Tissue Value: Roots vs. Embryo
  misc_feature: MA Experiment ID: 108547 Result: Down-regulated in Transcription
  misc_feature: MA Experiment 108547 PARAMETER Experiment Name: Zm_Imbibed_Seeds_P Parameter: Age (day) Value: 4 vs. 2
  misc_feature: MA Experiment 108547 PARAMETER Experiment Name: Zm_Imbibed_Seeds_P Parameter: Organism Value: Zea mays
  misc_feature: MA Experiment 108547 PARAMETER Experiment Name: Zm_Imbibed_Seeds_P Parameter: Plant Line Value: 35A19
  misc_feature: MA Experiment 108547 PARAMETER Experiment Name: Zm_Imbibed_Seeds_P Parameter: Tissue Value: Aerial vs. Embryo
  misc_feature: MA Experiment ID: 20000492 Result: Up-regulated in Transcription
  misc_feature: MA Experiment 20000492 PARAMETER Experiment Name: Zm_Hybrid_Seed_Dev_P Parameter: DAP Value: 12
  misc_feature: MA Experiment 20000492 PARAMETER Experiment Name: Zm_Hybrid_Seed_Dev_P Parameter: Organism Value: Zea mays
  misc_feature: MA Experiment 20000492 PARAMETER Experiment Name: Zm_Hybrid_Seed_Dev_P Parameter: Plant Line Value: 35A19
  misc_feature: MA Experiment 20000492 PARAMETER Experiment Name: Zm_Hybrid_Seed_Dev_P Parameter: Tissue Value: Fert Kernel vs. Unfert Floret
aggaaccatctagatacagcggcggtacgtggactggactggagcgagcaagcctgcgccggcgccgccgtcctcccgaaacagaagctgtagttggtcaagaactggggatactgagttgaatatgatctcaaatccggtggactggtatagtttcggacccggatagaattggtagggatgcaagattggagggtgcgtgagttcgaaggtaaattcactgatgagtttgcccacagcagtagcaacgaacataaaggtggagttgaggcttctggtgtcattagtagtaagaagttgaagcatgcagttgctaatgagaaaatccaaggtgtcatccccggtacaaatagctcaggttcactgaaacgtaattcagagaacatccaacatgcgaacggggtattatcccagaatataagctgcgctggtgactacaaaaatggctccattgcctttcctttgagagaagaaaatacaataactgagaccagatgtccagatgataactggaactcctgtcagtttgcactgaacaatggttcgtccattctcaataaccacagtgctccccaggatagcctcacttatggagataatgatctaaactacatcgaatggcctggcattgacaattttgaggatgtcgatacattattcaggagttttgattcaacatatggtcagcagcagctggagaatgcagatgggttatcttggattccgtcttcagatgctgtttactctaccgatgttgctttgcaacaagggcttgattcgtcttattcagattatggtattctggatgatctctccgcattccaatgtgcagaagataaatcactacccttggttgatccttcatcagctttatgtgataatcaattcaatgatacctacctgttcagtgaacaaaagaatgtgaatgcatatggtgaacagatataccaagaggatttgatggagttgttgcccactgaccagatatgcagcggacatgaaaacattgatatggttggaaaccagtatccatctgaaaatgcaattcaaggtaccgaagataagaaattctctatagcgtcaacttcccagctgagttctcagaatttactgaatcaaagacaccacttagattccagttcaccaagcaatattacttcggagtcctatccaggaaagttcggtccatctagctgttcttctgcacaaagaaactcaaaagtgcagaagaaaactgtcaacatacaaccaagacagccagcaaatgataatgttatgaacacaagcagagcttcttacccttgtgagaactatgaaactgaaagaagaggattagggaaaagaactctgggggatcctcaagttacaatgggtagttcaatggtagtggatggctcatttgtatcatctatgtcctctgataactcagtcgaagaaagcagctttcaacaactgcaggatgctgttagtcagctggatgtgcaaaccaaattgtgcatcagggatggtttataccgattggcacgaagtgcgcaacatagacaagtttttccaaatacgatgaacagcaatggtggtagcgaggacggaaaggaactggagaacgcagaaacttcgtgcaagttcatggaccctcggagcatcgagacgcagacaaacccgatcgatcggtctatagctctgctacttttccgcgagtcatctggcggccatgtccatgtggctgtagcagccgacgatgcctcgtcactgaaatcccctgctggtgtatgatttcctgcctgccacatctcagttccagggccctgctgctaacccaggatgtttctaggcatgtatgtaaaaaaaaaaacaagcgtattgtgtagccaatagtctgtactctgtagtcacattaattttgtcatgcttgtatcctattgctagacggccgatgtgctaacctagtgctgttgactcaaattttatgcgtaatctaaaaaaaattatttct

SEQ ID NO: 10460 - protein, 530 aa, Zea mays subsp. mays
  peptide (1)..(530): Ceres Seq. ID no. 12367253
  misc_feature (271)..(508): Homolog of NCBI NO: 15237638 NR Description: putative protein; protein id: At5g64170.1,
  misc_feature (257)..(504): Homolog of NCBI NO: 15232525 NR Description: putative protein; protein id: At3g54500.1
MQDWRVREFEGKFTDEFAHSSSNEHKGGVEASGVISSKKLKHAVANEKIQGVIPGTNSSGSLKRNSENIQHANGVLSQNISCAGDYKNGSIAFPLREENTITETRCPDDNWNSCQFALNNGSSILNNHSAPQDSLTYGDNDLNYIEWPGIDNFEDVDTLFRSFDSTYGQQQLENADGLSWIPSSDAVYSTDVALQQGLDSSYSDYGILDDLSAFQCAEDKSLPLVDPSSALCDNQFNDTYLFSEQKNVNAYGEQIYQEDLMELLPTDQICSGHENIDMVGNQYPSENAIQGTEDKKFSIASTSQLSSQNLLNQRHHLDSSSPSNITSESYPGKFGPSSCSSAQRNSKVQKKTVNIQPRQPANDNVMNTSRASYPCENYETERRGLGKRTLGDPQVTMGSSMVVDGSFVSSMSSDNSVEESSFQQLQDAVSQLDVQTKLCIRDGLYRLARSAQHRQVFPNTMNSNGGSEDGKELENAETSCKFMDPRSIETQTNPIDRSIALLLFRESSGGHVHVAVAADDASSLKSPAGV

SEQ ID NO: 10461 - protein, 270 aa, Zea mays subsp. mays
  peptide (1)..(270): Ceres Seq. ID no. 12367254
  misc_feature (11)..(248): Homolog of NCBI NO: 15237638 NR Description: putative protein; protein id: At5g64170.1,
  misc_feature (1)..(244): Homolog of NCBI NO: 15232525 NR Description: putative protein; protein id: At3g54500.1
MELLPTDQICSGHENIDMVGNQYPSENAIQGTEDKKFSIASTSQLSSQNLLNQRHHLDSSSPSNITSESYPGKFGPSSCSSAQRNSKVQKKTVNIQPRQPANDNVMNTSRASYPCENYETERRGLGKRTLGDPQVTMGSSMVVDGSFVSSMSSDNSVEESSFQQLQDAVSQLDVQTKLCIRDGLYRLARSAQHRQVFPNTMNSNGGSEDGKELENAETSCKFMDPRSIETQTNPIDRSIALLLFRESSGGHVHVAVAADDASSLKSPAGV

SEQ ID NO: 10462 - DNA, 1199 bp, Zea mays subsp. mays
  misc_feature (1)..(1199): Ceres Seq. ID no. 12400837
  misc_feature: MA Experiment ID: 108527 Result: Down-regulated in Transcription
  misc_feature: MA Experiment 108527 PARAMETER Experiment Name: Zm_5mM_NO_P Parameter: Age (day) Value: 8
  misc_feature: MA Experiment 108527 PARAMETER Experiment Name: Zm_5mM_NO_P Parameter: Organism Value: Zea mays
  misc_feature: MA Experiment 108527 PARAMETER Experiment Name: Zm_5mM_NO_P Parameter: Plant Line Value: 35A19
  misc_feature: MA Experiment 108527 PARAMETER Experiment Name: Zm_5mM_NO_P Parameter: Timepoint (hr) Value: 6
  misc_feature: MA Experiment 108527 PARAMETER Experiment Name: Zm_5mM_NO_P Parameter: Tissue Value: Aerial
  misc_feature: MA Experiment 108527 PARAMETER Experiment Name: Zm_5mM_NO_P Parameter: Treatment Value: 5mM NO vs. No Treatment
  misc_feature: MA Experiment ID: 108528 Result: Up-regulated in Transcription
  misc_feature: MA Experiment 108528 PARAMETER Experiment Name: Zm_Imbibed_Seeds_P Parameter: Age (day) Value: 5 vs. 2
  misc_feature: MA Experiment 108528 PARAMETER Experiment Name: Zm_Imbibed_Seeds_P Parameter: Organism Value: Zea mays
  misc_feature: MA Experiment 108528 PARAMETER Experiment Name: Zm_Imbibed_Seeds_P Parameter: Plant Line Value: 35A19
  misc_feature: MA Experiment 108528 PARAMETER Experiment Name: Zm_Imbibed_Seeds_P Parameter: Tissue Value: Aerial vs. Embryo
  misc_feature: MA Experiment ID: 108529 Result: Down-regulated in Transcription
  misc_feature: MA Experiment 108529 PARAMETER Experiment Name: Zm_Imbibed_Seeds_P Parameter: Age (day) Value: 5 vs. 2
  misc_feature: MA Experiment 108529 PARAMETER Experiment Name: Zm_Imbibed_Seeds_P Parameter: Organism Value: Zea mays
  misc_feature: MA Experiment 108529 PARAMETER Experiment Name: Zm_Imbibed_Seeds_P Parameter: Plant Line Value: 35A19
  misc_feature: MA Experiment 108529 PARAMETER Experiment Name: Zm_Imbibed_Seeds_P Parameter: Tissue Value: Roots vs. Embryo
  misc_feature: MA Experiment ID: 108530 Result: Up-regulated in Transcription
  misc_feature: MA Experiment 108530 PARAMETER Experiment Name: Zm_Imbibed_Seeds_P Parameter: Age (day) Value: 6 vs. 2
  misc_feature: MA Experiment 108530 PARAMETER Experiment Name: Zm_Imbibed_Seeds_P Parameter: Organism Value: Zea mays
  misc_feature: MA Experiment 108530 PARAMETER Experiment Name: Zm_Imbibed_Seeds_P Parameter: Plant Line Value: 35A19
  misc_feature: MA Experiment 108530 PARAMETER Experiment Name: Zm_Imbibed_Seeds_P Parameter: Tissue Value: Aerial vs. Embryo
  misc_feature: MA Experiment ID: 108536 Result: Down-regulated in Transcription
  misc_feature: MA Experiment 108536 PARAMETER Experiment Name: Zm_Meristem_P Parameter: Age (day) Value: 8
  misc_feature: MA Experiment 108536 PARAMETER Experiment Name: Zm_Meristem_P Parameter: Organism Value: Zea mays
  misc_feature: MA Experiment 108536 PARAMETER Experiment Name: Zm_Meristem_P Parameter: Plant Line Value: 35A19
  misc_feature: MA Experiment 108536 PARAMETER Experiment Name: Zm_Meristem_P Parameter: Tissue Value: Shoot Meristem vs. Above Shoot Meristem
  misc_feature: MA Experiment ID: 108543 Result: Up-regulated in Transcription
  misc_feature: MA Experiment ID: 108545 Result: Up-regulated in Transcription
  misc_feature: MA Experiment 108545 PARAMETER Experiment Name: Zm_Imbibed_Seeds_P Parameter: Age (day) Value: 3 vs. 2
  misc_feature: MA Experiment 108545 PARAMETER Experiment Name: Zm_Imbibed_Seeds_P Parameter: Organism Value: Zea mays
  misc_feature: MA Experiment 108545 PARAMETER Experiment Name: Zm_Imbibed_Seeds_P Parameter: Plant Line Value: 35A19
  misc_feature: MA Experiment 108545 PARAMETER Experiment Name: Zm_Imbibed_Seeds_P Parameter: Tissue Value: Aerial vs. Embryo
  misc_feature: MA Experiment ID: 108546 Result: Down-regulated in Transcription
  misc_feature: MA Experiment 108546 PARAMETER Experiment Name: Zm_Imbibed_Seeds_P Parameter: Age (day) Value: 3 vs. 2
  misc_feature: MA Experiment 108546 PARAMETER Experiment Name: Zm_Imbibed_Seeds_P Parameter: Organism Value: Zea mays
  misc_feature: MA Experiment 108546 PARAMETER Experiment Name: Zm_Imbibed_Seeds_P Parameter: Plant Line Value: 35A19
  misc_feature: MA Experiment 108546 PARAMETER Experiment Name: Zm_Imbibed_Seeds_P Parameter: Tissue Value: Roots vs. Embryo
  misc_feature: MA Experiment ID: 108547 Result: Up-regulated in Transcription
  misc_feature: MA Experiment 108547 PARAMETER Experiment Name: Zm_Imbibed_Seeds_P Parameter: Age (day) Value: 4 vs. 2
  misc_feature: MA Experiment 108547 PARAMETER Experiment Name: Zm_Imbibed_Seeds_P Parameter: Organism Value: Zea mays
  misc_feature: MA Experiment 108547 PARAMETER Experiment Name: Zm_Imbibed_Seeds_P Parameter: Plant Line Value: 35A19
  misc_feature: MA Experiment 108547 PARAMETER Experiment Name: Zm_Imbibed_Seeds_P Parameter: Tissue Value: Aerial vs. Embryo
  misc_feature: MA Experiment ID: 108559 Result: Down-regulated in Transcription
  misc_feature: MA Experiment 108559 PARAMETER Experiment Name: Zm_5mM_NO_P Parameter: Age (day) Value: 8
  misc_feature: MA Experiment 108559 PARAMETER Experiment Name: Zm_5mM_NO_P Parameter: Organism Value: Zea mays
  misc_feature: MA Experiment 108559 PARAMETER Experiment Name: Zm_5mM_NO_P Parameter: Plant Line Value: 35A19
  misc_feature: MA Experiment 108559 PARAMETER Experiment Name: Zm_5mM_NO_P Parameter: Timepoint (hr) Value: 12
  misc_feature: MA Experiment 108559 PARAMETER Experiment Name: Zm_5mM_NO_P Parameter: Tissue Value: Aerial
  misc_feature: MA Experiment 108559 PARAMETER Experiment Name: Zm_5mM_NO_P Parameter: Treatment Value: 5mM NO vs. No Treatment
  misc_feature: MA Experiment ID: 20000479 Result: Down-regulated in Transcription
  misc_feature: MA Experiment 20000479 PARAMETER Experiment Name: Zm_Drought_P Parameter: Age (day) Value: 10
  misc_feature: MA Experiment 20000479 PARAMETER Experiment Name: Zm_Drought_P Parameter: Organism Value: Zea mays
  misc_feature: MA Experiment 20000479 PARAMETER Experiment Name: Zm_Drought_P Parameter: Plant Line Value: 35A19
  misc_feature: MA Experiment 20000479 PARAMETER Experiment Name: Zm_Drought_P Parameter: Timepoint (hr) Value: 48
  misc_feature: MA Experiment 20000479 PARAMETER Experiment Name: Zm_Drought_P Parameter: Tissue Value: Aerial
  misc_feature: MA Experiment 20000479 PARAMETER Experiment Name: Zm_Drought_P Parameter: Treatment Value: Drought vs. No Drought
  misc_feature: MA Experiment ID: 20000480 Result: Down-regulated in Transcription
  misc_feature: MA Experiment 20000480 PARAMETER Experiment Name: Zm_Drought_P Parameter: Age (day) Value: 11
  misc_feature: MA Experiment 20000480 PARAMETER Experiment Name: Zm_Drought_P Parameter: Organism Value: Zea mays
  misc_feature: MA Experiment 20000480 PARAMETER Experiment Name: Zm_Drought_P Parameter: Plant Line Value: 35A19
  misc_feature: MA Experiment 20000480 PARAMETER Experiment Name: Zm_Drought_P Parameter: Timepoint (hr) Value: 72
  misc_feature: MA Experiment 20000480 PARAMETER Experiment Name: Zm_Drought_P Parameter: Tissue Value: Aerial
  misc_feature: MA Experiment 20000480 PARAMETER Experiment Name: Zm_Drought_P Parameter: Treatment Value: Drought vs. No Drought
  misc_feature: MA Experiment ID: 20000626 Result: Down-regulated in Transcription
  misc_feature: MA Experiment 20000626 PARAMETER Experiment Name: Zm_Herbicide-Treatments_P Parameter: Timepoint (hr) Value: 12
  misc_feature: MA Experiment 20000626 PARAMETER Experiment Name: Zm_Herbicide-Treatments_P Parameter: Tissue Value: Aerial
  misc_feature: MA Experiment 20000626 PARAMETER Experiment Name: Zm_Herbicide-Treatments_P Parameter: Treatment Value: Roundup vs. No Treatment
gataaggagacggtactagtaaactgactaactgctgcccactcgccggagaaccatggccacggcggcggcgtgtgtgcgggtggcgtctccgttcacgggcccacctatctggcatcccagacacgtcatctcaacgaggcggggacccaggagggccgggctggccgtcacggcggcggctgccgccggtggatcgccgcgcactgtgctcgtcaccggcgcgggcggccgaacaggccaaattgtgtacaagaagttgaaggagagggaaggacagtttgtgggacgtggcctagtcaggacgggagagagcaaaggcaaaattggaggcggtgacgacgtgtttgtcggcgacatcagagaccccgagagcattgctcctgcgatcgagggcattgacgcgctcatcatcctcaccagcgcggtcccaaagatgaaaccggggtttgatcctagcaaaggggggcgccctgagttttactttgaagaagggagttatcctgagcaggtggattggattggccaaaagaatcaaattgatgctgctaagagcatcggtgcaaagcacatagttttggtgggatccatgggaggaacagacatcaatcacccgctaaacaagttaggaaatgcaaatatactggtgtggaagcgcaaggcagaacagtacctagcagactccggtcttccatatacaattataagagctggcggtttacaagataaagatggtggcttgcgagagttgattgttgggaaggatgatgagatcctgaaaacagaaacaagaactatagccagggccgatgttgcagaagtttgcatacaggcattgctattcgaagagtcaaagtttaaggcatttgatctggcatcaaaaccagaaggtgaagggacgccaactacagactttagggcactttttgcacaagttaatagtcgcttctaaagacataagattgttcttgccaagaagttgagggcattctttcgtaaagcgatatgaaatgtgtgtttagtaaggttagtttcctgtttactaagttcctaatatattacagttgttccatgtagcatccttttttatctcttgctctctagctacttttggctttatttcctgtctagacagcggattctgcataatgctaatgaactttcatatcaaataagattgctcagttatccataatgtt

SEQ ID NO: 10463 - protein, 298 aa, Zea mays subsp. mays
  peptide (1)..(298): Ceres Seq. ID no. 12400838
  misc_feature (52)..(126): Pfam Name: Isoflavone reductase Pfam Description: Isoflavone reductase
  misc_feature (1)..(298): Homolog of NCBI NO: 14719331 NR Description: putative 3-beta hydroxysteroid
  misc_feature (37)..(298): Homolog of NCBI NO: 18404496 NR Description: expressed protein; protein id: At2g37660.1, by cDNA: 13797., supported by cDNA: gi_14596078, supported by gi_20148254 [Arabidopsis thaliana]
  misc_feature (37)..(298): Homolog of NCBI NO: 7485430 NR Description: hypothetical protein At2g37660 [imported] -
  misc_feature (42)..(298): Homolog of NCBI NO: 34897418 NR Description: unknown protein [Oryza sativa (japonica
  misc_feature (51)..(298): Homolog of NCBI NO: 18413869 NR Description: putative protein; protein id: At5g02240.1, by cDNA: gi_15294289 [Arabidopsis thaliana] AT5g02240/T7H20_290 [Arabidopsis thaliana]
  misc_feature (51)..(293): Homolog of NCBI NO: 11358410 NR Description: hypothetical protein T7H20.290 - Arabidopsis >gi|7340698|emb|CAB82997.1| putative protein [Arabidopsis
  misc_feature (38)..(297): Homolog of NCBI NO: 30689062 NR Description: expressed protein [Arabidopsis thaliana] unknown protein [Arabidopsis thaliana]
  misc_feature (151)..(296): Homolog of NCBI NO: 37523053 NR Description: hypothetical protein gll3484 [Gloeobacter
  misc_feature (46)..(294): Homolog of NCBI NO: 17230395 NR Description: hypothetical protein [Nostoc sp. PCC 7120]
  misc_feature (150)..(294): Homolog of NCBI NO: 16330694 NR Description: hypothetical protein [Synechocystis sp. PCC 6803]
MATAAACVRVASPFTGPPIWHPRHVISTRRGPRRAGLAVTAAAAAGGSPRTVLVTGAGGRTGQIVYKKLKEREGQFVGRGLVRTGESKGKIGGGDDVFVGDIRDPESIAPAIEGIDALIILTSAVPKMKPGFDPSKGGRPEFYFEEGSYPEQVDWIGQKNQIDAAKSIGAKHIVLVGSMGGTDINHPLNKLGNANILVWKRKAEQYLADSGLPYTIIRAGGLQDKDGGLRELIVGKDDEILKTETRTIARADVAEVCIQALLFEESKFKAFDLASKPEGEGTPTTDFRALFAQVNSRF

SEQ ID NO: 10464 - protein, 171 aa, Zea mays subsp. mays
  peptide (1)..(171): Ceres Seq. ID no. 12400839
  misc_feature (24)..(149): Pfam Name: Isoflavone reductase Pfam Description: Isoflavone reductase
  misc_feature (1)..(171): Homolog of NCBI NO: 14719331 NR Description: putative 3-beta hydroxysteroid
  misc_feature (1)..(171): Homolog of NCBI NO: 18404496 NR Description: expressed protein; protein id: At2g37660.1, by cDNA: 13797., supported by cDNA: gi_14596078, supported by gi_20148254 [Arabidopsis thaliana]
  misc_feature (1)..(171): Homolog of NCBI NO: 7485430 NR Description: hypothetical protein At2g37660 [imported] -
  misc_feature (1)..(171): Homolog of NCBI NO: 34897418 NR Description: unknown protein [Oryza sativa (japonica
  misc_feature (1)..(171): Homolog of NCBI NO: 18413869 NR Description: putative protein; protein id: At5g02240.1, by cDNA: gi_15294289 [Arabidopsis thaliana] AT5g02240/T7H20_290 [Arabidopsis thaliana]
  misc_feature (1)..(166): Homolog of NCBI NO: 11358410 NR Description: hypothetical protein T7H20.290 - Arabidopsis >gi|7340698|emb|CAB82997.1| putative protein [Arabidopsis
  misc_feature (1)..(170): Homolog of NCBI NO: 30689062 NR Description: expressed protein [Arabidopsis thaliana] unknown protein [Arabidopsis thaliana]
  misc_feature (24)..(169): Homolog of NCBI NO: 37523053 NR Description: hypothetical protein gll3484 [Gloeobacter
  misc_feature (1)..(167): Homolog of NCBI NO: 17230395 NR Description: hypothetical protein [Nostoc sp. PCC 7120]
  misc_feature (23)..(167): Homolog of NCBI NO: 16330694 NR Description: hypothetical protein [Synechocystis sp. PCC 6803]
MKPGFDPSKGGRPEFYFEEGSYPEQVDWIGQKNQIDAAKSIGAKHIVLVGSMGGTDINHPLNKLGNANILVWKRKAEQYLADSGLPYTIIRAGGLQDKDGGLRELIVGKDDEILKTETRTIARADVAEVCIQALLFEESKFKAFDLASKPEGEGTPTTDFRALFAQVNSRF

SEQ ID NO: 10465 - DNA, 1577 bp, Zea mays subsp. mays
  misc_feature (1)..(1577): Ceres Seq. ID no. 12595047
  misc_feature: MA Experiment ID: 108504 Result: Down-regulated in Transcription
  misc_feature: MA Experiment 108504 PARAMETER Experiment Name: Zm_Drought_P Parameter: Age (day) Value: 8
  misc_feature: MA Experiment 108504 PARAMETER Experiment Name: Zm_Drought_P Parameter: Organism Value: Zea mays
  misc_feature: MA Experiment 108504 PARAMETER Experiment Name: Zm_Drought_P Parameter: Plant Line Value: 35A19
  misc_feature: MA Experiment 108504 PARAMETER Experiment Name: Zm_Drought_P Parameter: Timepoint (hr) Value: 12
  misc_feature: MA Experiment 108504 PARAMETER Experiment Name: Zm_Drought_P Parameter: Tissue Value: Aerial
  misc_feature: MA Experiment 108504 PARAMETER Experiment Name: Zm_Drought_P Parameter: Treatment Value: Drought vs. No Drought
  misc_feature: MA Experiment ID: 108523 Result: Down-regulated in Transcription
  misc_feature: MA Experiment 108523 PARAMETER Experiment Name: Zm_42deg_Heat_P Parameter: Age (day) Value: 8
  misc_feature: MA Experiment 108523 PARAMETER Experiment Name: Zm_42deg_Heat_P Parameter: Organism Value: Zea mays
  misc_feature: MA Experiment 108523 PARAMETER Experiment Name: Zm_42deg_Heat_P Parameter: Plant Line Value: 35A19
  misc_feature: MA Experiment 108523 PARAMETER Experiment Name: Zm_42deg_Heat_P Parameter: Temperature (deg C) Value: 42 vs. 22
  misc_feature: MA Experiment 108523 PARAMETER Experiment Name: Zm_42deg_Heat_P Parameter: Timepoint (hr) Value: 6
  misc_feature: MA Experiment 108523 PARAMETER Experiment Name: Zm_42deg_Heat_P Parameter: Tissue Value: Aerial
  misc_feature: MA Experiment ID: 108528 Result: Down-regulated in Transcription
  misc_feature: MA Experiment 108528 PARAMETER Experiment Name: Zm_Imbibed_Seeds_P Parameter: Age (day) Value: 5 vs. 2
  misc_feature: MA Experiment 108528 PARAMETER Experiment Name: Zm_Imbibed_Seeds_P Parameter: Organism Value: Zea mays
  misc_feature: MA Experiment 108528 PARAMETER Experiment Name: Zm_Imbibed_Seeds_P Parameter: Plant Line Value: 35A19
  misc_feature: MA Experiment 108528 PARAMETER Experiment Name: Zm_Imbibed_Seeds_P Parameter: Tissue Value: Aerial vs. Embryo
  misc_feature: MA Experiment ID: 108530 Result: Down-regulated in Transcription
  misc_feature: MA Experiment 108530 PARAMETER Experiment Name: Zm_Imbibed_Seeds_P Parameter: Age (day) Value: 6 vs. 2
  misc_feature: MA Experiment 108530 PARAMETER Experiment Name: Zm_Imbibed_Seeds_P Parameter: Organism Value: Zea mays
  misc_feature: MA Experiment 108530 PARAMETER Experiment Name: Zm_Imbibed_Seeds_P Parameter: Plant Line Value: 35A19
  misc_feature: MA Experiment 108530 PARAMETER Experiment Name: Zm_Imbibed_Seeds_P Parameter: Tissue Value: Aerial vs. Embryo
  misc_feature: MA Experiment ID: 108540 Result: Down-regulated in Transcription
  misc_feature: MA Experiment 108540 PARAMETER Experiment Name: Zm_20percent_PEG_P Parameter: Age (day) Value: 8
  misc_feature: MA Experiment 108540 PARAMETER Experiment Name: Zm_20percent_PEG_P Parameter: Organism Value: Zea mays
  misc_feature: MA Experiment 108540 PARAMETER Experiment Name: Zm_20percent_PEG_P Parameter: Plant Line Value: 35A19
  misc_feature: MA Experiment 108540 PARAMETER Experiment Name: Zm_20percent_PEG_P Parameter: Timepoint (hr) Value: 6
  misc_feature: MA Experiment 108540 PARAMETER Experiment Name: Zm_20percent_PEG_P Parameter: Tissue Value: Aerial
  misc_feature: MA Experiment 108540 PARAMETER Experiment Name: Zm_20percent_PEG_P Parameter: Treatment Value: 20percent PEG vs. No Treatment
  misc_feature: MA Experiment ID: 108543 Result: Up-regulated in Transcription
  misc_feature: MA Experiment ID: 108544 Result: Up-regulated in Transcription
  misc_feature: MA Experiment ID: 108545 Result: Down-regulated in Transcription
  misc_feature: MA Experiment 108545 PARAMETER Experiment Name: Zm_Imbibed_Seeds_P Parameter: Age (day) Value: 3 vs. 2
  misc_feature: MA Experiment 108545 PARAMETER Experiment Name: Zm_Imbibed_Seeds_P Parameter: Organism Value: Zea mays
  misc_feature: MA Experiment 108545 PARAMETER Experiment Name: Zm_Imbibed_Seeds_P Parameter: Plant Line Value: 35A19
  misc_feature: MA Experiment 108545 PARAMETER Experiment Name: Zm_Imbibed_Seeds_P Parameter: Tissue Value: Aerial vs. Embryo
  misc_feature: MA Experiment ID: 108547 Result: Down-regulated in Transcription
  misc_feature: MA Experiment 108547 PARAMETER Experiment Name: Zm_Imbibed_Seeds_P Parameter: Age (day) Value: 4 vs. 2
  misc_feature: MA Experiment 108547 PARAMETER Experiment Name: Zm_Imbibed_Seeds_P Parameter: Organism Value: Zea mays
  misc_feature: MA Experiment 108547 PARAMETER Experiment Name: Zm_Imbibed_Seeds_P Parameter: Plant Line Value: 35A19
  misc_feature: MA Experiment 108547 PARAMETER Experiment Name: Zm_Imbibed_Seeds_P Parameter: Tissue Value: Aerial vs. Embryo
  misc_feature: MA Experiment ID: 108556 Result: Down-regulated in Transcription
  misc_feature: MA Experiment 108556 PARAMETER Experiment Name: Zm_Drought_P Parameter: Age (day) Value: 9
  misc_feature: MA Experiment 108556 PARAMETER Experiment Name: Zm_Drought_P Parameter: Organism Value: Zea mays
  misc_feature: MA Experiment 108556 PARAMETER Experiment Name: Zm_Drought_P Parameter: Plant Line Value: 35A19
  misc_feature: MA Experiment 108556 PARAMETER Experiment Name: Zm_Drought_P Parameter: Timepoint (hr) Value: 24
  misc_feature: MA Experiment 108556 PARAMETER Experiment Name: Zm_Drought_P Parameter: Tissue Value: Aerial
  misc_feature: MA Experiment 108556 PARAMETER Experiment Name: Zm_Drought_P Parameter: Treatment Value: Drought vs. No Drought
  misc_feature: MA Experiment ID: 108559 Result: Down-regulated in Transcription
  misc_feature: MA Experiment 108559 PARAMETER Experiment Name: Zm_5mM_NO_P Parameter: Age (day) Value: 8
  misc_feature: MA Experiment 108559 PARAMETER Experiment Name: Zm_5mM_NO_P Parameter: Organism Value: Zea mays
  misc_feature: MA Experiment 108559 PARAMETER Experiment Name: Zm_5mM_NO_P Parameter: Plant Line Value: 35A19
  misc_feature: MA Experiment 108559 PARAMETER Experiment Name: Zm_5mM_NO_P Parameter: Timepoint (hr) Value: 12
  misc_feature: MA Experiment 108559 PARAMETER Experiment Name: Zm_5mM_NO_P Parameter: Tissue Value: Aerial
  misc_feature: MA Experiment 108559 PARAMETER Experiment Name: Zm_5mM_NO_P Parameter: Treatment Value: 5mM NO vs. No Treatment
  misc_feature: MA Experiment ID: 20000478 Result: Down-regulated in Transcription
  misc_feature: MA Experiment 20000478 PARAMETER Experiment Name: Zm_5mM_SA_P Parameter: Age (day) Value: 11
  misc_feature: MA Experiment 20000478 PARAMETER Experiment Name: Zm_5mM_SA_P Parameter: Organism Value: Zea mays
  misc_feature: MA Experiment 20000478 PARAMETER Experiment Name: Zm_5mM_SA_P Parameter: Plant Line Value: 35A19
  misc_feature: MA Experiment 20000478 PARAMETER Experiment Name: Zm_5mM_SA_P Parameter: Timepoint (hr) Value: 72
  misc_feature: MA Experiment 20000478 PARAMETER Experiment Name: Zm_5mM_SA_P Parameter: Tissue Value: Aerial
  misc_feature: MA Experiment 20000478 PARAMETER Experiment Name: Zm_5mM_SA_P Parameter: Treatment Value: 5mM SA vs. No Treatment
  misc_feature: MA Experiment ID: 20000488 Result: Down-regulated in Transcription
  misc_feature: MA Experiment 20000488 PARAMETER Experiment Name: Zm_50mM_NH4NO3_L_to_H_P Parameter: Organism Value: Zea mays
  misc_feature: MA Experiment 20000488 PARAMETER Experiment Name: Zm_50mM_NH4NO3_L_to_H_P Parameter: Timepoint (hr) Value: 8
  misc_feature: MA Experiment 20000488 PARAMETER Experiment Name: Zm_50mM_NH4NO3_L_to_H_P Parameter: Tissue Value: Leaves
  misc_feature: MA Experiment 20000488 PARAMETER Experiment Name: Zm_50mM_NH4NO3_L_to_H_P Parameter: Treatment Value: 50mM NH4NO3 vs. 100mM Mannitol
  misc_feature: MA Experiment ID: 20000535 Result: Down-regulated in Transcription
  misc_feature: MA Experiment 20000535 PARAMETER Experiment Name: Zm_Hybrid_Seed_Dev_P Parameter: DAP Value: 30 vs. 12
  misc_feature: MA Experiment 20000535 PARAMETER Experiment Name: Zm_Hybrid_Seed_Dev_P Parameter: Organism Value: Zea mays
  misc_feature: MA Experiment 20000535 PARAMETER Experiment Name: Zm_Hybrid_Seed_Dev_P Parameter: Plant Line Value: 35A19
  misc_feature: MA Experiment 20000535 PARAMETER Experiment Name: Zm_Hybrid_Seed_Dev_P Parameter: Tissue Value: Embryo vs. Unfert Floret
accaacttctcatcatcagccaagtgtaaagagtgcgaagaagcagtagcaaaaggattccattctcgtgttcttggagtggtccatcgatcgagctccgtgaaagagagagagagagagcaagcaatggcgacagcaggaaaggtgatcaagtgcagagctgccgtgacgtgggaggccggcaaaccgctgtccatcgaggaggtggaggtagcgccgccgcaggccatggaggtgcgtatcaagatcctctacaccgcgctctgccacaccgacgtctacttctgggaggccaaggggcaaaccccggtgttcccgaggatcttaggacacgaagcgggaggcatcgtggagagcgtcggagagggcgtgaccgacgtcgcgccaggcgaccacgtcctcccggtgttcaccggcgagtgcaaggagtgcgcccactgcaagtcggaggagagcaacatgtgcgacctcctcaggatcaacgtcgaccgcggcgtgatgatcggcgacggtaagtcccgcttcaccatcagcgggcagcccatcttccacttcgtcgggacgtccaccttcagcgagtacaccgtcatccatgtcggctgcctggccaagatcaaccccgaggcgcctctcgacaaagtctgcatcctcagctgtggtatctcgaccggccttggcgcgacactgaatgtggcgaaaccagccaagggctcgacggtggcgattttcgggcttggggctgtaggccttgctgctatggaaggtgctagactggctggtgcatcaaggatcatcggcgtggacatcaacccagcaaaatacgagcaagctaagaaatttggctgcactgaattcgttaaccccaaggaccacgacaagccagtgcaagaggtgctgattgagctgaccaacggcggcgtcgaccgcagcgtggagtgcaccggtaacgtcaacgccatgatatccgccttcgaatgtgtccacgacggctggggtgtcgccgtgctggtgggtgtcccgcacaaggacgaccagttcaagacccaccccatgaacttcctcagcgagaagacactcaagggcaccttcttcggaaactacaagccccgcaccgacctgcccaacgtggtcgagatgtacatgaaaaaggagctggagctggagaagttcatcacgcacagcgtgcccttctcggagatcaacacggcgttcgacctgatgctcaagggggagagcctgcgctgcatcatgaggatggaggattagagcttcattgcaagcttgctcctcctgcagggcaggcatgtcgcacagcaaatgggcatgaaaagttgaaggcgctccagtcctccagcttgtgtagtacacagtagcaataaaacgttagtgtttgtcctgtgcccatcctgtattattctgttccagggtttcacctttatcgtcagtgtgtggtcaggtttcaacccttctcagaacaacccccctcccagaaaaaaaacaaaggaagaagtttgtgtttcaagtttcagaatcccctgtctgtaatatccatttgcatgacaataatgagatactgt

SEQ ID NO: 10466 - protein, 421 aa, Zea mays subsp. mays
  peptide (1)..(421): Ceres Seq. ID no. 12595048
  misc_feature (43)..(421): Homolog of NCBI NO: 113377 NR Description: ALCOHOL DEHYDROGENASE 2 >gi|82671|pir||A23084
  misc_feature (43)..(421): Homolog of NCBI NO: 6979319 NR Description: alcohol dehydrogenase 2 [Oryza sativa]
  misc_feature (43)..(420): Homolog of NCBI NO: 539057 NR Description: alcohol dehydrogenase (EC 1.1.1.1) - wheat (cv.
  misc_feature (43)..(420): Homolog of NCBI NO: 113385 NR Description: ALCOHOL DEHYDROGENASE 3 >gi|82349|pir||S04040
  misc_feature (43)..(420): Homolog of NCBI NO: 13872817 NR Description: alcohol dehydrogenase [Pennisetum glaucum]
  misc_feature (43)..(421): Homolog of NCBI NO: 82669 NR Description: alcohol dehydrogenase (EC 1.1.1.1) 1 - maize
  misc_feature (43)..(421): Homolog of NCBI NO: 22122 NR Description: alcohol dehydrogenase 1 [Zea mays] alcohol dehydrogenase 1 [Zea mays]
  misc_feature (43)..(421): Homolog of NCBI NO: 113362 NR Description: Alcohol dehydrogenase 1 (ADH slow-allele)
  misc_feature (43)..(421): Homolog of NCBI NO: 3420019 NR Description: putative alcohol dehydrogenase 1 [Sorghum bicolor]
  misc_feature (43)..(421): Homolog of NCBI NO: 113359 NR Description: Alcohol dehydrogenase 1 >gi|22120|emb|CAA25239.1|
TNFSSSAKCKECEEAVAKGFHSRVLGVVHRSSSVKEREREQAMATAGKVIKCRAAVTWEAGKPLSIEEVEVAPPQAMEVRIKILYTALCHTDVYFWEAKGQTPVFPRILGHEAGGIVESVGEGVTDVAPGDHVLPVFTGECKECAHCKSEESNMCDLLRINVDRGVMIGDGKSRFTISGQPIFHFVGTSTFSEYTVIHVGCLAKINPEAPLDKVCILSCGISTGLGATLNVAKPAKGSTVAIFGLGAVGLAAMEGARLAGASRIIGVDINPAKYEQAKKFGCTEFVNPKDHDKPVQEVLIELTNGGVDRSVECTGNVNAMISAFECVHDGWGVAVLVGVPHKDDQFKTHPMNFLSEKTLKGTFFGNYKPRTDLPNVVEMYMKKELELEKFITHSVPFSEINTAFDLMLKGESLRCIMRMED

SEQ ID NO: 10467 - protein, 379 aa, Zea mays subsp. mays
  peptide (1)..(379): Ceres Seq. ID no. 12595049
  misc_feature (1)..(379): Homolog of NCBI NO: 113377 NR Description: ALCOHOL DEHYDROGENASE 2 >gi|82671|pir||A23084
  misc_feature (1)..(379): Homolog of NCBI NO: 6979319 NR Description: alcohol dehydrogenase 2 [Oryza sativa]
  misc_feature (1)..(378): Homolog of NCBI NO: 539057 NR Description: alcohol dehydrogenase (EC 1.1.1.1) - wheat (cv.
  misc_feature (1)..(378): Homolog of NCBI NO: 113385 NR Description: ALCOHOL DEHYDROGENASE 3 >gi|82349|pir||S04040
  misc_feature (1)..(378): Homolog of NCBI NO: 13872817 NR Description: alcohol dehydrogenase [Pennisetum glaucum]
  misc_feature (1)..(379): Homolog of NCBI NO: 82669 NR Description: alcohol dehydrogenase (EC 1.1.1.1) 1 - maize
  misc_feature (1)..(379): Homolog of NCBI NO: 22122 NR Description: alcohol dehydrogenase 1 [Zea mays] alcohol dehydrogenase 1 [Zea mays]
  misc_feature (1)..(379): Homolog of NCBI NO: 113362 NR Description: Alcohol dehydrogenase 1 (ADH slow-allele)
  misc_feature (1)..(379): Homolog of NCBI NO: 3420019 NR Description: putative alcohol dehydrogenase 1 [Sorghum bicolor]
  misc_feature (1)..(379): Homolog of NCBI NO: 113359 NR Description: Alcohol dehydrogenase 1 >gi|22120|emb|CAA25239.1|
MATAGKVIKCRAAVTWEAGKPLSIEEVEVAPPQAMEVRIKILYTALCHTDVYFWEAKGQTPVFPRILGHEAGGIVESVGEGVTDVAPGDHVLPVFTGECKECAHCKSEESNMCDLLRINVDRGVMIGDGKSRFTISGQPIFHFVGTSTFSEYTVIHVGCLAKINPEAPLDKVCILSCGISTGLGATLNVAKPAKGSTVAIFGLGAVGLAAMEGARLAGASRIIGVDINPAKYEQAKKFGCTEFVNPKDHDKPVQEVLIELTNGGVDRSVECTGNVNAMISAFECVHDGWGVAVLVGVPHKDDQFKTHPMNFLSEKTLKGTFFGNYKPRTDLPNVVEMYMKKELELEKFITHSVPFSEINTAFDLMLKGESLRCIMRMED

SEQ ID NO: 10468 - protein, 345 aa, Zea mays subsp. mays
  peptide (1)..(345): Ceres Seq. ID no. 12595050
  misc_feature (1)..(345): Homolog of NCBI NO: 113377 NR Description: ALCOHOL DEHYDROGENASE 2 >gi|82671|pir||A23084
  misc_feature (1)..(345): Homolog of NCBI NO: 6979319 NR Description: alcohol dehydrogenase 2 [Oryza sativa]
  misc_feature (1)..(344): Homolog of NCBI NO: 539057 NR Description: alcohol dehydrogenase (EC 1.1.1.1) - wheat (cv.
  misc_feature (1)..(344): Homolog of NCBI NO: 113385 NR Description: ALCOHOL DEHYDROGENASE 3 >gi|82349|pir||S04040
  misc_feature (1)..(344): Homolog of NCBI NO: 13872817 NR Description: alcohol dehydrogenase [Pennisetum glaucum]
  misc_feature (1)..(345): Homolog of NCBI NO: 82669 NR Description: alcohol dehydrogenase (EC 1.1.1.1) 1 - maize
  misc_feature (1)..(345): Homolog of NCBI NO: 22122 NR Description: alcohol dehydrogenase 1 [Zea mays] alcohol dehydrogenase 1 [Zea mays]
  misc_feature (1)..(345): Homolog of NCBI NO: 113362 NR Description: Alcohol dehydrogenase 1 (ADH slow-allele)
  misc_feature (1)..(345): Homolog of NCBI NO: 3420019 NR Description: putative alcohol dehydrogenase 1 [Sorghum bicolor]
  misc_feature (1)..(345): Homolog of NCBI NO: 113359 NR Description: Alcohol dehydrogenase 1 >gi|22120|emb|CAA25239.1|
MEVRIKILYTALCHTDVYFWEAKGQTPVFPRILGHEAGGIVESVGEGVTDVAPGDHVLPVFTGECKECAHCKSEESNMCDLLRINVDRGVMIGDGKSRFTISGQPIFHFVGTSTFSEYTVIHVGCLAKINPEAPLDKVCILSCGISTGLGATLNVAKPAKGSTVAIFGLGAVGLAAMEGARLAGASRIIGVDINPAKYEQAKKFGCTEFVNPKDHDKPVQEVLIELTNGGVDRSVECTGNVNAMISAFECVHDGWGVAVLVGVPHKDDQFKTHPMNFLSEKTLKGTFFGNYKPRTDLPNVVEMYMKKELELEKFITHSVPFSEINTAFDLMLKGESLRCIMRMED

SEQ ID NO: 10469 - DNA, 966 bp, Zea mays subsp. mays
  misc_feature (1)..(966): Ceres Seq. ID no. 12400800
  misc_feature: MA Experiment ID: 108528 Result: Down-regulated in Transcription
  misc_feature: MA Experiment 108528 PARAMETER Experiment Name: Zm_Imbibed_Seeds_P Parameter: Age (day) Value: 5 vs. 2
  misc_feature: MA Experiment 108528 PARAMETER Experiment Name: Zm_Imbibed_Seeds_P Parameter: Organism Value: Zea mays
  misc_feature: MA Experiment 108528 PARAMETER Experiment Name: Zm_Imbibed_Seeds_P Parameter: Plant Line Value: 35A19
  misc_feature: MA Experiment 108528 PARAMETER Experiment Name: Zm_Imbibed_Seeds_P Parameter: Tissue Value: Aerial vs. Embryo
  misc_feature: MA Experiment ID: 108530 Result: Down-regulated in Transcription
  misc_feature: MA Experiment 108530 PARAMETER Experiment Name: Zm_Imbibed_Seeds_P Parameter: Age (day) Value: 6 vs. 2
  misc_feature: MA Experiment 108530 PARAMETER Experiment Name: Zm_Imbibed_Seeds_P Parameter: Organism Value: Zea mays
  misc_feature: MA Experiment 108530 PARAMETER Experiment Name: Zm_Imbibed_Seeds_P Parameter: Plant Line Value: 35A19
  misc_feature: MA Experiment 108530 PARAMETER Experiment Name: Zm_Imbibed_Seeds_P Parameter: Tissue Value: Aerial vs. Embryo
  misc_feature: MA Experiment ID: 108535 Result: Up-regulated in Transcription
  misc_feature: MA Experiment 108535 PARAMETER Experiment Name: Zm_Meristem_P Parameter: Age (day) Value: 8
  misc_feature: MA Experiment 108535 PARAMETER Experiment Name: Zm_Meristem_P Parameter: Organism Value: Zea mays
  misc_feature: MA Experiment 108535 PARAMETER Experiment Name: Zm_Meristem_P Parameter: Plant Line Value: 35A19
  misc_feature: MA Experiment 108535 PARAMETER Experiment Name: Zm_Meristem_P Parameter: Tissue Value: Root Meristem vs. Above Root Meristem
  misc_feature: MA Experiment ID: 108556 Result: Down-regulated in Transcription
  misc_feature: MA Experiment 108556 PARAMETER Experiment Name: Zm_Drought_P Parameter: Age (day) Value: 9
  misc_feature: MA Experiment 108556 PARAMETER Experiment Name: Zm_Drought_P Parameter: Organism Value: Zea mays
  misc_feature: MA Experiment 108556 PARAMETER Experiment Name: Zm_Drought_P Parameter: Plant Line Value: 35A19
  misc_feature: MA Experiment 108556 PARAMETER Experiment Name: Zm_Drought_P Parameter: Timepoint (hr) Value: 24
  misc_feature: MA Experiment 108556 PARAMETER Experiment Name: Zm_Drought_P Parameter: Tissue Value: Aerial
  misc_feature: MA Experiment 108556 PARAMETER Experiment Name: Zm_Drought_P Parameter: Treatment Value: Drought vs. No Drought
  misc_feature: MA Experiment ID: 20000478 Result: Down-regulated in Transcription
  misc_feature: MA Experiment 20000478 PARAMETER Experiment Name: Zm_5mM_SA_P Parameter: Age (day) Value: 11
  misc_feature: MA Experiment 20000478 PARAMETER Experiment Name: Zm_5mM_SA_P Parameter: Organism Value: Zea mays
  misc_feature: MA Experiment 20000478 PARAMETER Experiment Name: Zm_5mM_SA_P Parameter: Plant Line Value: 35A19
  misc_feature: MA Experiment 20000478 PARAMETER Experiment Name: Zm_5mM_SA_P Parameter: Timepoint (hr) Value: 72
  misc_feature: MA Experiment 20000478 PARAMETER Experiment Name: Zm_5mM_SA_P Parameter: Tissue Value: Aerial
  misc_feature: MA Experiment 20000478 PARAMETER Experiment Name: Zm_5mM_SA_P Parameter: Treatment Value: 5mM SA vs. No Treatment
  misc_feature: MA Experiment ID: 20000492 Result: Up-regulated in Transcription
  misc_feature: MA Experiment 20000492 PARAMETER Experiment Name: Zm_Hybrid_Seed_Dev_P Parameter: DAP Value: 12
  misc_feature: MA Experiment 20000492 PARAMETER Experiment Name: Zm_Hybrid_Seed_Dev_P Parameter: Organism Value: Zea mays
  misc_feature: MA Experiment 20000492 PARAMETER Experiment Name: Zm_Hybrid_Seed_Dev_P Parameter: Plant Line Value: 35A19
  misc_feature: MA Experiment 20000492 PARAMETER Experiment Name: Zm_Hybrid_Seed_Dev_P Parameter: Tissue Value: Fert Kernel vs. Unfert Floret
  misc_feature: MA Experiment ID: 20000632 Result: Down-regulated in Transcription
  misc_feature: MA Experiment 20000632 PARAMETER Experiment Name: Zm_Herbicide-Treatments_P Parameter: Timepoint (hr) Value: 4
  misc_feature: MA Experiment 20000632 PARAMETER Experiment Name: Zm_Herbicide-Treatments_P Parameter: Tissue Value: Aerial
  misc_feature: MA Experiment 20000632 PARAMETER Experiment Name: Zm_Herbicide-Treatments_P Parameter: Treatment Value: Glean vs. No Treatment
aaaaataaataaataaaaacacgccgccgccatcaatggcgatgtcgcgcttcgggcgctccgggcagccggagaaccgcgaatctttctccatcctcgtcctcaacgtctccttccgcactacggctgacgatctcttcccgctcttcgatcgctacggcaaggtcttagacatctacatcccgcgcgaccacaggactggggatccgcgagggttcgcgttcgtgaggtacaattacgaggatgcaggcgcgggatgccattgacgggcttgatgggatgaggtttgatgggcgtgcgctcatggtgcagtttgccaaatacggacccaatgctgaaaagattcataggggtagaattacagaagaaaatccaaagccaaggggtcgttgcagaagccgcagtccaagacagaggtatcgagaggattatcgggatagagactatagaaggcgaagccagagcagaagtagggagcgatatgaacaggccgggtacagagatggtgatcatcgtcgccataggactcacagtatcagtcctgattatgacaggaaacgtaacagacacagtggctctcctgtacttaaacgccccagtcatagcagaagtcgttcgcctcgtagggcacctcatgaaggaatacctagcaagcccagagatggccgcgctgcatgttctggaagcccttgaccctgagctgtggctgaatatcacacagtttctcctggacagcttgaggcatctaaacagttctcatcatttgtattttcttactaagatggcctttgttttagtccaggatgagtagacgagctttggcaaaaacaacaatgtctgcttggttactgaatctacatggtgacaatgatggaatattgatgtggcacagcattcaacttccagtactgcgctttgtaaacatctaagcctcatttgggaactatatgcatgttggatattgtc

SEQ ID NO: 10470 - protein, 173 aa, Zea mays subsp. mays
  peptide (1)..(173): Ceres Seq. ID no. 12400801
MGVRSWCSLPNTDPMLKRFIGVELQKKIQSQGVVAEAAVQDRGIERIIGIETIEGEARAEVGSDMNRPGTEMVIIVAIGLTVSVLIMTGNVTDTVALLYLNAPVIAEVVRLVGHLMKEYLASPEMAALHVLEALDPELWLNITQFLLDSLRHLNSSHHLYFLTKMAFVLVQDE

SEQ ID NO: 10471 - protein, 159 aa, Zea mays subsp. mays
  peptide (1)..(159): Ceres Seq. ID no. 12400802
MLKRFIGVELQKKIQSQGVVAEAAVQDRGIERIIGIETIEGEARAEVGSDMNRPGTEMVIIVAIGLTVSVLIMTGNVTDTVALLYLNAPVIAEVVRLVGHLMKEYLASPEMAALHVLEALDPELWLNITQFLLDSLRHLNSSHHLYFLTKMAFVLVQDE

SEQ ID NO: 10472 - protein, 149 aa, Zea mays subsp. mays
  peptide (1)..(149): Ceres Seq. ID no. 12400803
  misc_feature (2)..(149): Homolog of NCBI NO: 33146621 NR Description: putative splicing factor, arginine/serine-rich 2
  misc_feature (2)..(149): Homolog of NCBI NO: 7446336 NR Description: probable arginine/serine-rich splicing factor -
  misc_feature (2)..(149): Homolog of NCBI NO: 9843653 NR Description: splicing factor SC35 [Arabidopsis thaliana]
  misc_feature (2)..(149): Homolog of NCBI NO: 15237641 NR Description: arginine/serine-rich splicing factor SC35; id: At5g64200.1, supported by cDNA: gi_17380867 [Arabidopsis >gi|17380868|gb|AAL36246.1| unknown protein [Arabidopsis
  misc_feature (38)..(142): Homolog of NCBI NO: 9843653 NR Description: splicing factor SC35 [Arabidopsis thaliana]
  misc_feature (38)..(142): Homolog of NCBI NO: 15237641 NR Description: arginine/serine-rich splicing factor SC35; id: At5g64200.1, supported by cDNA: gi_17380867 [Arabidopsis >gi|17380868|gb|AAL36246.1| unknown protein [Arabidopsis
  misc_feature (1)..(149): Homolog of NCBI NO: 266991 NR Description: Splicing factor, arginine/serine-rich 2 (Splicing
  misc_feature (1)..(139): Homolog of NCBI NO: 28279759 NR Description: Similar to splicing factor, arginine/serine-rich
  misc_feature (1)..(149): Homolog of NCBI NO: 6755478 NR Description: splicing factor, arginine/serine-rich 2; DNA Chr 11, Wayne State University 175, expressed; splicing factor [Mus musculus] >gi|27691222|ref|XP_213556.1| similar to
  misc_feature (1)..(149): Homolog of NCBI NO: 39794351 NR Description: Unknown (protein for MGC:75633) [Silurana
MQARDAIDGLDGMRFDGRALMVQFAKYGPNAEKIHRGRITEENPKPRGRCRSRSPRQRYREDYRDRDYRRRSQSRSRERYEQAGYRDGDHRRHRTHSISPDYDRKRNRHSGSPVLKRPSHSRSRSPRRAPHEGIPSKPRDGRAACSGSP

SEQ ID NO: 10473 - DNA, 949 bp, Zea mays subsp. mays; identical to SEQ ID NO: 10425
  misc_feature (1)..(949): Ceres Seq. ID no. 12357451
  misc_feature: MA Experiment ID: 108528 Result: Up-regulated in Transcription
  misc_feature: MA Experiment 108528 PARAMETER Experiment Name: Zm_Imbibed_Seeds_P Parameter: Age (day) Value: 5 vs. 2
  misc_feature: MA Experiment 108528 PARAMETER Experiment Name: Zm_Imbibed_Seeds_P Parameter: Organism Value: Zea mays
  misc_feature: MA Experiment 108528 PARAMETER Experiment Name: Zm_Imbibed_Seeds_P Parameter: Plant Line Value: 35A19
  misc_feature: MA Experiment 108528 PARAMETER Experiment Name: Zm_Imbibed_Seeds_P Parameter: Tissue Value: Aerial vs. Embryo
  misc_feature: MA Experiment ID: 108530 Result: Up-regulated in Transcription
  misc_feature: MA Experiment 108530 PARAMETER Experiment Name: Zm_Imbibed_Seeds_P Parameter: Age (day) Value: 6 vs. 2
  misc_feature: MA Experiment 108530 PARAMETER Experiment Name: Zm_Imbibed_Seeds_P Parameter: Organism Value: Zea mays
  misc_feature: MA Experiment 108530 PARAMETER Experiment Name: Zm_Imbibed_Seeds_P Parameter: Plant Line Value: 35A19
  misc_feature: MA Experiment 108530 PARAMETER Experiment Name: Zm_Imbibed_Seeds_P Parameter: Tissue Value: Aerial vs. Embryo
  misc_feature: MA Experiment ID: 108543 Result: Up-regulated in Transcription
  misc_feature: MA Experiment ID: 108544 Result: Up-regulated in Transcription
  misc_feature: MA Experiment ID: 108547 Result: Up-regulated in Transcription
  misc_feature: MA Experiment 108547 PARAMETER Experiment Name: Zm_Imbibed_Seeds_P Parameter: Age (day) Value: 4 vs. 2
  misc_feature: MA Experiment 108547 PARAMETER Experiment Name: Zm_Imbibed_Seeds_P Parameter: Organism Value: Zea mays
  misc_feature: MA Experiment 108547 PARAMETER Experiment Name: Zm_Imbibed_Seeds_P Parameter: Plant Line Value: 35A19
  misc_feature: MA Experiment 108547 PARAMETER Experiment Name: Zm_Imbibed_Seeds_P Parameter: Tissue Value: Aerial vs. Embryo
  misc_feature: MA Experiment ID: 20000480 Result: Down-regulated in Transcription
  misc_feature: MA Experiment 20000480 PARAMETER Experiment Name: Zm_Drought_P Parameter: Age (day) Value: 11
  misc_feature: MA Experiment 20000480 PARAMETER Experiment Name: Zm_Drought_P Parameter: Organism Value: Zea mays
  misc_feature: MA Experiment 20000480 PARAMETER Experiment Name: Zm_Drought_P Parameter: Plant Line Value: 35A19
  misc_feature: MA Experiment 20000480 PARAMETER Experiment Name: Zm_Drought_P Parameter: Timepoint (hr) Value: 72
  misc_feature: MA Experiment 20000480 PARAMETER Experiment Name: Zm_Drought_P Parameter: Tissue Value: Aerial
  misc_feature: MA Experiment 20000480 PARAMETER Experiment Name: Zm_Drought_P Parameter: Treatment Value: Drought vs. No Drought

SEQ ID NO: 10474 - protein, 227 aa, Zea mays subsp. mays; identical to SEQ ID NO: 3431
  peptide (1)..(227): Ceres Seq. ID no. 12357452
  misc_feature (22)..(227): Homolog of NCBI NO: 3915008 NR Description: Superoxide dismutase [Cu-Zn], chloroplast
  misc_feature (22)..(227): Homolog of NCBI NO: 14326463 NR Description: copper/zinc superoxide dismutase precursor
  misc_feature (22)..(227): Homolog of NCBI NO: 7433318 NR Description: superoxide dismutase (EC 1.15.1.1) (Cu-Zn) 2, - wheat >gi|1572627|gb|AAB67991.1| Cu/Zn superoxide dismutase
  misc_feature (22)..(227): Homolog of NCBI NO: 7433305 NR Description: probable superoxide dismutase (EC 1.15.1.1)
  misc_feature (67)..(227): Homolog of NCBI NO: 20900 NR Description: Cu/Zn superoxide dismutase II [Pisum sativum]
  misc_feature (64)..(227): Homolog of NCBI NO: 11358868 NR Description: superoxide dismutase (EC 1.15.1.1) (Cu-Zn)
  misc_feature (64)..(227): Homolog of NCBI NO: 18401659 NR Description: copper/zinc superoxide dismutase (CSD2); protein At2g28190.1, supported by cDNA: 39796., supported by cDNA:
  misc_feature (67)..(227): Homolog of NCBI NO: 134683 NR Description: Superoxide dismutase [Cu-Zn], chloroplast
  misc_feature (64)..(227): Homolog of NCBI NO: 5689611 NR Description: copper/zinc superoxide dismutase [Arabidopsis
  misc_feature (22)..(227): Homolog of NCBI NO: 38073257 NR Description: superoxide dismutase [Trifolium pratense]
  misc_feature (22)..(227): Homolog of NCBI NO: 3915008 NR Description: Superoxide dismutase [Cu-Zn], chloroplast
  misc_feature (22)..(227): Homolog of NCBI NO: 14326463 NR Description: copper/zinc superoxide dismutase precursor
  misc_feature (22)..(227): Homolog of NCBI NO: 7433318 NR Description: superoxide dismutase (EC 1.15.1.1) (Cu-Zn) 2, - wheat >gi|1572627|gb|AAB67991.1| Cu/Zn superoxide dismutase
  misc_feature (22)..(227): Homolog of NCBI NO: 7433305 NR Description: probable superoxide dismutase (EC 1.15.1.1)
  misc_feature (67)..(227): Homolog of NCBI NO: 20900 NR Description: Cu/Zn superoxide dismutase II [Pisum sativum]
  misc_feature (64)..(227): Homolog of NCBI NO: 11358868 NR Description: superoxide dismutase (EC 1.15.1.1) (Cu-Zn)
  misc_feature (64)..(227): Homolog of NCBI NO: 18401659 NR Description: copper/zinc superoxide dismutase (CSD2); protein At2g28190.1, supported by cDNA: 39796., supported by cDNA:
  misc_feature (67)..(227): Homolog of NCBI NO: 134683 NR Description: Superoxide dismutase [Cu-Zn], chloroplast
  misc_feature (64)..(227): Homolog of NCBI NO: 5689611 NR Description: copper/zinc superoxide dismutase [Arabidopsis
  misc_feature (22)..(227): Homolog of NCBI NO: 38073257 NR Description: superoxide dismutase [Trifolium pratense]

SEQ ID NO: 10475 - protein, 206 aa, Zea mays subsp. mays; identical to SEQ ID NO: 3432
  peptide (1)..(206): Ceres Seq. ID no. 12357453
  misc_feature (1)..(206): Homolog of NCBI NO: 3915008 NR Description: Superoxide dismutase [Cu-Zn], chloroplast
  misc_feature (1)..(206): Homolog of NCBI NO: 14326463 NR Description: copper/zinc superoxide dismutase precursor
  misc_feature (1)..(206): Homolog of NCBI NO: 7433318 NR Description: superoxide dismutase (EC 1.15.1.1) (Cu-Zn) 2, - wheat >gi|1572627|gb|AAB67991.1| Cu/Zn superoxide dismutase
  misc_feature (1)..(206): Homolog of NCBI NO: 7433305 NR Description: probable superoxide dismutase (EC 1.15.1.1)
  misc_feature (46)..(206): Homolog of NCBI NO: 20900 NR Description: Cu/Zn superoxide dismutase II [Pisum sativum]
  misc_feature (43)..(206): Homolog of NCBI NO: 11358868 NR Description: superoxide dismutase (EC 1.15.1.1) (Cu-Zn)
  misc_feature (43)..(206): Homolog of NCBI NO: 18401659 NR Description: copper/zinc superoxide dismutase (CSD2); protein At2g28190.1, supported by cDNA: 39796., supported by cDNA:
  misc_feature (46)..(206): Homolog of NCBI NO: 134683 NR Description: Superoxide dismutase [Cu-Zn], chloroplast
  misc_feature (43)..(206): Homolog of NCBI NO: 5689611 NR Description: copper/zinc superoxide dismutase [Arabidopsis
  misc_feature (1)..(206): Homolog of NCBI NO: 38073257 NR Description: superoxide dismutase [Trifolium pratense]
  misc_feature (1)..(206): Homolog of NCBI NO: 3915008 NR Description: Superoxide dismutase [Cu-Zn], chloroplast
  misc_feature (1)..(206): Homolog of NCBI NO: 14326463 NR Description: copper/zinc superoxide dismutase precursor
  misc_feature (1)..(206): Homolog of NCBI NO: 7433318 NR Description: superoxide dismutase (EC 1.15.1.1) (Cu-Zn) 2, - wheat >gi|1572627|gb|AAB67991.1| Cu/Zn superoxide dismutase
  misc_feature (1)..(206): Homolog of NCBI NO: 7433305 NR Description: probable superoxide dismutase (EC 1.15.1.1)
  misc_feature (46)..(206): Homolog of NCBI NO: 20900 NR Description: Cu/Zn superoxide dismutase II [Pisum sativum]
  misc_feature (43)..(206): Homolog of NCBI NO: 11358868 NR Description: superoxide dismutase (EC 1.15.1.1) (Cu-Zn)
  misc_feature (43)..(206): Homolog of NCBI NO: 18401659 NR Description: copper/zinc superoxide dismutase (CSD2); protein At2g28190.1, supported by cDNA: 39796., supported by cDNA:
  misc_feature (46)..(206): Homolog of NCBI NO: 134683 NR Description: Superoxide dismutase [Cu-Zn], chloroplast
  misc_feature (43)..(206): Homolog of NCBI NO: 5689611 NR Description: copper/zinc superoxide dismutase [Arabidopsis
  misc_feature (1)..(206): Homolog of NCBI NO: 38073257 NR Description: superoxide dismutase [Trifolium pratense]

SEQ ID NO: 10476 - DNA, 735 bp, Zea mays subsp. mays
  misc_feature (1)..(735): Ceres Seq. ID no. 12351018
  misc_feature: MA Experiment ID: 20000487 Result: Up-regulated in Transcription
  misc_feature: MA Experiment 20000487 PARAMETER Experiment Name: Zm_50mM_NH4NO3_L_to_H_P Parameter: Organism Value: Zea mays
  misc_feature: MA Experiment 20000487 PARAMETER Experiment Name: Zm_50mM_NH4NO3_L_to_H_P Parameter: Timepoint (hr) Value: 4
  misc_feature: MA Experiment 20000487 PARAMETER Experiment Name: Zm_50mM_NH4NO3_L_to_H_P Parameter: Tissue Value: Leaves
  misc_feature: MA Experiment 20000487 PARAMETER Experiment Name: Zm_50mM_NH4NO3_L_to_H_P Parameter: Treatment Value: 50mM NH4NO3 vs. 100mM Mannitol
  misc_feature: MA Experiment ID: 20000534 Result: Down-regulated in Transcription
  misc_feature: MA Experiment 20000534 PARAMETER Experiment Name: Zm_Hybrid_Pollen_P Parameter: Age (day) Value: 8
  misc_feature: MA Experiment 20000534 PARAMETER Experiment Name: Zm_Hybrid_Pollen_P Parameter: Organism Value: Zea mays
  misc_feature: MA Experiment 20000534 PARAMETER Experiment Name: Zm_Hybrid_Pollen_P Parameter: Plant Line Value: 35A19
  misc_feature: MA Experiment 20000534 PARAMETER Experiment Name: Zm_Hybrid_Pollen_P Parameter: Tissue Value: Pollen vs. Aerial
cccaaaatactccaccaccgcacccactagggtttccgcaccgcattgcagaacctcgccgcctccaccctcaccacaccaccggcgatgtccacagcggcggcgcagggcggcagcgacaagccggcgctccggaggcccgtcttcaccaaggtcgaccagctcaggccgggcaccaacgggcacaccctcaccgtcaaggtcgtcagcgccacccccgtgcctgggcgcgcgcgcccaggcgcacccgccgccgccccatcccgcgcgccgcgcatcgccgagtgcctcgtcggggacgagaccggcgccatcgtcttcaccgcccgcaacgaccaagttgacttgctgaagcccaatgcgacagtgatcttgcgcaatgccaaaatagacatgttcaaaggatcaatgaggcttgcagtggacaagtgggggcggattgaggctgtagagccagccagtttcacggtgaaggaagacaacaacctgtctctaatagagtatgaattggttaatgtggctgagtaactgtccaatccaagcgtttctgccccctttatttcgtgccataagaaggaagtaccatgaatgaacattataaagcctcttgaagcgaagcgagtttatttgctacggtggggtagataaaggtcaaggctgtatggcctgtgttagaactttggataaattaagatgaattgcccttgcatctatgagattgttatccatctttgt

SEQ ID NO: 10477 - protein, 146 aa, Zea mays subsp. mays
  peptide (1)..(146): Ceres Seq. ID no. 12351019
  misc_feature (1)..(146): Homolog of NCBI NO: 34904470 NR Description: OSJNBa0086P08.14 [Oryza sativa (japonica
  misc_feature (1)..(146): Homolog of NCBI NO: 18403397 NR Description: Expressed protein; protein id: At2g33845.1, by cDNA: 32001. [Arabidopsis thaliana] Expressed protein [Arabidopsis thaliana]
  misc_feature (3)..(144): Homolog of NCBI NO: 15235304 NR Description: putative protein; protein id: At4g28440.1, by cDNA: 41008., supported by cDNA: gi_15292942, supported by gi_15912308, supported by cDNA: gi_20259656 [Arabidopsis
  misc_feature (14)..(144): Homolog of NCBI NO: 34909622 NR Description: P0435B05.31 [Oryza sativa (japonica
  misc_feature (10)..(146): Homolog of NCBI NO: 18395285 NR Description: expressed protein; protein id: At1g23750.1, by cDNA: 15450. [Arabidopsis thaliana] >gi|25341929|pir||F86371
  misc_feature (14)..(144): Homolog of NCBI NO: 18391179 NR Description: expressed protein; protein id: At1g10590.1, by cDNA: 7488., supported by cDNA: gi_14335099, supported by gi_15027864 [Arabidopsis thaliana] >gi|14335100|gb|AAK59829.1|
  misc_feature (14)..(144): Homolog of NCBI NO: 30681801 NR Description: expressed protein [Arabidopsis thaliana]
  misc_feature (1)..(142): Homolog of NCBI NO: 15219562 NR Description: hypothetical protein; protein id: At1g03810.1
  misc_feature (14)..(95): Homolog of NCBI NO: 6573753 NR Description: F20B24.1 [Arabidopsis thaliana]
  misc_feature (85)..(144): Homolog of NCBI NO: 6573753 NR Description: F20B24.1 [Arabidopsis thaliana]
MSTAAAQGGSDKPALRRPVFTKVDQLRPGTNGHTLTVKVVSATPVPGRARPGAPAAAPSRAPRIAECLVGDETGAIVFTARNDQVDLLKPNATVILRNAKIDMFKGSMRLAVDKWGRIEAVEPASFTVKEDNNLSLIEYELVNVAE

SEQ ID NO: 10478 - protein, 116 aa, Zea mays subsp. mays
  peptide (1)..(116): Ceres Seq. ID no. 12351020
  misc_feature (14)..(109): Pfam Name: Extensin-like region Pfam Description: Extensin-like region
  misc_feature (1)..(116): Homolog of NCBI NO: 31227421 NR Description: ENSANGP00000004917 [Anopheles gambiae]
  misc_feature (1)..(113): Homolog of NCBI NO: 25989119 NR Description: unknown [Streptomyces aureofaciens]
  misc_feature (1)..(116): Homolog of NCBI NO: 31239605 NR Description: ENSANGP00000009012 [Anopheles gambiae]
PKYSTTAPTRVSAPHCRTSPPPPSPHHRRCPQRRRRAAATSRRSGGPSSPRSTSSGRAPTGTPSPSRSSAPPPCLGARAQAHPPPPHPARRASPSASSGTRPAPSSSPPATTKLTC

SEQ ID NO: 10479 - protein, 113 aa, Zea mays subsp. mays
  peptide (1)..(113): Ceres Seq. ID no. 12351021
QNTPPPHPLGFPHRIAEPRRLHPHHTTGDVHSGGAGRQRQAGAPEARLHQGRPAQAGHQRAHPHRQGRQRHPRAWARAPRRTRRRPIPRAAHRRVPRRGRDRRHRLHRPQRPS

SEQ ID NO: 10480 - DNA, 662 bp, Zea mays subsp. mays
  misc_feature (1)..(662): Ceres Seq. ID no. 12400556
  misc_feature: MA Experiment ID: 108528 Result: Up-regulated in Transcription
  misc_feature: MA Experiment 108528 PARAMETER Experiment Name: Zm_Imbibed_Seeds_P Parameter: Age (day) Value: 5 vs. 2
  misc_feature: MA Experiment 108528 PARAMETER Experiment Name: Zm_Imbibed_Seeds_P Parameter: Organism Value: Zea mays
  misc_feature: MA Experiment 108528 PARAMETER Experiment Name: Zm_Imbibed_Seeds_P Parameter: Plant Line Value: 35A19
  misc_feature: MA Experiment 108528 PARAMETER Experiment Name: Zm_Imbibed_Seeds_P Parameter: Tissue Value: Aerial vs. Embryo
  misc_feature: MA Experiment ID: 108530 Result: Up-regulated in Transcription
  misc_feature: MA Experiment 108530 PARAMETER Experiment Name: Zm_Imbibed_Seeds_P Parameter: Age (day) Value: 6 vs. 2
  misc_feature: MA Experiment 108530 PARAMETER Experiment Name: Zm_Imbibed_Seeds_P Parameter: Organism Value: Zea mays
  misc_feature: MA Experiment 108530 PARAMETER Experiment Name: Zm_Imbibed_Seeds_P Parameter: Plant Line Value: 35A19
  misc_feature: MA Experiment 108530 PARAMETER Experiment Name: Zm_Imbibed_Seeds_P Parameter: Tissue Value: Aerial vs. Embryo
  misc_feature: MA Experiment ID: 108536 Result: Down-regulated in Transcription
  misc_feature: MA Experiment 108536 PARAMETER Experiment Name: Zm_Meristem_P Parameter: Age (day) Value: 8
  misc_feature: MA Experiment 108536 PARAMETER Experiment Name: Zm_Meristem_P Parameter: Organism Value: Zea mays
  misc_feature: MA Experiment 108536 PARAMETER Experiment Name: Zm_Meristem_P Parameter: Plant Line Value: 35A19
  misc_feature: MA Experiment 108536 PARAMETER Experiment Name: Zm_Meristem_P Parameter: Tissue Value: Shoot Meristem vs. Above Shoot Meristem
  misc_feature: MA Experiment ID: 108545 Result: Up-regulated in Transcription
  misc_feature: MA Experiment 108545 PARAMETER Experiment Name: Zm_Imbibed_Seeds_P Parameter: Age (day) Value: 3 vs. 2
  misc_feature: MA Experiment 108545 PARAMETER Experiment Name: Zm_Imbibed_Seeds_P Parameter: Organism Value: Zea mays
  misc_feature: MA Experiment 108545 PARAMETER Experiment Name: Zm_Imbibed_Seeds_P Parameter: Plant Line Value: 35A19
  misc_feature: MA Experiment 108545 PARAMETER Experiment Name: Zm_Imbibed_Seeds_P Parameter: Tissue Value: Aerial vs. Embryo
  misc_feature: MA Experiment ID: 108547 Result: Up-regulated in Transcription
  misc_feature: MA Experiment 108547 PARAMETER Experiment Name: Zm_Imbibed_Seeds_P Parameter: Age (day) Value: 4 vs. 2
  misc_feature: MA Experiment 108547 PARAMETER Experiment Name: Zm_Imbibed_Seeds_P Parameter: Organism Value: Zea mays
  misc_feature: MA Experiment 108547 PARAMETER Experiment Name: Zm_Imbibed_Seeds_P Parameter: Plant Line Value: 35A19
  misc_feature: MA Experiment 108547 PARAMETER Experiment Name: Zm_Imbibed_Seeds_P Parameter: Tissue Value: Aerial vs. Embryo
  misc_feature: MA Experiment ID: 108556 Result: Down-regulated in Transcription
  misc_feature: MA Experiment 108556 PARAMETER Experiment Name: Zm_Drought_P Parameter: Age (day) Value: 9
  misc_feature: MA Experiment 108556 PARAMETER Experiment Name: Zm_Drought_P Parameter: Organism Value: Zea mays
  misc_feature: MA Experiment 108556 PARAMETER Experiment Name: Zm_Drought_P Parameter: Plant Line Value: 35A19
  misc_feature: MA Experiment 108556 PARAMETER Experiment Name: Zm_Drought_P Parameter: Timepoint (hr) Value: 24
  misc_feature: MA Experiment 108556 PARAMETER Experiment Name: Zm_Drought_P Parameter: Tissue Value: Aerial
  misc_feature: MA Experiment 108556 PARAMETER Experiment Name: Zm_Drought_P Parameter: Treatment Value: Drought vs. No Drought
  misc_feature: MA Experiment ID: 20000480 Result: Down-regulated in Transcription
  misc_feature: MA Experiment 20000480 PARAMETER Experiment Name: Zm_Drought_P Parameter: Age (day) Value: 11
  misc_feature: MA Experiment 20000480 PARAMETER Experiment Name: Zm_Drought_P Parameter: Organism Value: Zea mays
  misc_feature: MA Experiment 20000480 PARAMETER Experiment Name: Zm_Drought_P Parameter: Plant Line Value: 35A19
  misc_feature: MA Experiment 20000480 PARAMETER Experiment Name: Zm_Drought_P Parameter: Timepoint (hr) Value: 72
  misc_feature: MA Experiment 20000480 PARAMETER Experiment Name: Zm_Drought_P Parameter: Tissue Value: Aerial
  misc_feature: MA Experiment 20000480 PARAMETER Experiment Name: Zm_Drought_P Parameter: Treatment Value: Drought vs. No Drought
  misc_feature: MA Experiment ID: 20000534 Result: Down-regulated in Transcription
  misc_feature: MA Experiment 20000534 PARAMETER Experiment Name: Zm_Hybrid_Pollen_P Parameter: Age (day) Value: 8
  misc_feature: MA Experiment 20000534 PARAMETER Experiment Name: Zm_Hybrid_Pollen_P Parameter: Organism Value: Zea mays
  misc_feature: MA Experiment 20000534 PARAMETER Experiment Name: Zm_Hybrid_Pollen_P Parameter: Plant Line Value: 35A19
  misc_feature: MA Experiment 20000534 PARAMETER Experiment Name: Zm_Hybrid_Pollen_P Parameter: Tissue Value: Pollen vs. Aerial
  misc_feature: MA Experiment ID: 20000630 Result: Down-regulated in Transcription
  misc_feature: MA Experiment 20000630 PARAMETER Experiment Name: Zm_Herbicide-Treatments_P Parameter: Timepoint (hr) Value: 4
  misc_feature: MA Experiment 20000630 PARAMETER Experiment Name: Zm_Herbicide-Treatments_P Parameter: Tissue Value: Aerial
  misc_feature: MA Experiment 20000630 PARAMETER Experiment Name: Zm_Herbicide-Treatments_P Parameter: Treatment Value: Roundup vs. No Treatment
aattctctctcgaccgcggcatggccgccggcctctcattcccccgcgccggggccccgttcatcctcctccgcacctcctgtttctctccgtgggcagctctggtgccccgccgtcgacttctctctgggcctcccactgccggtgatcccccgcccccggcgctcccgccaacttcgaagctcgccgccccgccggttgtgggaacgccggagcccccgctgccgtttagggccgtggaggcggagatccttcgcgatattgaccccgtcgtcctgctcatcaaggatatcctccactccgatagatacggggatggcgaatgtctctgcccaagggacgaaaatgtcgtcgtggagaagctcctctcctaccatccacgcgcgcaggacaaaattgggtgtggacttgacgctataatggttgataggcaccctgagttcagaaagtcaagatgcctcttcgttgttcgaacagacggtgtttggattgatttctcataccagaagtgcctccgtgcatacatccgggaaaagtacccgtctcatgccgacagatttatacgagaacatttcaagcgaacatgaagcaaacccaaaagtaatttgaatacattgtatttttatgagttttggcatagtttatgtacatcattgaccctc

SEQ ID NO: 10481 - protein, 194 aa, Zea mays subsp. mays
  peptide (1)..(194): Ceres Seq. ID no. 12400557
  misc_feature (8)..(194): Homolog of NCBI NO: 34015211 NR Description: putative defective chloroplasts and leaves (DCL)
  misc_feature (76)..(193): Homolog of NCBI NO: 15232596 NR Description: putative protein; protein id: At3g46630.1, by cDNA: 21432. [Arabidopsis thaliana] >gi|11357353|pir||T45600
  misc_feature (80)..(193): Homolog of NCBI NO: 22330069 NR Description: defective chloroplasts and leaves (DCL) protein [Arabidopsis thaliana] >gi|25334999|pir||C96510 hypothetical
  misc_feature (80)..(193): Homolog of NCBI NO: 18650724 NR Description: DCL protein [Coffea arabica]
  misc_feature (80)..(193): Homolog of NCBI NO: 6014934 NR Description: DCL PROTEIN, CHLOROPLAST PRECURSOR (DEFECTIVE
  misc_feature (56)..(194): Homolog of NCBI NO: 15225617 NR Description: unknown protein; protein id: At2g40040.1
  misc_feature (76)..(192): Homolog of NCBI NO: 34905864 NR Description: similar to DNA-directed RNA polymerase subunit A'
FSLDRGMAAGLSFPRAGAPFILLRTSCFSPWAALVPRRRLLSGPPTAGDPPPPALPPTSKLAAPPVVGTPEPPLPFRAVEAEILRDIDPVVLLIKDILHSDRYGDGECLCPRDENVVVEKLLSYHPRAQDKIGCGLDAIMVDRHPEFRKSRCLFVVRTDGVWIDFSYQKCLRAYIREKYPSHADRFIREHFKRT

SEQ ID NO: 10482 - protein, 188 aa, Zea mays subsp. mays
  peptide (1)..(188): Ceres Seq. ID no. 12400558
  misc_feature (2)..(188): Homolog of NCBI NO: 34015211 NR Description: putative defective chloroplasts and leaves (DCL)
  misc_feature (70)..(187): Homolog of NCBI NO: 15232596 NR Description: putative protein; protein id: At3g46630.1, by cDNA: 21432. [Arabidopsis thaliana] >gi|11357353|pir||T45600
  misc_feature (74)..(187): Homolog of NCBI NO: 22330069 NR Description: defective chloroplasts and leaves (DCL) protein [Arabidopsis thaliana] >gi|25334999|pir||C96510 hypothetical
  misc_feature (74)..(187): Homolog of NCBI NO: 18650724 NR Description: DCL protein [Coffea arabica]
  misc_feature (74)..(187): Homolog of NCBI NO: 6014934 NR Description: DCL PROTEIN, CHLOROPLAST PRECURSOR (DEFECTIVE
  misc_feature (50)..(188): Homolog of NCBI NO: 15225617 NR Description: unknown protein; protein id: At2g40040.1
  misc_feature (70)..(186): Homolog of NCBI NO: 34905864 NR Description: similar to DNA-directed RNA polymerase subunit A'
MAAGLSFPRAGAPFILLRTSCFSPWAALVPRRRLLSGPPTAGDPPPPALPPTSKLAAPPVVGTPEPPLPFRAVEAEILRDIDPVVLLIKDILHSDRYGDGECLCPRDENVVVEKLLSYHPRAQDKIGCGLDAIMVDRHPEFRKSRCLFVVRTDGVWIDFSYQKCLRAYIREKYPSHADRFIREHFKRT

SEQ ID NO: 10483 - protein, 139 aa, Zea mays subsp. mays
  peptide (1)..(139): Ceres Seq. ID no. 12400559
NSLSTAAWPPASHSPAPGPRSSSSAPPVSLRGQLWCPAVDFSLGLPLPVIPRPRRSRQLRSSPPRRLWERRSPRCRLGPWRRRSFAILTPSSCSSRISSTPIDTGMANVSAQGTKMSSWRSSSPTIHARRTKLGVDLTL

SEQ ID NO: 10484 - DNA, 638 bp, Zea mays subsp. mays
  misc_feature (1)..(638): Ceres Seq. ID no. 12400466
  misc_feature: MA Experiment ID: 108522 Result: Up-regulated in Transcription
  misc_feature: MA Experiment 108522 PARAMETER Experiment Name: Zm_42deg_Heat_P Parameter: Age (day) Value: 8
  misc_feature: MA Experiment 108522 PARAMETER Experiment Name: Zm_42deg_Heat_P Parameter: Organism Value: Zea mays
  misc_feature: MA Experiment 108522 PARAMETER Experiment Name: Zm_42deg_Heat_P Parameter: Plant Line Value: 35A19
  misc_feature: MA Experiment 108522 PARAMETER Experiment Name: Zm_42deg_Heat_P Parameter: Temperature (deg C) Value: 42 vs. 22
  misc_feature: MA Experiment 108522 PARAMETER Experiment Name: Zm_42deg_Heat_P Parameter: Timepoint (hr) Value: 1
  misc_feature: MA Experiment 108522 PARAMETER Experiment Name: Zm_42deg_Heat_P Parameter: Tissue Value: Aerial
  misc_feature: MA Experiment ID: 108523 Result: Up-regulated in Transcription
  misc_feature: MA Experiment 108523 PARAMETER Experiment Name: Zm_42deg_Heat_P Parameter: Age (day) Value: 8
  misc_feature: MA Experiment 108523 PARAMETER Experiment Name: Zm_42deg_Heat_P Parameter: Organism Value: Zea mays
  misc_feature: MA Experiment 108523 PARAMETER Experiment Name: Zm_42deg_Heat_P Parameter: Plant Line Value: 35A19
  misc_feature: MA Experiment 108523 PARAMETER Experiment Name: Zm_42deg_Heat_P Parameter: Temperature (deg C) Value: 42 vs. 22
  misc_feature: MA Experiment 108523 PARAMETER Experiment Name: Zm_42deg_Heat_P Parameter: Timepoint (hr) Value: 6
  misc_feature: MA Experiment 108523 PARAMETER Experiment Name: Zm_42deg_Heat_P Parameter: Tissue Value: Aerial
  misc_feature: MA Experiment ID: 108528 Result: Up-regulated in Transcription
  misc_feature: MA Experiment 108528 PARAMETER Experiment Name: Zm_Imbibed_Seeds_P Parameter: Age (day) Value: 5 vs. 2
  misc_feature: MA Experiment 108528 PARAMETER Experiment Name: Zm_Imbibed_Seeds_P Parameter: Organism Value: Zea mays
  misc_feature: MA Experiment 108528 PARAMETER Experiment Name: Zm_Imbibed_Seeds_P Parameter: Plant Line Value: 35A19
  misc_feature: MA Experiment 108528 PARAMETER Experiment Name: Zm_Imbibed_Seeds_P Parameter: Tissue Value: Aerial vs. Embryo
  misc_feature: MA Experiment ID: 108529 Result: Up-regulated in Transcription
  misc_feature: MA Experiment 108529 PARAMETER Experiment Name: Zm_Imbibed_Seeds_P Parameter: Age (day) Value: 5 vs. 2
  misc_feature: MA Experiment 108529 PARAMETER Experiment Name: Zm_Imbibed_Seeds_P Parameter: Organism Value: Zea mays
  misc_feature: MA Experiment 108529 PARAMETER Experiment Name: Zm_Imbibed_Seeds_P Parameter: Plant Line Value: 35A19
  misc_feature: MA Experiment 108529 PARAMETER Experiment Name: Zm_Imbibed_Seeds_P Parameter: Tissue Value: Roots vs. Embryo
  misc_feature: MA Experiment ID: 108530 Result: Up-regulated in Transcription
  misc_feature: MA Experiment 108530 PARAMETER Experiment Name: Zm_Imbibed_Seeds_P Parameter: Age (day) Value: 6 vs. 2
  misc_feature: MA Experiment 108530 PARAMETER Experiment Name: Zm_Imbibed_Seeds_P Parameter: Organism Value: Zea mays
  misc_feature: MA Experiment 108530 PARAMETER Experiment Name: Zm_Imbibed_Seeds_P Parameter: Plant Line Value: 35A19
  misc_feature: MA Experiment 108530 PARAMETER Experiment Name: Zm_Imbibed_Seeds_P Parameter: Tissue Value: Aerial vs. Embryo
  misc_feature: MA Experiment ID: 108536 Result: Up-regulated in Transcription
  misc_feature: MA Experiment 108536 PARAMETER Experiment Name: Zm_Meristem_P Parameter: Age (day) Value: 8
  misc_feature: MA Experiment 108536 PARAMETER Experiment Name: Zm_Meristem_P Parameter: Organism Value: Zea mays
  misc_feature: MA Experiment 108536 PARAMETER Experiment Name: Zm_Meristem_P Parameter: Plant Line Value: 35A19
  misc_feature: MA Experiment 108536 PARAMETER Experiment Name: Zm_Meristem_P Parameter: Tissue Value: Shoot Meristem vs. Above Shoot Meristem
  misc_feature: MA Experiment ID: 108543 Result: Down-regulated in Transcription
  misc_feature: MA Experiment ID: 108544 Result: Up-regulated in Transcription
  misc_feature: MA Experiment ID: 108547 Result: Up-regulated in Transcription
  misc_feature: MA Experiment 108547 PARAMETER Experiment Name: Zm_Imbibed_Seeds_P Parameter: Age (day) Value: 4 vs. 2
  misc_feature: MA Experiment 108547 PARAMETER Experiment Name: Zm_Imbibed_Seeds_P Parameter: Organism Value: Zea mays
  misc_feature: MA Experiment 108547 PARAMETER Experiment Name: Zm_Imbibed_Seeds_P Parameter: Plant Line Value: 35A19
  misc_feature: MA Experiment 108547 PARAMETER Experiment Name: Zm_Imbibed_Seeds_P Parameter: Tissue Value: Aerial vs. Embryo
  misc_feature: MA Experiment ID: 108688 Result: Down-regulated in Transcription
  misc_feature: MA Experiment 108688 PARAMETER Experiment Name: Zm_Embryos-Flowers__P Parameter: Tissue Value: Immature Flowers vs. Aerial+
atgtgtggttgtgttcttataacagatgagagtgtggttgctcttgccaacggatgtccgcacctgcgctcgctgggcctctacttctgccagaacatcacggaccgcgccatgtactccctcgcaaacagccgcgtgaagagcaagcgtgggaggtgggatgcagtgaaagacgggctcgcgaacctcaacatcagccagtgcaccgccctgacgcccccggcggtgcaggccgtctgcgactccttcccggcgctgcacacctgccccgagaggcactccctcatcatcagtggctgcctcagcctcacgtcagtccactgcgcctgcgccctccacccacaccgtgccgggagagccctgatggccaaccatgcgtactaataagcatgttgggtggctttgcgctgatagttctcgtgaatggggacgcatgcctgggggtgatggcgtcgtccaggtgtagaggaagctccctgtgtacataaactcgaaacttggcggtgtgataagacactgctgtggtaggactttgtgtgataatcatggagtggcgaatttctggagagtggcatgtactccagtgctacctggacattgaccagaaaaaaaatgtggtatctagtggccttctgtgt

SEQ ID NO: 10485 - protein, 144 aa, Zea mays subsp. mays
  peptide (1)..(144): Ceres Seq. ID no. 12400467
MSAPALAGPLLLPEHHGPRHVLPRKQPREEQAWEVGCSERRAREPQHQPVHRPDAPGGAGRLRLLPGAAHLPREALPHHQWLPQPHVSPLRLRPPPTPCRESPDGQPCVLISMLGGFALIVLVNGDACLGVMASSRCRGSSLCT

SEQ ID NO: 10486 - protein, 127 aa, Zea mays subsp. mays
  peptide (1)..(127): Ceres Seq. ID no. 12400468
  misc_feature (1)..(127): Homolog of NCBI NO: 34907434 NR Description: P0018C10.44 [Oryza sativa (japonica
  misc_feature (1)..(121): Homolog of NCBI NO: 18394987 NR Description: F-box protein family; protein id: At1g21410.1, by cDNA: 19486., supported by cDNA: gi_16604365, supported by gi_19699205 [Arabidopsis thaliana] >gi|25518370|pir||B86347
  misc_feature (1)..(121): Homolog of NCBI NO: 21554029 NR Description: F-box protein AtFBL5 [Arabidopsis thaliana]
  misc_feature (1)..(116): Homolog of NCBI NO: 18411319 NR Description: F-box protein family, AtFBL5; protein id: supported by cDNA: 3549. [Arabidopsis thaliana]
  misc_feature (1)..(116): Homolog of NCBI NO: 26450797 NR Description: unknown protein [Arabidopsis thaliana]
MCGCVLITDESVVALANGCPHLRSLGLYFCQNITDRAMYSLANSRVKSKRGRWDAVKDGLANLNISQCTALTPPAVQAVCDSFPALHTCPERHSLIISGCLSLTSVHCACALHPHRAGRALMANHAY

SEQ ID NO: 10487 - protein, 90 aa, Zea mays subsp. mays
  peptide (1)..(90): Ceres Seq. ID no. 12400469
  misc_feature (1)..(90): Homolog of NCBI NO: 34907434 NR Description: P0018C10.44 [Oryza sativa (japonica
  misc_feature (1)..(84): Homolog of NCBI NO: 18394987 NR Description: F-box protein family; protein id: At1g21410.1, by cDNA: 19486., supported by cDNA: gi_16604365, supported by gi_19699205 [Arabidopsis thaliana] >gi|25518370|pir||B86347
  misc_feature (1)..(84): Homolog of NCBI NO: 21554029 NR Description: F-box protein AtFBL5 [Arabidopsis thaliana]
  misc_feature (1)..(79): Homolog of NCBI NO: 18411319 NR Description: F-box protein family, AtFBL5; protein id: supported by cDNA: 3549. [Arabidopsis thaliana]
  misc_feature (1)..(79): Homolog of NCBI NO: 26450797 NR Description: unknown protein [Arabidopsis thaliana]
MYSLANSRVKSKRGRWDAVKDGLANLNISQCTALTPPAVQAVCDSFPALHTCPERHSLIISGCLSLTSVHCACALHPHRAGRALMANHAY

SEQ ID NO: 10488 - DNA, 764 bp, Zea mays subsp. mays
  misc_feature (1)..(764): Ceres Seq. ID no. 12380968
  misc_feature: MA Experiment ID: 108535 Result: Down-regulated in Transcription
  misc_feature: MA Experiment 108535 PARAMETER Experiment Name: Zm_Meristem_P Parameter: Age (day) Value: 8
  misc_feature: MA Experiment 108535 PARAMETER Experiment Name: Zm_Meristem_P Parameter: Organism Value: Zea mays
  misc_feature: MA Experiment 108535 PARAMETER Experiment Name: Zm_Meristem_P Parameter: Plant Line Value: 35A19
  misc_feature: MA Experiment 108535 PARAMETER Experiment Name: Zm_Meristem_P Parameter: Tissue Value: Root Meristem vs. Above Root Meristem
gcacgagaccattacctagaacatcctaatcgaaaactcttcttcgcattgcctttcccttcagttgcaccgacctccagacgaaaccacccaagacgcgtgcttccattcctagcccaacagaagcgaagcacgccaccgaccaccggcctcgaagggatcatcttctctacaactcgtcctcgtggccttgttcctcctcttgtataggggactgcggcggagtggagatccgtgccgacatagtccgacttcttcgctcgctgcctacgattgatggcctcaccttcaccaaccgaagagttcagcagggaagcagctcgtcagtctctgatcgcgatctccgagtccactccggagacaccttcaccgcagacggtgaggacaccgccgatctccagcgcagagaacgggaagccgggcgatggggcggacaagttcagatcgaagctgatgtccatcacagacctgtcttctgatgcccaacctgcgcagtgccctcccgaggatgtcgctgcttaatcaatcgtgtgattctctgctcgacttgcggacacgatgtatcagtgcttgccgatcctctgaactggacatttggctgtcgtgctttaaactggacgtccttatggcttatgttattactggtcgtttttatttgataaataaatattcaggggaacgggtggaaatatactgtacaagtttcctgacttgttgatgaggaaccggtttgtctgaacatgctgccatgcactcatgctcgg

SEQ ID NO: 10489 - protein, 81 aa, Zea mays subsp. mays
  peptide (1)..(81): Ceres Seq. ID no. 12380969
  misc_feature (1)..(81): Homolog of NCBI NO: 38346711 NR Description: OSJNBa0086O06.9 [Oryza sativa (japonica
MASPSPTEEFSREAARQSLIAISESTPETPSPQTVRTPPISSAENGKPGDGADKFRSKLMSITDLSSDAQPAQCPPEDVAA

SEQ ID NO: 10490 - protein, 79 aa, Zea mays subsp. mays
  peptide (1)..(79): Ceres Seq. ID no. 12380970
MPNLRSALPRMSLLNQSCDSLLDLRTRCISACRSSELDIWLSCFKLDVLMAYVITGRFYLINKYSGERVEIYCTSFLTC

SEQ ID NO: 10491 - protein, 69 aa, Zea mays subsp. mays
  peptide (1)..(69): Ceres Seq. ID no. 12380971
MSLLNQSCDSLLDLRTRCISACRSSELDIWLSCFKLDVLMAYVITGRFYLINKYSGERVEIYCTSFLTC

SEQ ID NO: 10492 - DNA, 718 bp, Zea mays subsp. mays
  misc_feature (1)..(718): Ceres Seq. ID no. 12390515
  misc_feature: MA Experiment ID: 108535 Result: Up-regulated in Transcription
  misc_feature: MA Experiment 108535 PARAMETER Experiment Name: Zm_Meristem_P Parameter: Age (day) Value: 8
  misc_feature: MA Experiment 108535 PARAMETER Experiment Name: Zm_Meristem_P Parameter: Organism Value: Zea mays
  misc_feature: MA Experiment 108535 PARAMETER Experiment Name: Zm_Meristem_P Parameter: Plant Line Value: 35A19
  misc_feature: MA Experiment 108535 PARAMETER Experiment Name: Zm_Meristem_P Parameter: Tissue Value: Root Meristem vs. Above Root Meristem
  misc_feature: MA Experiment ID: 108556 Result: Down-regulated in Transcription
  misc_feature: MA Experiment 108556 PARAMETER Experiment Name: Zm_Drought_P Parameter: Age (day) Value: 9
  misc_feature: MA Experiment 108556 PARAMETER Experiment Name: Zm_Drought_P Parameter: Organism Value: Zea mays
  misc_feature: MA Experiment 108556 PARAMETER Experiment Name: Zm_Drought_P Parameter: Plant Line Value: 35A19
  misc_feature: MA Experiment 108556 PARAMETER Experiment Name: Zm_Drought_P Parameter: Timepoint (hr) Value: 24
  misc_feature: MA Experiment 108556 PARAMETER Experiment Name: Zm_Drought_P Parameter: Tissue Value: Aerial
  misc_feature: MA Experiment 108556 PARAMETER Experiment Name: Zm_Drought_P Parameter: Treatment Value: Drought vs. No Drought
  misc_feature: MA Experiment ID: 20000488 Result: Up-regulated in Transcription
  misc_feature: MA Experiment 20000488 PARAMETER Experiment Name: Zm_50mM_NH4NO3_L_to_H_P Parameter: Organism Value: Zea mays
  misc_feature: MA Experiment 20000488 PARAMETER Experiment Name: Zm_50mM_NH4NO3_L_to_H_P Parameter: Timepoint (hr) Value: 8
  misc_feature: MA Experiment 20000488 PARAMETER Experiment Name: Zm_50mM_NH4NO3_L_to_H_P Parameter: Tissue Value: Leaves
  misc_feature: MA Experiment 20000488 PARAMETER Experiment Name: Zm_50mM_NH4NO3_L_to_H_P Parameter: Treatment Value: 50mM NH4NO3 vs. 100mM Mannitol
cgcccccgcatcgtcgccaaagatgcagatctttgtgaagactctgacggggaagaccatcactttaggaggtggagtcctcggacaccatcgacaatgtgaaggccaagatccaggacaaggagggaatccccccggaccagcagcggctcatcttcgccggcaagcagctcgaggacggtcgcaccctcgccgactacaacatccagaaggagtccaccctccacctggtgctccgcctccgaggtggcgccaagaagcgcaagaagaagacgtacaccaagcccaagaagatcaagcacaagcacaagaaggtaaagctcgcagtgctgcagttctacaaggtggacgacgccaccggcaaggtgacccgcctccgcaaggagtgccccaacaccgagtgcggtgcgggtgtnttcatggccaaccacttcgaccgccactactgcggcaagtgcggcctcacctacgtctacaatcagaaggcgtaatcccatgcgccgctttgcttcacccgcctacctatcacgcattcacctgttggttactcgatttgaatatcatttagatcggtttgaggttggaacataaatgcagcagtagtttctgtcttattatattggtacctctgttactgagttgatgtggtcctggctcctgagcttaattttgttttcgtgttctatccttagagacgattgtaccttttggccgtttc

SEQ ID NO: 10493 - protein, 188 aa, Zea mays subsp. mays
  peptide (1)..(188): Ceres Seq. ID no. 12390516
  misc_feature (7)..(22): Homolog of NCBI NO: 1076678 NR Description: ubiquitin / ribosomal protein S27a - potato
  misc_feature (4)..(22): Homolog of NCBI NO: 28189917 NR Description: similar to polyubiquitin [Bos taurus]
  misc_feature (7)..(22): Homolog of NCBI NO: 323230 NR Description: polyprotein
  misc_feature (7)..(22): Homolog of NCBI NO: 2149467 NR Description: predicted to encode 4983 amino acids with a
  misc_feature (139)..(139): Xaa is any aa, unknown or other
APASSPKMQIFVKTLTGKTITLGGGVLGHHRQCEGQDPGQGGNPPGPAAAHLRRQAARGRSHPRRLQHPEGVHPPPGAPPPRWRQEAQEEDVHQAQEDQAQAQEGKARSAAVLQGGRRHRQGDPPPQGVPQHRVRCGCXHGQPLRPPLLRQVRPHLRLQSEGVIPCAALLHPPTYHAFTCWLLDLNII

SEQ ID NO: 10494 - protein, 181 aa, Zea mays subsp. mays
  peptide (1)..(181): Ceres Seq. ID no. 12390517
  misc_feature (1)..(15): Homolog of NCBI NO: 1076678 NR Description: ubiquitin / ribosomal protein S27a - potato
  misc_feature (1)..(15): Homolog of NCBI NO: 28189917 NR Description: similar to polyubiquitin [Bos taurus]
  misc_feature (1)..(15): Homolog of NCBI NO: 323230 NR Description: polyprotein
  misc_feature (1)..(15): Homolog of NCBI NO: 2149467 NR Description: predicted to encode 4983 amino acids with a
  misc_feature (132)..(132): Xaa is any aa, unknown or other
MQIFVKTLTGKTITLGGGVLGHHRQCEGQDPGQGGNPPGPAAAHLRRQAARGRSHPRRLQHPEGVHPPPGAPPPRWRQEAQEEDVHQAQEDQAQAQEGKARSAAVLQGGRRHRQGDPPPQGVPQHRVRCGCXHGQPLRPPLLRQVRPHLRLQSEGVIPCAALLHPPTYHAFTCWLLDLNII

SEQ ID NO: 10495 - DNA, 1181 bp, Zea mays subsp. mays; identical to SEQ ID NO: 10300
  misc_feature (1)..(1181): Ceres Seq. ID no. 12364890
  misc_feature: MA Experiment ID: 108527 Result: Down-regulated in Transcription
  misc_feature: MA Experiment 108527 PARAMETER Experiment Name: Zm_5mM_NO_P Parameter: Age (day) Value: 8
  misc_feature: MA Experiment 108527 PARAMETER Experiment Name: Zm_5mM_NO_P Parameter: Organism Value: Zea mays
  misc_feature: MA Experiment 108527 PARAMETER Experiment Name: Zm_5mM_NO_P Parameter: Plant Line Value: 35A19
  misc_feature: MA Experiment 108527 PARAMETER Experiment Name: Zm_5mM_NO_P Parameter: Timepoint (hr) Value: 6
  misc_feature: MA Experiment 108527 PARAMETER Experiment Name: Zm_5mM_NO_P Parameter: Tissue Value: Aerial
  misc_feature: MA Experiment 108527 PARAMETER Experiment Name: Zm_5mM_NO_P Parameter: Treatment Value: 5mM NO vs. No Treatment

SEQ ID NO: 10496 - protein, 161 aa, Zea mays subsp. mays; identical to SEQ ID NO: 10301
  peptide (1)..(161): Ceres Seq. ID no. 12364891
  misc_feature (92)..(92): Xaa is any aa, unknown or other
  misc_feature (115)..(115): Xaa is any aa, unknown or other
  misc_feature (116)..(116): Xaa is any aa, unknown or other
  misc_feature (118)..(118): Xaa is any aa, unknown or other

SEQ ID NO: 10497 - protein, 147 aa, Zea mays subsp. mays; identical to SEQ ID NO: 10302
  peptide (1)..(147): Ceres Seq. ID no. 12364892
  misc_feature (78)..(78): Xaa is any aa, unknown or other
  misc_feature (101)..(101): Xaa is any aa, unknown or other
  misc_feature (102)..(102): Xaa is any aa, unknown or other
  misc_feature (104)..(104): Xaa is any aa, unknown or other

SEQ ID NO: 10498 - protein, 99 aa, Zea mays subsp. mays; identical to SEQ ID NO: 10303
  peptide (1)..(99): Ceres Seq. ID no. 12364893
  misc_feature (55)..(99): Homolog of NCBI NO: 29247944 NR Description: GLP_26_54603_52153 [Giardia lamblia ATCC 50803]
  misc_feature (49)..(99): Homolog of NCBI NO: 29829093 NR Description: putative translation initiation factor IF-2
  misc_feature (47)..(99): Homolog of NCBI NO: 29247944 NR Description: GLP_26_54603_52153 [Giardia lamblia ATCC 50803]
  misc_feature (52)..(99): Homolog of NCBI NO: 23106243 NR Description: hypothetical protein [Azotobacter vinelandii]
  misc_feature (43)..(99): Homolog of NCBI NO: 22960029 NR Description: hypothetical protein [Rhodobacter sphaeroides]
  misc_feature (31)..(99): Homolog of NCBI NO: 6690017 NR Description: NTR [Herpesvirus papio]
  misc_feature (49)..(99): Homolog of NCBI NO: 22957039 NR Description: hypothetical protein [Rhodobacter sphaeroides]
  misc_feature (47)..(99): Homolog of NCBI NO: 13559031 NR Description: bA11M20.1 (TATA box binding protein
  misc_feature (56)..(99): Homolog of NCBI NO: 2498095 NR Description: 5E5 ANTIGEN >gi|1085558|pir||JC4163 DNA-binding
  misc_feature (31)..(67): Homolog of NCBI NO: 93144 NR Description: hypothetical protein - suid herpesvirus 1 (strain
  misc_feature (55)..(99): Homolog of NCBI NO: 29247944 NR Description: GLP_26_54603_52153 [Giardia lamblia ATCC 50803]
  misc_feature (49)..(99): Homolog of NCBI NO: 29829093 NR Description: putative translation initiation factor IF-2
  misc_feature (47)..(99): Homolog of NCBI NO: 29247944 NR Description: GLP_26_54603_52153 [Giardia lamblia ATCC 50803]
  misc_feature (52)..(99): Homolog of NCBI NO: 23106243 NR Description: hypothetical protein [Azotobacter vinelandii]
  misc_feature (43)..(99): Homolog of NCBI NO: 22960029 NR Description: hypothetical protein [Rhodobacter sphaeroides]
  misc_feature (31)..(99): Homolog of NCBI NO: 6690017 NR Description: NTR [Herpesvirus papio]
  misc_feature (49)..(99): Homolog of NCBI NO: 22957039 NR Description: hypothetical protein [Rhodobacter sphaeroides]
  misc_feature (47)..(99): Homolog of NCBI NO: 13559031 NR Description: bA11M20.1 (TATA box binding protein
  misc_feature (56)..(99): Homolog of NCBI NO: 2498095 NR Description: 5E5 ANTIGEN >gi|1085558|pir||JC4163 DNA-binding
  misc_feature (31)..(67): Homolog of NCBI NO: 93144 NR Description: hypothetical protein - suid herpesvirus 1 (strain

SEQ ID NO: 10499 - DNA, 1166 bp, Zea mays subsp. mays
  misc_feature (1)..(1166): Ceres Seq. ID no. 12400815
  misc_feature: MA Experiment ID: 108689 Result: Up-regulated in Transcription
  misc_feature: MA Experiment 108689 PARAMETER Experiment Name: Zm_Drought_Roots_P Parameter: Age (day) Value: 9
  misc_feature: MA Experiment 108689 PARAMETER Experiment Name: Zm_Drought_Roots_P Parameter: Organism Value: Zea mays
  misc_feature: MA Experiment 108689 PARAMETER Experiment Name: Zm_Drought_Roots_P Parameter: Plant Line Value: 35A19
  misc_feature: MA Experiment 108689 PARAMETER Experiment Name: Zm_Drought_Roots_P Parameter: Timepoint (hr) Value: 24
  misc_feature: MA Experiment 108689 PARAMETER Experiment Name: Zm_Drought_Roots_P Parameter: Tissue Value: Roots
  misc_feature: MA Experiment 108689 PARAMETER Experiment Name: Zm_Drought_Roots_P Parameter: Treatment Value: Drought vs. No Drought
  misc_feature: MA Experiment ID: 20000478 Result: Up-regulated in Transcription
  misc_feature: MA Experiment 20000478 PARAMETER Experiment Name: Zm_5mM_SA_P Parameter: Age (day) Value: 11
  misc_feature: MA Experiment 20000478 PARAMETER Experiment Name: Zm_5mM_SA_P Parameter: Organism Value: Zea mays
  misc_feature: MA Experiment 20000478 PARAMETER Experiment Name: Zm_5mM_SA_P Parameter: Plant Line Value: 35A19
  misc_feature: MA Experiment 20000478 PARAMETER Experiment Name: Zm_5mM_SA_P Parameter: Timepoint (hr) Value: 72
  misc_feature: MA Experiment 20000478 PARAMETER Experiment Name: Zm_5mM_SA_P Parameter: Tissue Value: Aerial
  misc_feature: MA Experiment 20000478 PARAMETER Experiment Name: Zm_5mM_SA_P Parameter: Treatment Value: 5mM SA vs. No Treatment
  misc_feature: MA Experiment ID: 20000487 Result: Up-regulated in Transcription
  misc_feature: MA Experiment 20000487 PARAMETER Experiment Name: Zm_50mM_NH4NO3_L_to_H_P Parameter: Organism Value: Zea mays
  misc_feature: MA Experiment 20000487 PARAMETER Experiment Name: Zm_50mM_NH4NO3_L_to_H_P Parameter: Timepoint (hr) Value: 4
  misc_feature: MA Experiment 20000487 PARAMETER Experiment Name: Zm_50mM_NH4NO3_L_to_H_P Parameter: Tissue Value: Leaves
  misc_feature: MA Experiment 20000487 PARAMETER Experiment Name: Zm_50mM_NH4NO3_L_to_H_P Parameter: Treatment Value: 50mM NH4NO3 vs. 100mM Mannitol
aacgccgccgccgccatggccactgccggagccttccacgccggcggcttcctcctcctcccggtccgacgaagtctccgcgggcccagcccctcaccatggtcccacttccgcacccacttcatctcctccaagccgccgccctccacccctctcccgccgcccgtgccgccagctcgcctgtcccccgtgggttctgccttcgggcctcctagcagaaagaccggcgcggttggagccggggctggcgcgggtgtcgtcgggtggtaccttggcctcttggacgcgcggcccgtgctgaccaagagcgtcaccgccgctgtcatcttcaccgccgcggacgtctcctcccagatgctcacacttggtcctgaggattcacttgattttcttaggaccatgcgtatggctagttatgggtttctgatctcaggacctagcctccatctttggttcaattttatctcaaaattgttccccaaaaaagatgtagtgaacacattgaagaagatgtttatagggcaagcagtctatggaccaattattaactcagttttcttctcatacaatgcaggattacaaggcgagactgttgctgagattattgcaagattgaagagggatctagttcccaccatcaaaagcgggcttttatactggccaacttgtgatttcattactttcaagtttgttccagttcatttacagccgctagtgagcaattcattctcatttctgtggaccatctacataacatatatggccagcttaaagaaagcagatgtggaggtggccccgagtacctaggtgttgtcgagtgactcaacatggctgttatctgtcgattcttcgtacaaggcagacttcatgtatgcctcctggatcgcggatgttatcgaccggcgattttaggctttagagagatggattgcttacgatgcatccttcacttttggttagggcatagtgtccacagggattctacttgcttatgtttttggctgaagaccattttgtttggatgatcgaattatactaggttcattgggtgggtcttctacgacgtctttcttacggtcttttgatcctatggctaagaagtacatttacttcaactaaattttctgtatctagttatggagatgcaagtgaacctgttctttgcc

SEQ ID NO: 10500 - protein, 268 aa, Zea mays subsp. mays
  peptide (1)..(268): Ceres Seq. ID no. 12400816
  misc_feature (193)..(256): Pfam Name: Mpv17 / PMP22 family Pfam Description: Mpv17 / PMP22 family
  misc_feature (84)..(256): Homolog of NCBI NO: 18418319 NR Description: Expressed protein; protein id: At4g33905.1, by cDNA: gi_13358221 [Arabidopsis thaliana]
  misc_feature (89)..(261): Homolog of NCBI NO: 18422298 NR Description: putative protein; protein id: At5g43140.1,
  misc_feature (89)..(261): Homolog of NCBI NO: 21553640 NR Description: contains similarity to 22 kDa peroxisomal
  misc_feature (71)..(259): Homolog of NCBI NO: 15226016 NR Description: 22 kDa peroxisomal membrane protein; protein id: [Arabidopsis thaliana] >gi|25411581|pir||C84522 22 kDa
  misc_feature (84)..(238): Homolog of NCBI NO: 7485624 NR Description: hypothetical protein F17I5.90 - Arabidopsis >gi|3297814|emb|CAA19872.1| putative protein [Arabidopsis >gi|7270339|emb|CAB80107.1| putative protein [Arabidopsis
  misc_feature (89)..(236): Homolog of NCBI NO: 9757841 NR Description: contains similarity to 22 kDa peroxisomal
  misc_feature (76)..(255): Homolog of NCBI NO: 21594286 NR Description: unknown [Arabidopsis thaliana]
  misc_feature (76)..(255): Homolog of NCBI NO: 15241166 NR Description: putative protein; protein id: At5g19750.1, by cDNA: 6789., supported by cDNA: gi_16648745 [Arabidopsis
  misc_feature (76)..(255): Homolog of NCBI NO: 16648746 NR Description: AT5g19750/T29J13_170 [Arabidopsis thaliana]
  misc_feature (90)..(268): Homolog of NCBI NO: 30695366 NR Description: expressed protein [Arabidopsis thaliana]
NAAAAMATAGAFHAGGFLLLPVRRSLRGPSPSPWSHFRTHFISSKPPPSTPLPPPVPPARLSPVGSAFGPPSRKTGAVGAGAGAGVVGWYLGLLDARPVLTKSVTAAVIFTAADVSSQMLTLGPEDSLDFLRTMRMASYGFLISGPSLHLWFNFISKLFPKKDVVNTLKKMFIGQAVYGPIINSVFFSYNAGLQGETVAEIIARLKRDLVPTIKSGLLYWPTCDFITFKFVPVHLQPLVSNSFSFLWTIYITYMASLKKADVEVAPST

SEQ ID NO: 10501 - protein, 263 aa, Zea mays subsp. mays
  peptide (1)..(263): Ceres Seq. ID no. 12400817
  misc_feature (188)..(251): Pfam Name: Mpv17 / PMP22 family Pfam Description: Mpv17 / PMP22 family
  misc_feature (79)..(251): Homolog of NCBI NO: 18418319 NR Description: Expressed protein; protein id: At4g33905.1, by cDNA: gi_13358221 [Arabidopsis thaliana]
  misc_feature (84)..(256): Homolog of NCBI NO: 18422298 NR Description: putative protein; protein id: At5g43140.1,
  misc_feature (84)..(256): Homolog of NCBI NO: 21553640 NR Description: contains similarity to 22 kDa peroxisomal
  misc_feature (66)..(254): Homolog of NCBI NO: 15226016 NR Description: 22 kDa peroxisomal membrane protein; protein id: [Arabidopsis thaliana] >gi|25411581|pir||C84522 22 kDa
  misc_feature (79)..(233): Homolog of NCBI NO: 7485624 NR Description: hypothetical protein F17I5.90 - Arabidopsis >gi|3297814|emb|CAA19872.1| putative protein [Arabidopsis >gi|7270339|emb|CAB80107.1| putative protein [Arabidopsis
  misc_feature (84)..(231): Homolog of NCBI NO: 9757841 NR Description: contains similarity to 22 kDa peroxisomal
  misc_feature (71)..(250): Homolog of NCBI NO: 21594286 NR Description: unknown [Arabidopsis thaliana]
  misc_feature (71)..(250): Homolog of NCBI NO: 15241166 NR Description: putative protein; protein id: At5g19750.1, by cDNA: 6789., supported by cDNA: gi_16648745 [Arabidopsis
  misc_feature (71)..(250): Homolog of NCBI NO: 16648746 NR Description: AT5g19750/T29J13_170 [Arabidopsis thaliana]
  misc_feature (85)..(263): Homolog of NCBI NO: 30695366 NR Description: expressed protein [Arabidopsis thaliana]
MATAGAFHAGGFLLLPVRRSLRGPSPSPWSHFRTHFISSKPPPSTPLPPPVPPARLSPVGSAFGPPSRKTGAVGAGAGAGVVGWYLGLLDARPVLTKSVTAAVIFTAADVSSQMLTLGPEDSLDFLRTMRMASYGFLISGPSLHLWFNFISKLFPKKDVVNTLKKMFIGQAVYGPIINSVFFSYNAGLQGETVAEIIARLKRDLVPTIKSGLLYWPTCDFITFKFVPVHLQPLVSNSFSFLWTIYITYMASLKKADVEVAPST

SEQ ID NO: 10502 - protein, 150 aa, Zea mays subsp. mays
  peptide (1)..(150): Ceres Seq. ID no. 12400818
  misc_feature (75)..(138): Pfam Name: Mpv17 / PMP22 family Pfam Description: Mpv17 / PMP22 family
  misc_feature (1)..(138): Homolog of NCBI NO: 18418319 NR Description: Expressed protein; protein id: At4g33905.1, by cDNA: gi_13358221 [Arabidopsis thaliana]
  misc_feature (1)..(143): Homolog of NCBI NO: 18422298 NR Description: putative protein; protein id: At5g43140.1,
  misc_feature (1)..(143): Homolog of NCBI NO: 21553640 NR Description: contains similarity to 22 kDa peroxisomal
  misc_feature (1)..(141): Homolog of NCBI NO: 15226016 NR Description: 22 kDa peroxisomal membrane protein; protein id: [Arabidopsis thaliana] >gi|25411581|pir||C84522 22 kDa
  misc_feature (1)..(120): Homolog of NCBI NO: 7485624 NR Description: hypothetical protein F17I5.90 - Arabidopsis >gi|3297814|emb|CAA19872.1| putative protein [Arabidopsis >gi|7270339|emb|CAB80107.1| putative protein [Arabidopsis
  misc_feature (1)..(118): Homolog of NCBI NO: 9757841 NR Description: contains similarity to 22 kDa peroxisomal
  misc_feature (1)..(137): Homolog of NCBI NO: 21594286 NR Description: unknown [Arabidopsis thaliana]
  misc_feature (1)..(137): Homolog of NCBI NO: 15241166 NR Description: putative protein; protein id: At5g19750.1, by cDNA: 6789., supported by cDNA: gi_16648745 [Arabidopsis
  misc_feature (1)..(137): Homolog of NCBI NO: 16648746 NR Description: AT5g19750/T29J13_170 [Arabidopsis thaliana]
  misc_feature (1)..(150): Homolog of NCBI NO: 30695366 NR Description: expressed protein [Arabidopsis thaliana]
MLTLGPEDSLDFLRTMRMASYGFLISGPSLHLWFNFISKLFPKKDVVNTLKKMFIGQAVYGPIINSVFFSYNAGLQGETVAEIIARLKRDLVPTIKSGLLYWPTCDFITFKFVPVHLQPLVSNSFSFLWTIYITYMASLKKADVEVAPST

SEQ ID NO: 10503 - DNA, 599 bp, Zea mays subsp. mays
  misc_feature (1)..(599): Ceres Seq. ID no. 12400807
  misc_feature: MA Experiment ID: 108515 Result: Down-regulated in Transcription
  misc_feature: MA Experiment 108515 PARAMETER Experiment Name: Zm_2mM_SA_P Parameter: Age (day) Value: 8
  misc_feature: MA Experiment 108515 PARAMETER Experiment Name: Zm_2mM_SA_P Parameter: Organism Value: Zea mays
  misc_feature: MA Experiment 108515 PARAMETER Experiment Name: Zm_2mM_SA_P Parameter: Plant Line Value: 35A19
  misc_feature: MA Experiment 108515 PARAMETER Experiment Name: Zm_2mM_SA_P Parameter: Timepoint (hr) Value: 12
  misc_feature: MA Experiment 108515 PARAMETER Experiment Name: Zm_2mM_SA_P Parameter: Tissue Value: Aerial
  misc_feature: MA Experiment 108515 PARAMETER Experiment Name: Zm_2mM_SA_P Parameter: Treatment Value: 2mM SA vs. No Treatment
  misc_feature: MA Experiment ID: 108535 Result: Up-regulated in Transcription
  misc_feature: MA Experiment 108535 PARAMETER Experiment Name: Zm_Meristem_P Parameter: Age (day) Value: 8
  misc_feature: MA Experiment 108535 PARAMETER Experiment Name: Zm_Meristem_P Parameter: Organism Value: Zea mays
  misc_feature: MA Experiment 108535 PARAMETER Experiment Name: Zm_Meristem_P Parameter: Plant Line Value: 35A19
  misc_feature: MA Experiment 108535 PARAMETER Experiment Name: Zm_Meristem_P Parameter: Tissue Value: Root Meristem vs. Above Root Meristem
  misc_feature: MA Experiment ID: 108543 Result: Up-regulated in Transcription
  misc_feature: MA Experiment ID: 108556 Result: Down-regulated in Transcription
  misc_feature: MA Experiment 108556 PARAMETER Experiment Name: Zm_Drought_P Parameter: Age (day) Value: 9
  misc_feature: MA Experiment 108556 PARAMETER Experiment Name: Zm_Drought_P Parameter: Organism Value: Zea mays
  misc_feature: MA Experiment 108556 PARAMETER Experiment Name: Zm_Drought_P Parameter: Plant Line Value: 35A19
  misc_feature: MA Experiment 108556 PARAMETER Experiment Name: Zm_Drought_P Parameter: Timepoint (hr) Value: 24
  misc_feature: MA Experiment 108556 PARAMETER Experiment Name: Zm_Drought_P Parameter: Tissue Value: Aerial
  misc_feature: MA Experiment 108556 PARAMETER Experiment Name: Zm_Drought_P Parameter: Treatment Value: Drought vs. No Drought
  misc_feature: MA Experiment ID: 108597 Result: Down-regulated in Transcription
  misc_feature: MA Experiment 108597 PARAMETER Experiment Name: Zm_100uM_ABA_P Parameter: Age (day) Value: 9
  misc_feature: MA Experiment 108597 PARAMETER Experiment Name: Zm_100uM_ABA_P Parameter: Organism Value: Zea mays
  misc_feature: MA Experiment 108597 PARAMETER Experiment Name: Zm_100uM_ABA_P Parameter: Plant Line Value: 35A19
  misc_feature: MA Experiment 108597 PARAMETER Experiment Name: Zm_100uM_ABA_P Parameter: Timepoint (hr) Value: 24
  misc_feature: MA Experiment 108597 PARAMETER Experiment Name: Zm_100uM_ABA_P Parameter: Tissue Value: Aerial
  misc_feature: MA Experiment 108597 PARAMETER Experiment Name: Zm_100uM_ABA_P Parameter: Treatment Value: 100uM ABA vs. No Treatment
  misc_feature: MA Experiment ID: 108687 Result: Down-regulated in Transcription
  misc_feature: MA Experiment 108687 PARAMETER Experiment Name: Zm_Embryos-Flowers__P Parameter: Tissue Value: Embryo vs. Aerial+
  misc_feature: MA Experiment ID: 20000477 Result: Down-regulated in Transcription
  misc_feature: MA Experiment 20000477 PARAMETER Experiment Name: Zm_5mM_SA_P Parameter: Age (day) Value: 10
  misc_feature: MA Experiment 20000477 PARAMETER Experiment Name: Zm_5mM_SA_P Parameter: Organism Value: Zea mays
  misc_feature: MA Experiment 20000477 PARAMETER Experiment Name: Zm_5mM_SA_P Parameter: Plant Line Value: 35A19
  misc_feature: MA Experiment 20000477 PARAMETER Experiment Name: Zm_5mM_SA_P Parameter: Timepoint (hr) Value: 48
  misc_feature: MA Experiment 20000477 PARAMETER Experiment Name: Zm_5mM_SA_P Parameter: Tissue Value: Aerial
  misc_feature: MA Experiment 20000477 PARAMETER Experiment Name: Zm_5mM_SA_P Parameter: Treatment Value: 5mM SA vs. No Treatment
  misc_feature: MA Experiment ID: 20000478 Result: Down-regulated in Transcription
  misc_feature: MA Experiment 20000478 PARAMETER Experiment Name: Zm_5mM_SA_P Parameter: Age (day) Value: 11
  misc_feature: MA Experiment 20000478 PARAMETER Experiment Name: Zm_5mM_SA_P Parameter: Organism Value: Zea mays
  misc_feature: MA Experiment 20000478 PARAMETER Experiment Name: Zm_5mM_SA_P Parameter: Plant Line Value: 35A19
  misc_feature: MA Experiment 20000478 PARAMETER Experiment Name: Zm_5mM_SA_P Parameter: Timepoint (hr) Value: 72
  misc_feature: MA Experiment 20000478 PARAMETER Experiment Name: Zm_5mM_SA_P Parameter: Tissue Value: Aerial
  misc_feature: MA Experiment 20000478 PARAMETER Experiment Name: Zm_5mM_SA_P Parameter: Treatment Value: 5mM SA vs. No Treatment
  misc_feature: MA Experiment ID: 20000479 Result: Down-regulated in Transcription
  misc_feature: MA Experiment 20000479 PARAMETER Experiment Name: Zm_Drought_P Parameter: Age (day) Value: 10
  misc_feature: MA Experiment 20000479 PARAMETER Experiment Name: Zm_Drought_P Parameter: Organism Value: Zea mays
  misc_feature: MA Experiment 20000479 PARAMETER Experiment Name: Zm_Drought_P Parameter: Plant Line Value: 35A19
  misc_feature: MA Experiment 20000479 PARAMETER Experiment Name: Zm_Drought_P Parameter: Timepoint (hr) Value: 48
  misc_feature: MA Experiment 20000479 PARAMETER Experiment Name: Zm_Drought_P Parameter: Tissue Value: Aerial
  misc_feature: MA Experiment 20000479 PARAMETER Experiment Name: Zm_Drought_P Parameter: Treatment Value: Drought vs. No Drought
  misc_feature: MA Experiment ID: 20000480 Result: Down-regulated in Transcription
  misc_feature: MA Experiment 20000480 PARAMETER Experiment Name: Zm_Drought_P Parameter: Age (day) Value: 11
  misc_feature: MA Experiment 20000480 PARAMETER Experiment Name: Zm_Drought_P Parameter: Organism Value: Zea mays
  misc_feature: MA Experiment 20000480 PARAMETER Experiment Name: Zm_Drought_P Parameter: Plant Line Value: 35A19
  misc_feature: MA Experiment 20000480 PARAMETER Experiment Name: Zm_Drought_P Parameter: Timepoint (hr) Value: 72
  misc_feature: MA Experiment 20000480 PARAMETER Experiment Name: Zm_Drought_P Parameter: Tissue Value: Aerial
  misc_feature: MA Experiment 20000480 PARAMETER Experiment Name: Zm_Drought_P Parameter: Treatment Value: Drought vs. No Drought
  misc_feature: MA Experiment ID: 20000632 Result: Down-regulated in Transcription
  misc_feature: MA Experiment 20000632 PARAMETER Experiment Name: Zm_Herbicide-Treatments_P Parameter: Timepoint (hr) Value: 4
  misc_feature: MA Experiment 20000632 PARAMETER Experiment Name: Zm_Herbicide-Treatments_P Parameter: Tissue Value: Aerial
  misc_feature: MA Experiment 20000632 PARAMETER Experiment Name: Zm_Herbicide-Treatments_P Parameter: Treatment Value: Glean vs. No Treatment
cgaaaaatcttctcccccagctccccagcaccagtccccaattatttggcctccgtcagagaggggagaaagacccgttcgaggcggcggcgatgtcggggcgcggcaacggcggcaagggtctgggcaagggtggagccaagcgccaccggaaggtgctccgcgacaacatccagggcatcaccaagccggcgatccggaggctggctcggaggggcggcgtgaagcgcatctcggggctcatctacgaggagacccgcggcgtgctcaagatcttcctcgagaacgtcatccgcgacgccgtcacctacaccgagcacgcgcgccgcaagaccgtcaccgccatggatgtcgtctacgcgctcaagcgccagggccgcaccctctacggcttcggaggctaggcgcctcttcgtagctggggaatgcttagggtgatacgtctctgtcgctgtgggtcgtagtgttgctgcgttcctggatgtaatccattttttttttctgcaatgaagagatgctggcaagcatactacctgcatatgttgcgcctgggtgattgttctccttagaaatggtagtaacagtgaatcttgttcacg

SEQ ID NO: 10504 - protein, 138 aa, Zea mays subsp. mays
  peptide (1)..(138): Ceres Seq. ID no. 12400808
EKSSPPAPQHQSPIIWPPSERGERPVRGGGDVGARQRRQGSGQGWSQAPPEGAPRQHPGHHQAGDPEAGSEGRREAHLGAHLRGDPRRAQDLPRERHPRRRHLHRARAPQDRHRHGCRLRAQAPGPHPLRLRRLGASS

SEQ ID NO: 10505 - protein, 133 aa, Zea mays subsp. mays
  peptide (1)..(133): Ceres Seq. ID no. 12400809
  misc_feature (31)..(133): Homolog of NCBI NO: 15226944 NR Description: histone H4; protein id: At2g28740.1, supported by
  misc_feature (31)..(133): Homolog of NCBI NO: 462243 NR Description: Histone H4 >gi|421921|pir||S32769 histone H4 - >gi|297150|emb|CAA48923.1| histone H4 [Lycopersicon esculentum] histone H4 [Lycopersicon esculentum] >gi|2746721|gb|AAB94924.1|
  misc_feature (31)..(133): Homolog of NCBI NO: 1806283 NR Description: Histone H4 homologue [Sesbania rostrata]
  misc_feature (31)..(133): Homolog of NCBI NO: 4504301 NR Description: H4 histone family, member A [Homo sapiens] H4 histone family, member B [Homo sapiens] H4 histone family, member C [Homo sapiens]
  misc_feature (31)..(133): Homolog of NCBI NO: 27692935 NR Description: Similar to germinal histone H4 gene [Mus musculus]
  misc_feature (31)..(133): Homolog of NCBI NO: 27692960 NR Description: Similar to germinal histone H4 gene [Mus musculus]
  misc_feature (31)..(133): Homolog of NCBI NO: 34858262 NR Description: similar to germinal histone H4 gene [Rattus
  misc_feature (31)..(133): Homolog of NCBI NO: 34876368 NR Description: similar to germinal histone H4 gene [Rattus
  misc_feature (31)..(133): Homolog of NCBI NO: 37590121 NR Description: Hist1h4h protein [Mus musculus]
  misc_feature (31)..(133): Homolog of NCBI NO: 462242 NR Description: Histone H4 >gi|166311|gb|AAC37355.1| histone H4 formosa] >gi|455652|gb|AAB28739.1| histone H4; H4 [Acropora
KNLLPQLPSTSPQLFGLRQRGEKDPFEAAAMSGRGNGGKGLGKGGAKRHRKVLRDNIQGITKPAIRRLARRGGVKRISGLIYEETRGVLKIFLENVIRDAVTYTEHARRKTVTAMDVVYALKRQGRTLYGFGG

SEQ ID NO: 10506 - protein, 103 aa, Zea mays subsp. mays
  peptide (1)..(103): Ceres Seq. ID no. 12400810
  misc_feature (1)..(103): Homolog of NCBI NO: 15226944 NR Description: histone H4; protein id: At2g28740.1, supported by
  misc_feature (1)..(103): Homolog of NCBI NO: 462243 NR Description: Histone H4 >gi|421921|pir||S32769 histone H4 - >gi|297150|emb|CAA48923.1| histone H4 [Lycopersicon esculentum] histone H4 [Lycopersicon esculentum] >gi|2746721|gb|AAB94924.1|
  misc_feature (1)..(103): Homolog of NCBI NO: 1806283 NR Description: Histone H4 homologue [Sesbania rostrata]
  misc_feature (1)..(103): Homolog of NCBI NO: 4504301 NR Description: H4 histone family, member A [Homo sapiens] H4 histone family, member B [Homo sapiens] H4 histone family, member C [Homo sapiens]
  misc_feature (1)..(103): Homolog of NCBI NO: 27692935 NR Description: Similar to germinal histone H4 gene [Mus musculus]
  misc_feature (1)..(103): Homolog of NCBI NO: 27692960 NR Description: Similar to germinal histone H4 gene [Mus musculus]
  misc_feature (1)..(103): Homolog of NCBI NO: 34858262 NR Description: similar to germinal histone H4 gene [Rattus
  misc_feature (1)..(103): Homolog of NCBI NO: 34876368 NR Description: similar to germinal histone H4 gene [Rattus
  misc_feature (1)..(103): Homolog of NCBI NO: 37590121 NR Description: Hist1h4h protein [Mus musculus]
  misc_feature (1)..(103): Homolog of NCBI NO: 462242 NR Description: Histone H4 >gi|166311|gb|AAC37355.1| histone H4 formosa] >gi|455652|gb|AAB28739.1| histone H4; H4 [Acropora
MSGRGNGGKGLGKGGAKRHRKVLRDNIQGITKPAIRRLARRGGVKRISGLIYEETRGVLKIFLENVIRDAVTYTEHARRKTVTAMDVVYALKRQGRTLYGFGG

SEQ ID NO: 10507 - DNA, 1630 bp, Zea mays subsp. mays
  misc_feature (1)..(1630): Ceres Seq. ID no. 13498060
  misc_feature: MA Experiment ID: 108515 Result: Up-regulated in Transcription
  misc_feature: MA Experiment 108515 PARAMETER Experiment Name: Zm_2mM_SA_P Parameter: Age (day) Value: 8
  misc_feature: MA Experiment 108515 PARAMETER Experiment Name: Zm_2mM_SA_P Parameter: Organism Value: Zea mays
  misc_feature: MA Experiment 108515 PARAMETER Experiment Name: Zm_2mM_SA_P Parameter: Plant Line Value: 35A19
  misc_feature: MA Experiment 108515 PARAMETER Experiment Name: Zm_2mM_SA_P Parameter: Timepoint (hr) Value: 12
  misc_feature: MA Experiment 108515 PARAMETER Experiment Name: Zm_2mM_SA_P Parameter: Tissue Value: Aerial
  misc_feature: MA Experiment 108515 PARAMETER Experiment Name: Zm_2mM_SA_P Parameter: Treatment Value: 2mM SA vs. No Treatment
  misc_feature: MA Experiment ID: 108526 Result: Up-regulated in Transcription
  misc_feature: MA Experiment 108526 PARAMETER Experiment Name: Zm_5mM_NO_P Parameter: Age (day) Value: 8
  misc_feature: MA Experiment 108526 PARAMETER Experiment Name: Zm_5mM_NO_P Parameter: Organism Value: Zea mays
  misc_feature: MA Experiment 108526 PARAMETER Experiment Name: Zm_5mM_NO_P Parameter: Plant Line Value: 35A19
  misc_feature: MA Experiment 108526 PARAMETER Experiment Name: Zm_5mM_NO_P Parameter: Timepoint (hr) Value: 1
  misc_feature: MA Experiment 108526 PARAMETER Experiment Name: Zm_5mM_NO_P Parameter: Tissue Value: Aerial
  misc_feature: MA Experiment 108526 PARAMETER Experiment Name: Zm_5mM_NO_P Parameter: Treatment Value: 5mM NO vs. No Treatment
  misc_feature: MA Experiment ID: 108527 Result: Up-regulated in Transcription
  misc_feature: MA Experiment 108527 PARAMETER Experiment Name: Zm_5mM_NO_P Parameter: Age (day) Value: 8
  misc_feature: MA Experiment 108527 PARAMETER Experiment Name: Zm_5mM_NO_P Parameter: Organism Value: Zea mays
  misc_feature: MA Experiment 108527 PARAMETER Experiment Name: Zm_5mM_NO_P Parameter: Plant Line Value: 35A19
  misc_feature: MA Experiment 108527 PARAMETER Experiment Name: Zm_5mM_NO_P Parameter: Timepoint (hr) Value: 6
  misc_feature: MA Experiment 108527 PARAMETER Experiment Name: Zm_5mM_NO_P Parameter: Tissue Value: Aerial
  misc_feature: MA Experiment 108527 PARAMETER Experiment Name: Zm_5mM_NO_P Parameter: Treatment Value: 5mM NO vs. No Treatment
  misc_feature: MA Experiment ID: 108535 Result: Down-regulated in Transcription
  misc_feature: MA Experiment 108535 PARAMETER Experiment Name: Zm_Meristem_P Parameter: Age (day) Value: 8
  misc_feature: MA Experiment 108535 PARAMETER Experiment Name: Zm_Meristem_P Parameter: Organism Value: Zea mays
  misc_feature: MA Experiment 108535 PARAMETER Experiment Name: Zm_Meristem_P Parameter: Plant Line Value: 35A19
  misc_feature: MA Experiment 108535 PARAMETER Experiment Name: Zm_Meristem_P Parameter: Tissue Value: Root Meristem vs. Above Root Meristem
  misc_feature: MA Experiment ID: 108540 Result: Down-regulated in Transcription
  misc_feature: MA Experiment 108540 PARAMETER Experiment Name: Zm_20percent_PEG_P Parameter: Age (day) Value: 8
  misc_feature: MA Experiment 108540 PARAMETER Experiment Name: Zm_20percent_PEG_P Parameter: Organism Value: Zea mays
  misc_feature: MA Experiment 108540 PARAMETER Experiment Name: Zm_20percent_PEG_P Parameter: Plant Line Value: 35A19
  misc_feature: MA Experiment 108540 PARAMETER Experiment Name: Zm_20percent_PEG_P Parameter: Timepoint (hr) Value: 6
  misc_feature: MA Experiment 108540 PARAMETER Experiment Name: Zm_20percent_PEG_P Parameter: Tissue Value: Aerial
  misc_feature: MA Experiment 108540 PARAMETER Experiment Name: Zm_20percent_PEG_P Parameter: Treatment Value: 20percent PEG vs. No Treatment
  misc_feature: MA Experiment ID: 108556 Result: Down-regulated in Transcription
  misc_feature: MA Experiment 108556 PARAMETER Experiment Name: Zm_Drought_P Parameter: Age (day) Value: 9
  misc_feature: MA Experiment 108556 PARAMETER Experiment Name: Zm_Drought_P Parameter: Organism Value: Zea mays
  misc_feature: MA Experiment 108556 PARAMETER Experiment Name: Zm_Drought_P Parameter: Plant Line Value: 35A19
  misc_feature: MA Experiment 108556 PARAMETER Experiment Name: Zm_Drought_P Parameter: Timepoint (hr) Value: 24
  misc_feature: MA Experiment 108556 PARAMETER Experiment Name: Zm_Drought_P Parameter: Tissue Value: Aerial
  misc_feature: MA Experiment 108556 PARAMETER Experiment Name: Zm_Drought_P Parameter: Treatment Value: Drought vs. No Drought
  misc_feature: MA Experiment ID: 108687 Result: Down-regulated in Transcription
  misc_feature: MA Experiment 108687 PARAMETER Experiment Name: Zm_Embryos-Flowers__P Parameter: Tissue Value: Embryo vs. Aerial+
  misc_feature: MA Experiment ID: 20000480 Result: Down-regulated in Transcription
  misc_feature: MA Experiment 20000480 PARAMETER Experiment Name: Zm_Drought_P Parameter: Age (day) Value: 11
  misc_feature: MA Experiment 20000480 PARAMETER Experiment Name: Zm_Drought_P Parameter: Organism Value: Zea mays
  misc_feature: MA Experiment 20000480 PARAMETER Experiment Name: Zm_Drought_P Parameter: Plant Line Value: 35A19
  misc_feature: MA Experiment 20000480 PARAMETER Experiment Name: Zm_Drought_P Parameter: Timepoint (hr) Value: 72
  misc_feature: MA Experiment 20000480 PARAMETER Experiment Name: Zm_Drought_P Parameter: Tissue Value: Aerial
  misc_feature: MA Experiment 20000480 PARAMETER Experiment Name: Zm_Drought_P Parameter: Treatment Value: Drought vs. No Drought
  misc_feature: MA Experiment ID: 20000487 Result: Down-regulated in Transcription
  misc_feature: MA Experiment 20000487 PARAMETER Experiment Name: Zm_50mM_NH4NO3_L_to_H_P Parameter: Organism Value: Zea mays
  misc_feature: MA Experiment 20000487 PARAMETER Experiment Name: Zm_50mM_NH4NO3_L_to_H_P Parameter: Timepoint (hr) Value: 4
  misc_feature: MA Experiment 20000487 PARAMETER Experiment Name: Zm_50mM_NH4NO3_L_to_H_P Parameter: Tissue Value: Leaves
  misc_feature: MA Experiment 20000487 PARAMETER Experiment Name: Zm_50mM_NH4NO3_L_to_H_P Parameter: Treatment Value: 50mM NH4NO3 vs. 100mM Mannitol
  misc_feature: MA Experiment ID: 20000488 Result: Down-regulated in Transcription
  misc_feature: MA Experiment 20000488 PARAMETER Experiment Name: Zm_50mM_NH4NO3_L_to_H_P Parameter: Organism Value: Zea mays
  misc_feature: MA Experiment 20000488 PARAMETER Experiment Name: Zm_50mM_NH4NO3_L_to_H_P Parameter: Timepoint (hr) Value: 8
  misc_feature: MA Experiment 20000488 PARAMETER Experiment Name: Zm_50mM_NH4NO3_L_to_H_P Parameter: Tissue Value: Leaves
  misc_feature: MA Experiment 20000488 PARAMETER Experiment Name: Zm_50mM_NH4NO3_L_to_H_P Parameter: Treatment Value: 50mM NH4NO3 vs. 100mM Mannitol
  misc_feature: MA Experiment ID: 20000535 Result: Down-regulated in Transcription
  misc_feature: MA Experiment 20000535 PARAMETER Experiment Name: Zm_Hybrid_Seed_Dev_P Parameter: DAP Value: 30 vs. 12
  misc_feature: MA Experiment 20000535 PARAMETER Experiment Name: Zm_Hybrid_Seed_Dev_P Parameter: Organism Value: Zea mays
  misc_feature: MA Experiment 20000535 PARAMETER Experiment Name: Zm_Hybrid_Seed_Dev_P Parameter: Plant Line Value: 35A19
  misc_feature: MA Experiment 20000535 PARAMETER Experiment Name: Zm_Hybrid_Seed_Dev_P Parameter: Tissue Value: Embryo vs. Unfert Floret
  misc_feature: MA Experiment ID: 20001608 Result: Down-regulated in Transcription
  misc_feature: MA Experiment 20001608 PARAMETER Experiment Name: Zm_50ppm_KNO3_L-to-H_P Parameter: Age (day) Value: 21
  misc_feature: MA Experiment 20001608 PARAMETER Experiment Name: Zm_50ppm_KNO3_L-to-H_P Parameter: Organism Value: Zea mays
  misc_feature: MA Experiment 20001608 PARAMETER Experiment Name: Zm_50ppm_KNO3_L-to-H_P Parameter: Plant Line Value: 35A19
  misc_feature: MA Experiment 20001608 PARAMETER Experiment Name: Zm_50ppm_KNO3_L-to-H_P Parameter: Timepoint (hr) Value: 48
  misc_feature: MA Experiment 20001608 PARAMETER Experiment Name: Zm_50ppm_KNO3_L-to-H_P Parameter: Tissue Value: Shoots
  misc_feature: MA Experiment 20001608 PARAMETER Experiment Name: Zm_50ppm_KNO3_L-to-H_P Parameter: Treatment Value: 50ppm KNO3 vs. 50ppm KCl
  misc_feature: MA Experiment ID: 20001613 Result: Down-regulated in Transcription
  misc_feature: MA Experiment 20001613 PARAMETER Experiment Name: Zm_50ppm_KNO3_L-to-H_P Parameter: Age (day) Value: 20
  misc_feature: MA Experiment 20001613 PARAMETER Experiment Name: Zm_50ppm_KNO3_L-to-H_P Parameter: Organism Value: Zea mays
  misc_feature: MA Experiment 20001613 PARAMETER Experiment Name: Zm_50ppm_KNO3_L-to-H_P Parameter: Plant Line Value: 35A19
  misc_feature: MA Experiment 20001613 PARAMETER Experiment Name: Zm_50ppm_KNO3_L-to-H_P Parameter: Timepoint (hr) Value: 24
  misc_feature: MA Experiment 20001613 PARAMETER Experiment Name: Zm_50ppm_KNO3_L-to-H_P Parameter: Tissue Value: Roots
  misc_feature: MA Experiment 20001613 PARAMETER Experiment Name: Zm_50ppm_KNO3_L-to-H_P Parameter: Treatment Value: 50ppm KNO3 vs. 50ppm KCl
  misc_feature: MA Experiment ID: 20001614 Result: Down-regulated in Transcription
  misc_feature: MA Experiment 20001614 PARAMETER Experiment Name: Zm_50ppm_KNO3_L-to-H_P Parameter: Age (day) Value: 21
  misc_feature: MA Experiment 20001614 PARAMETER Experiment Name: Zm_50ppm_KNO3_L-to-H_P Parameter: Organism Value: Zea mays
  misc_feature: MA Experiment 20001614 PARAMETER Experiment Name: Zm_50ppm_KNO3_L-to-H_P Parameter: Plant Line Value: 35A19
  misc_feature: MA Experiment 20001614 PARAMETER Experiment Name: Zm_50ppm_KNO3_L-to-H_P Parameter: Timepoint (hr) Value: 48
  misc_feature: MA Experiment 20001614 PARAMETER Experiment Name: Zm_50ppm_KNO3_L-to-H_P Parameter: Tissue Value: Roots
  misc_feature: MA Experiment 20001614 PARAMETER Experiment Name: Zm_50ppm_KNO3_L-to-H_P Parameter: Treatment Value: 50ppm KNO3 vs. 50ppm KCl
aataatggccggcgcccaagaagctggcgacgccctggtcatcagccgtgcgcgcggcgnntgctggtgttcccgctgcccttccagggccacatcgacccgatgctgcacctggcgggcgtgctccacgcgcggggcctcgcggtgaccgtgctccacacgcgcttcaacgcgttggaccccgcgcggcacccggagttccagttcgtggccgtccccgacggcacgcccgccgacgtcgccgccatggggaggatcatcgacatcatcctggccatgaacgccgccatggaggcgtcgccggccgtcggggaggcgctgcgggcgtccgcggtcgcggggcaggacgggcggccccgcgcctcgtgcctcttcgtcgacgccaacctcctcgccgtgcacagggcggccagggcgctcggactgcccacgctggtgctgcgcaccgggagcgccgcctgcctcggctgcttcctggcctaccccatgctccacgaaaagggctatctgcctccgcaagagtcgcagctgtgcacgccggtgccggagctgccaccactccgagtgaaggacctgatctactcgaagcacagcgaccacgagctgatgcgcaaagtcctcgcccggggcagcgaaacagtgagagattgctccggcgtcgtcatcaacacagccgaggcactggaggcagccgagctagggaggctccgcgacgagctggtccacctcccggtggtgctcgccgccggcccactccacaagctctcctcctccaggggcgccgggagcagcttgctcgccccggaccacagctgcatcgagtggctggacgcgcagcggcccgggtcggtgctgtacgtgagcttcgggagcctggcggccatggactcgagcgagctccgggaggtggcatggggtctggcggagtgcggccaccccttcctatgggtcgtccggcccaacatggtacgaggctgcgacgtcgacagcgcgcggcagctgccggatggtttcgaggacgccgtcaagggcagaggcgtggtggtccgctgggccccgcagcaggaggtgctggcccaccgcgcagtgggtgggttctggagccactgcgggtggaactcgactctggaggcggtcagcgagggggtcccgatgatctgcaggccggacgccgtggaccagatgatgaacacgaggtacttgcaggacgtctggggcgtcggcttcgagctccaaggggagctggagagggggaagatcaaggacgcggttaggaagttgatgggtgagcgggagggagctgagatgagaagagcagcgcaagagctttgcgcgaaactagcaggctgcttggagagcactgggtcttctcaggttgccattgacaagttggttagctacattctgtctctgtgaatcttctgttctatggcgtatgtgtgttccgctgggttagcattggcagcagcttaacagctggtactcttatatggacaattattcctgtcaattatatgtagtgttctctttctctagctattttttaatttctctacacaccagcttctgatttcgttttaccgccttccatatcggagatattataaacctgactccctttcaagctctc

SEQ ID NO: 10508 - protein, 471 aa, Zea mays subsp. mays
  peptide (1)..(471): Ceres Seq. ID no. 13498061
  misc_feature (19)..(471): Homolog of NCBI NO: 33146633 NR Description: putative UDP-glucosyltransferase [Oryza sativa
  misc_feature (19)..(462): Homolog of NCBI NO: 34900678 NR Description: glucuronosyl transferase-like protein [Oryza
  misc_feature (13)..(471): Homolog of NCBI NO: 34897378 NR Description: putative UDP-glucosyltransferase [Oryza sativa
  misc_feature (10)..(471): Homolog of NCBI NO: 34900682 NR Description: glucuronosyl transferase-like protein [Oryza
  misc_feature (19)..(264): Homolog of NCBI NO: 34900680 NR Description: contains ESTs
  misc_feature (295)..(471): Homolog of NCBI NO: 34900680 NR Description: contains ESTs
  misc_feature (19)..(470): Homolog of NCBI NO: 34395172 NR Description: putative UDP-glucosyltransferase [Oryza sativa
  misc_feature (13)..(471): Homolog of NCBI NO: 34900662 NR Description: glucuronosyl transferase-like protein [Oryza
  misc_feature (10)..(471): Homolog of NCBI NO: 33146634 NR Description: putative UDP-glucosyltransferase [Oryza sativa
  misc_feature (17)..(467): Homolog of NCBI NO: 18033228 NR Description: UDP-glucosyltransferase BX8 [Zea mays]
  misc_feature (20)..(20): Xaa is any aa, unknown or other
  misc_feature (21)..(21): Xaa is any aa, unknown or other
NNGRRPRSWRRPGHQPCARXXLVFPLPFQGHIDPMLHLAGVLHARGLAVTVLHTRFNALDPARHPEFQFVAVPDGTPADVAAMGRIIDIILAMNAAMEASPAVGEALRASAVAGQDGRPRASCLFVDANLLAVHRAARALGLPTLVLRTGSAACLGCFLAYPMLHEKGYLPPQESQLCTPVPELPPLRVKDLIYSKHSDHELMRKVLARGSETVRDCSGVVINTAEALEAAELGRLRDELVHLPVVLAAGPLHKLSSSRGAGSSLLAPDHSCIEWLDAQRPGSVLYVSFGSLAAMDSSELREVAWGLAECGHPFLWVVRPNMVRGCDVDSARQLPDGFEDAVKGRGVVVRWAPQQEVLAHRAVGGFWSHCGWNSTLEAVSEGVPMICRPDAVDQMMNTRYLQDVWGVGFELQGELERGKIKDAVRKLMGEREGAEMRRAAQELCAKLAGCLESTGSSQVAIDKLVSYILSL

SEQ ID NO: 10509 - protein, 437 aa, Zea mays subsp. mays
  peptide (1)..(437): Ceres Seq. ID no. 13498062
  misc_feature (1)..(437): Homolog of NCBI NO: 33146633 NR Description: putative UDP-glucosyltransferase [Oryza sativa
  misc_feature (1)..(428): Homolog of NCBI NO: 34900678 NR Description: glucuronosyl transferase-like protein [Oryza
  misc_feature (1)..(437): Homolog of NCBI NO: 34897378 NR Description: putative UDP-glucosyltransferase [Oryza sativa
  misc_feature (1)..(437): Homolog of NCBI NO: 34900682 NR Description: glucuronosyl transferase-like protein [Oryza
  misc_feature (1)..(230): Homolog of NCBI NO: 34900680 NR Description: contains ESTs
  misc_feature (261)..(437): Homolog of NCBI NO: 34900680 NR Description: contains ESTs
  misc_feature (1)..(436): Homolog of NCBI NO: 34395172 NR Description: putative UDP-glucosyltransferase [Oryza sativa
  misc_feature (1)..(437): Homolog of NCBI NO: 34900662 NR Description: glucuronosyl transferase-like protein [Oryza
  misc_feature (1)..(437): Homolog of NCBI NO: 33146634 NR Description: putative UDP-glucosyltransferase [Oryza sativa
  misc_feature (1)..(433): Homolog of NCBI NO: 18033228 NR Description: UDP-glucosyltransferase BX8 [Zea mays]
MLHLAGVLHARGLAVTVLHTRFNALDPARHPEFQFVAVPDGTPADVAAMGRIIDIILAMNAAMEASPAVGEALRASAVAGQDGRPRASCLFVDANLLAVHRAARALGLPTLVLRTGSAACLGCFLAYPMLHEKGYLPPQESQLCTPVPELPPLRVKDLIYSKHSDHELMRKVLARGSETVRDCSGVVINTAEALEAAELGRLRDELVHLPVVLAAGPLHKLSSSRGAGSSLLAPDHSCIEWLDAQRPGSVLYVSFGSLAAMDSSELREVAWGLAECGHPFLWVVRPNMVRGCDVDSARQLPDGFEDAVKGRGVVVRWAPQQEVLAHRAVGGFWSHCGWNSTLEAVSEGVPMICRPDAVDQMMNTRYLQDVWGVGFELQGELERGKIKDAVRKLMGEREGAEMRRAAQELCAKLAGCLESTGSSQVAIDKLVSYILSL

SEQ ID NO: 10510 - protein, 389 aa, Zea mays subsp. mays
  peptide (1)..(389): Ceres Seq. ID no. 13498063
  misc_feature (1)..(389): Homolog of NCBI NO: 33146634 NR Description: putative UDP-glucosyltransferase [Oryza sativa
  misc_feature (1)..(385): Homolog of NCBI NO: 18033228 NR Description: UDP-glucosyltransferase BX8 [Zea mays]
  misc_feature (1)..(388): Homolog of NCBI NO: 34395172 NR Description: putative UDP-glucosyltransferase [Oryza sativa
  misc_feature (1)..(389): Homolog of NCBI NO: 34900662 NR Description: glucuronosyl transferase-like protein [Oryza
  misc_feature (1)..(389): Homolog of NCBI NO: 33146633 NR Description: putative UDP-glucosyltransferase [Oryza sativa
  misc_feature (1)..(380): Homolog of NCBI NO: 34900678 NR Description: glucuronosyl transferase-like protein [Oryza
  misc_feature (1)..(389): Homolog of NCBI NO: 34897378 NR Description: putative UDP-glucosyltransferase [Oryza sativa
  misc_feature (1)..(389): Homolog of NCBI NO: 34900682 NR Description: glucuronosyl transferase-like protein [Oryza
  misc_feature (1)..(182): Homolog of NCBI NO: 34900680 NR Description: contains ESTs
  misc_feature (213)..(389): Homolog of NCBI NO: 34900680 NR Description: contains ESTs
MGRIIDIILAMNAAMEASPAVGEALRASAVAGQDGRPRASCLFVDANLLAVHRAARALGLPTLVLRTGSAACLGCFLAYPMLHEKGYLPPQESQLCTPVPELPPLRVKDLIYSKHSDHELMRKVLARGSETVRDCSGVVINTAEALEAAELGRLRDELVHLPVVLAAGPLHKLSSSRGAGSSLLAPDHSCIEWLDAQRPGSVLYVSFGSLAAMDSSELREVAWGLAECGHPFLWVVRPNMVRGCDVDSARQLPDGFEDAVKGRGVVVRWAPQQEVLAHRAVGGFWSHCGWNSTLEAVSEGVPMICRPDAVDQMMNTRYLQDVWGVGFELQGELERGKIKDAVRKLMGEREGAEMRRAAQELCAKLAGCLESTGSSQVAIDKLVSYILSL

SEQ ID NO: 10511 - DNA, 1311 bp, Zea mays subsp. mays
  misc_feature (1)..(1311): Ceres Seq. ID no. 12400884
  misc_feature: MA Experiment ID: 108528 Result: Up-regulated in Transcription
  misc_feature: MA Experiment 108528 PARAMETER Experiment Name: Zm_Imbibed_Seeds_P Parameter: Age (day) Value: 5 vs. 2
  misc_feature: MA Experiment 108528 PARAMETER Experiment Name: Zm_Imbibed_Seeds_P Parameter: Organism Value: Zea mays
  misc_feature: MA Experiment 108528 PARAMETER Experiment Name: Zm_Imbibed_Seeds_P Parameter: Plant Line Value: 35A19
  misc_feature: MA Experiment 108528 PARAMETER Experiment Name: Zm_Imbibed_Seeds_P Parameter: Tissue Value: Aerial vs. Embryo
  misc_feature: MA Experiment ID: 108530 Result: Up-regulated in Transcription
  misc_feature: MA Experiment 108530 PARAMETER Experiment Name: Zm_Imbibed_Seeds_P Parameter: Age (day) Value: 6 vs. 2
  misc_feature: MA Experiment 108530 PARAMETER Experiment Name: Zm_Imbibed_Seeds_P Parameter: Organism Value: Zea mays
  misc_feature: MA Experiment 108530 PARAMETER Experiment Name: Zm_Imbibed_Seeds_P Parameter: Plant Line Value: 35A19
  misc_feature: MA Experiment 108530 PARAMETER Experiment Name: Zm_Imbibed_Seeds_P Parameter: Tissue Value: Aerial vs. Embryo
  misc_feature: MA Experiment ID: 108547 Result: Up-regulated in Transcription
  misc_feature: MA Experiment 108547 PARAMETER Experiment Name: Zm_Imbibed_Seeds_P Parameter: Age (day) Value: 4 vs. 2
  misc_feature: MA Experiment 108547 PARAMETER Experiment Name: Zm_Imbibed_Seeds_P Parameter: Organism Value: Zea mays
  misc_feature: MA Experiment 108547 PARAMETER Experiment Name: Zm_Imbibed_Seeds_P Parameter: Plant Line Value: 35A19
  misc_feature: MA Experiment 108547 PARAMETER Experiment Name: Zm_Imbibed_Seeds_P Parameter: Tissue Value: Aerial vs. Embryo
  misc_feature: MA Experiment ID: 108559 Result: Down-regulated in Transcription
  misc_feature: MA Experiment 108559 PARAMETER Experiment Name: Zm_5mM_NO_P Parameter: Age (day) Value: 8
  misc_feature: MA Experiment 108559 PARAMETER Experiment Name: Zm_5mM_NO_P Parameter: Organism Value: Zea mays
  misc_feature: MA Experiment 108559 PARAMETER Experiment Name: Zm_5mM_NO_P Parameter: Plant Line Value: 35A19
  misc_feature: MA Experiment 108559 PARAMETER Experiment Name: Zm_5mM_NO_P Parameter: Timepoint (hr) Value: 12
  misc_feature: MA Experiment 108559 PARAMETER Experiment Name: Zm_5mM_NO_P Parameter: Tissue Value: Aerial
  misc_feature: MA Experiment 108559 PARAMETER Experiment Name: Zm_5mM_NO_P Parameter: Treatment Value: 5mM NO vs. No Treatment
  misc_feature: MA Experiment ID: 20000492 Result: Down-regulated in Transcription
  misc_feature: MA Experiment 20000492 PARAMETER Experiment Name: Zm_Hybrid_Seed_Dev_P Parameter: DAP Value: 12
  misc_feature: MA Experiment 20000492 PARAMETER Experiment Name: Zm_Hybrid_Seed_Dev_P Parameter: Organism Value: Zea mays
  misc_feature: MA Experiment 20000492 PARAMETER Experiment Name: Zm_Hybrid_Seed_Dev_P Parameter: Plant Line Value: 35A19
  misc_feature: MA Experiment 20000492 PARAMETER Experiment Name: Zm_Hybrid_Seed_Dev_P Parameter: Tissue Value: Fert Kernel vs. Unfert Floret
actggataattcgctcgctccgctcgatgcccgcttgtttgcggtgaagcctccggcgaacagccgtagcggaaacgccgcccgagatgtctgctccctccgccccaccccgcacggtgatctgtgtgggcgacgtccacggctacatcacgaagctggagagcctctggtccaacctccaggctgcactccccgccgacgccttcgccaccgcgctggtcatcttcctcggcgactacaacgatcgcggcccgcacacccgcagggtcctcgacttcctcctcgcgctcccgacgcgctaccccgcgcagcgccacgtcttcctctgcggcaaccacgacctcgccttcgcggcgttcgtcggggcgctgccgccgccgcccgacggctccccgttctcggccacctgggacgagtacatccacaacgaggagcacgaggggtggttccgcgggccgggattcgagggcatgcacgtgcaggggaggcggtggggcggggtcatcaaggagaggtggaaccccaagaaggggctcccgtacaagggctccatctacgacgcgcagcccaccttcgaatcctatggcgtcgcccatggttcccctgatcttgcaaaggctgtgccagaggagcacaagaggtttctgcatgatttggtttggatacatgaagaggaaaatgtgccaattgatatggatggaggacaaatcatctgcaatctgattgctgtccatgctggcctagagaggactatagatttgaatgagcaacttagagttttaagaactagagacacaagggtgccaaaggttcaaatgcttagtgggaggcaagatgtttgggacacacccaagggtctggccggcaagcagactattattgtaagtggccaccacgggaagctccacatcgacggcctccgatttataatcgacgaaggtggtggttatgaagacaaacctattgctgcaatagtttttccttcaaagacattgatcagaagtaccgaggaagcgggaaccacatcagagaggtgatctagagttctagacatcatcaggagcagtgaacacggaggcacagttttctctctctcttgaagttactgcttgtagtcatgtactcatgtcaaacgacaataggaagttaggaacaacgtccaaaggcaataagttggtgaaccggacctgcgttttctcattttagtcactaatgactatatgtctatatatattgtaccttgatgctgtcaatttagacgagaccgtacatcctcttttttagggcaataaactttactccctgtcctct

SEQ ID NO: 10512 - protein, 316 aa, Zea mays subsp. mays
  peptide (1)..(316): Ceres Seq. ID no. 12400885
  misc_feature (9)..(273): Pfam Name: Calcineurin-like phosphoesterase Pfam Description: Calcineurin-like phosphoesterase
  misc_feature (1)..(316): Homolog of NCBI NO: 38347604 NR Description: OSJNBa0042I15.17 [Oryza sativa (japonica
  misc_feature (8)..(308): Homolog of NCBI NO: 18398699 NR Description: expressed protein; protein id: At3g09970.1, by cDNA: 97694. [Arabidopsis thaliana] unknown protein [Arabidopsis thaliana]
  misc_feature (8)..(308): Homolog of NCBI NO: 21618122 NR Description: unknown [Arabidopsis thaliana]
  misc_feature (8)..(308): Homolog of NCBI NO: 6143880 NR Description: unknown protein [Arabidopsis thaliana]
  misc_feature (8)..(308): Homolog of NCBI NO: 18398696 NR Description: expressed protein; protein id: At3g09960.1, by cDNA: 155078. [Arabidopsis thaliana]
  misc_feature (162)..(308): Homolog of NCBI NO: 19424085 NR Description: unknown protein [Arabidopsis thaliana]
  misc_feature (14)..(101): Homolog of NCBI NO: 13475753 NR Description: serine/threonine protein phosphatase loti] >gi|14026509|dbj|BAB53106.1| serine/threonine protein
MSAPSAPPRTVICVGDVHGYITKLESLWSNLQAALPADAFATALVIFLGDYNDRGPHTRRVLDFLLALPTRYPAQRHVFLCGNHDLAFAAFVGALPPPPDGSPFSATWDEYIHNEEHEGWFRGPGFEGMHVQGRRWGGVIKERWNPKKGLPYKGSIYDAQPTFESYGVAHGSPDLAKAVPEEHKRFLHDLVWIHEEENVPIDMDGGQIICNLIAVHAGLERTIDLNEQLRVLRTRDTRVPKVQMLSGRQDVWDTPKGLAGKQTIIVSGHHGKLHIDGLRFIIDEGGGYEDKPIAAIVFPSKTLIRSTEEAGTTSER

SEQ ID NO: 10513 - protein, 201 aa, Zea mays subsp. mays
  peptide (1)..(201): Ceres Seq. ID no. 12400886
LDNSLAPLDARLFAVKPPANSRSGNAARDVCSLRPTPHGDLCGRRPRLHHEAGEPLVQPPGCTPRRRLRHRAGHLPRRLQRSRPAHPQGPRLPPRAPDALPRAAPRLPLRQPRPRLRGVRRGAAAAARRLPVLGHLGRVHPQRGARGVVPRAGIRGHARAGEAVGRGHQGEVEPQEGAPVQGLHLRRAAHLRILWRRPWFP

SEQ ID NO: 10514 - protein, 188 aa, Zea mays subsp. mays
  peptide (1)..(188): Ceres Seq. ID no. 12400887
  misc_feature (1)..(145): Pfam Name: Calcineurin-like phosphoesterase Pfam Description: Calcineurin-like phosphoesterase
  misc_feature (1)..(188): Homolog of NCBI NO: 38347604 NR Description: OSJNBa0042I15.17 [Oryza sativa (japonica
  misc_feature (1)..(180): Homolog of NCBI NO: 18398699 NR Description: expressed protein; protein id: At3g09970.1, by cDNA: 97694. [Arabidopsis thaliana] unknown protein [Arabidopsis thaliana]
  misc_feature (1)..(180): Homolog of NCBI NO: 21618122 NR Description: unknown [Arabidopsis thaliana]
  misc_feature (1)..(180): Homolog of NCBI NO: 6143880 NR Description: unknown protein [Arabidopsis thaliana]
  misc_feature (1)..(180): Homolog of NCBI NO: 18398696 NR Description: expressed protein; protein id: At3g09960.1, by cDNA: 155078. [Arabidopsis thaliana]
  misc_feature (34)..(180): Homolog of NCBI NO: 19424085 NR Description: unknown protein [Arabidopsis thaliana]
MHVQGRRWGGVIKERWNPKKGLPYKGSIYDAQPTFESYGVAHGSPDLAKAVPEEHKRFLHDLVWIHEEENVPIDMDGGQIICNLIAVHAGLERTIDLNEQLRVLRTRDTRVPKVQMLSGRQDVWDTPKGLAGKQTIIVSGHHGKLHIDGLRFIIDEGGGYEDKPIAAIVFPSKTLIRSTEEAGTTSER

SEQ ID NO: 10515 - DNA, 1072 bp, Zea mays subsp. mays
  misc_feature (1)..(1072): Ceres Seq. ID no. 12340576
  misc_feature: MA Experiment ID: 108523 Result: Down-regulated in Transcription
  misc_feature: MA Experiment 108523 PARAMETER Experiment Name: Zm_42deg_Heat_P Parameter: Age (day) Value: 8
  misc_feature: MA Experiment 108523 PARAMETER Experiment Name: Zm_42deg_Heat_P Parameter: Organism Value: Zea mays
  misc_feature: MA Experiment 108523 PARAMETER Experiment Name: Zm_42deg_Heat_P Parameter: Plant Line Value: 35A19
  misc_feature: MA Experiment 108523 PARAMETER Experiment Name: Zm_42deg_Heat_P Parameter: Temperature (deg C) Value: 42 vs. 22
  misc_feature: MA Experiment 108523 PARAMETER Experiment Name: Zm_42deg_Heat_P Parameter: Timepoint (hr) Value: 6
  misc_feature: MA Experiment 108523 PARAMETER Experiment Name: Zm_42deg_Heat_P Parameter: Tissue Value: Aerial
  misc_feature: MA Experiment ID: 108535 Result: Up-regulated in Transcription
  misc_feature: MA Experiment 108535 PARAMETER Experiment Name: Zm_Meristem_P Parameter: Age (day) Value: 8
  misc_feature: MA Experiment 108535 PARAMETER Experiment Name: Zm_Meristem_P Parameter: Organism Value: Zea mays
  misc_feature: MA Experiment 108535 PARAMETER Experiment Name: Zm_Meristem_P Parameter: Plant Line Value: 35A19
  misc_feature: MA Experiment 108535 PARAMETER Experiment Name: Zm_Meristem_P Parameter: Tissue Value: Root Meristem vs. Above Root Meristem
  misc_feature: MA Experiment ID: 108543 Result: Up-regulated in Transcription
  misc_feature: MA Experiment ID: 108548 Result: Up-regulated in Transcription
  misc_feature: MA Experiment 108548 PARAMETER Experiment Name: Zm_20uM_KNO3_H-to-L_P Parameter: Age (day) Value: 11
  misc_feature: MA Experiment 108548 PARAMETER Experiment Name: Zm_20uM_KNO3_H-to-L_P Parameter: Organism Value: Zea mays
  misc_feature: MA Experiment 108548 PARAMETER Experiment Name: Zm_20uM_KNO3_H-to-L_P Parameter: Plant Line Value: 35A19
  misc_feature: MA Experiment 108548 PARAMETER Experiment Name: Zm_20uM_KNO3_H-to-L_P Parameter: Timepoint (hr) Value: 4
  misc_feature: MA Experiment 108548 PARAMETER Experiment Name: Zm_20uM_KNO3_H-to-L_P Parameter: Tissue Value: Roots
  misc_feature: MA Experiment 108548 PARAMETER Experiment Name: Zm_20uM_KNO3_H-to-L_P Parameter: Treatment Value: 20uM KNO3 vs. 60mM KNO3
  misc_feature: MA Experiment ID: 108556 Result: Down-regulated in Transcription
  misc_feature: MA Experiment 108556 PARAMETER Experiment Name: Zm_Drought_P Parameter: Age (day) Value: 9
  misc_feature: MA Experiment 108556 PARAMETER Experiment Name: Zm_Drought_P Parameter: Organism Value: Zea mays
  misc_feature: MA Experiment 108556 PARAMETER Experiment Name: Zm_Drought_P Parameter: Plant Line Value: 35A19
  misc_feature: MA Experiment 108556 PARAMETER Experiment Name: Zm_Drought_P Parameter: Timepoint (hr) Value: 24
  misc_feature: MA Experiment 108556 PARAMETER Experiment Name: Zm_Drought_P Parameter: Tissue Value: Aerial
  misc_feature: MA Experiment 108556 PARAMETER Experiment Name: Zm_Drought_P Parameter: Treatment Value: Drought vs. No Drought
  misc_feature: MA Experiment ID: 20000478 Result: Down-regulated in Transcription
  misc_feature: MA Experiment 20000478 PARAMETER Experiment Name: Zm_5mM_SA_P Parameter: Age (day) Value: 11
  misc_feature: MA Experiment 20000478 PARAMETER Experiment Name: Zm_5mM_SA_P Parameter: Organism Value: Zea mays
  misc_feature: MA Experiment 20000478 PARAMETER Experiment Name: Zm_5mM_SA_P Parameter: Plant Line Value: 35A19
  misc_feature: MA Experiment 20000478 PARAMETER Experiment Name: Zm_5mM_SA_P Parameter: Timepoint (hr) Value: 72
  misc_feature: MA Experiment 20000478 PARAMETER Experiment Name: Zm_5mM_SA_P Parameter: Tissue Value: Aerial
  misc_feature: MA Experiment 20000478 PARAMETER Experiment Name: Zm_5mM_SA_P Parameter: Treatment Value: 5mM SA vs. No Treatment
  misc_feature: MA Experiment ID: 20000535 Result: Up-regulated in Transcription
  misc_feature: MA Experiment 20000535 PARAMETER Experiment Name: Zm_Hybrid_Seed_Dev_P Parameter: DAP Value: 30 vs. 12
  misc_feature: MA Experiment 20000535 PARAMETER Experiment Name: Zm_Hybrid_Seed_Dev_P Parameter: Organism Value: Zea mays
  misc_feature: MA Experiment 20000535 PARAMETER Experiment Name: Zm_Hybrid_Seed_Dev_P Parameter: Plant Line Value: 35A19
  misc_feature: MA Experiment 20000535 PARAMETER Experiment Name: Zm_Hybrid_Seed_Dev_P Parameter: Tissue Value: Embryo vs. Unfert Floret
acgtgccgtcgccacaatttaagcacggcttcctccgccacgacctccacacatcaccagcgcacagctctcctcatcggcgcacccgagctcgccctctccttcctcatcgaggcccgagtcctgctctgatggcgaccgacgtggctgagactcccgcgccgttggtggatgcggcccctgaggcgcccgcggacaccccggcggcgcctgctgttgacgcgaagccggccaaggccaagaaggccacagcgccgaagaagcgcgccagcccgacccatccgccgtacgccgagatggtctcggaggcgatcgcgtcgctcaaggagaggacggggtccagcagctttgctattgccaagttcttggaggacaagcacaaggacaagctcccgcccaacttccgcaagcttctgaacgttcagctcaagaagctcgtcgccggcggcaagctgaccaaggtgaagaactcgtacaagctgtcgtccgccaccaagccaaaggccgccccgaagaagaccaagaccggcgtgaagaagcccaaggccgctgccaaaccgaaggccaagtcccccgcgaagcccaagcccgccacaaagcccaaggcggccgcgaagcccgcttccaagcccgaaagcagcagcaaaacccaaggcaccagccaagcccaaggccaagcctgctgccaaggcgaagcccaaggctgccggcgctaagccgaagccagctgccaagaaggccggccgccccgccaaggcggccaagacgtcggccaaggccacgccaggaaagaaggcgccggtggccaagaagcccgcggccgccgcgaagaaggcgccggtagccaagaaggccgctccggcgaagaaggcggctgcccctgcccgaaaagcgccgtctcggaaggcgaagaagtagaggaggggtaggcgtcggagaaatgtagggtttggttctcgtattacgctagatgtttgctctccctttagcctaggtggtgtctgtgtgtgcaatgttgtaaatttgatatcggatgctgggaacactaagtcaatctttcagtagctgttgt

SEQ ID NO: 10516 - protein, 237 aa, Zea mays subsp. mays
  peptide (1)..(237): Ceres Seq. ID no. 12340577
  misc_feature (92)..(162): Pfam Name: linker histone H1 and H5 family Pfam Description: linker histone H1 and H5 family
  misc_feature (92)..(162): Pfam Name: linker histone H1 and H5 family Pfam Description: linker histone H1 and H5 family
  misc_feature (44)..(225): Homolog of NCBI NO: 121950 NR Description: HISTONE H1 >gi|7439629|pir||S26826 histone H1 -
  misc_feature (44)..(233): Homolog of NCBI NO: 34897182 NR Description: histone-like protein [Oryza sativa (japonica
  misc_feature (44)..(237): Homolog of NCBI NO: 11558848 NR Description: histone H1 [Triticum aestivum]
  misc_feature (44)..(237): Homolog of NCBI NO: 5230781 NR Description: histone H1 WH1A.1 [Triticum aestivum]
  misc_feature (44)..(237): Homolog of NCBI NO: 5230785 NR Description: histone H1 WH1B.1 [Triticum aestivum]
  misc_feature (44)..(233): Homolog of NCBI NO: 34897182 NR Description: histone-like protein [Oryza sativa (japonica
  misc_feature (44)..(237): Homolog of NCBI NO: 5230781 NR Description: histone H1 WH1A.1 [Triticum aestivum]
  misc_feature (44)..(237): Homolog of NCBI NO: 283024 NR Description: histone H1 - wheat
  misc_feature (52)..(237): Homolog of NCBI NO: 5230788 NR Description: histone H1 WH1A.3 [Triticum aestivum]
  misc_feature (44)..(237): Homolog of NCBI NO: 14916992 NR Description: HISTONE H1
  misc_feature (44)..(237): Homolog of NCBI NO: 5230783 NR Description: histone H1 WH1A.2 [Triticum aestivum]
  misc_feature (44)..(237): Homolog of NCBI NO: 5230790 NR Description: histone H1 WH1A.4 [Triticum aestivum]
  misc_feature (44)..(237): Homolog of NCBI NO: 5230785 NR Description: histone H1 WH1B.1 [Triticum aestivum]
  misc_feature (44)..(237): Homolog of NCBI NO: 11558848 NR Description: histone H1 [Triticum aestivum]
  misc_feature (44)..(225): Homolog of NCBI NO: 121950 NR Description: HISTONE H1 >gi|7439629|pir||S26826 histone H1 -
  misc_feature (44)..(237): Homolog of NCBI NO: 5230790 NR Description: histone H1 WH1A.4 [Triticum aestivum]
  misc_feature (44)..(237): Homolog of NCBI NO: 5230783 NR Description: histone H1 WH1A.2 [Triticum aestivum]
  misc_feature (44)..(237): Homolog of NCBI NO: 14916992 NR Description: HISTONE H1
  misc_feature (52)..(237): Homolog of NCBI NO: 5230788 NR Description: histone H1 WH1A.3 [Triticum aestivum]
  misc_feature (44)..(237): Homolog of NCBI NO: 283024 NR Description: histone H1 - wheat
VPSPQFKHGFLRHDLHTSPAHSSPHRRTRARPLLPHRGPSPALMATDVAETPAPLVDAAPEAPADTPAAPAVDAKPAKAKKATAPKKRASPTHPPYAEMVSEAIASLKERTGSSSFAIAKFLEDKHKDKLPPNFRKLLNVQLKKLVAGGKLTKVKNSYKLSSATKPKAAPKKTKTGVKKPKAAAKPKAKSPAKPKPATKPKAAAKPASKPESSSKTQGTSQAQGQACCQGEAQGCRR

SEQ ID NO: 10517 - protein, 194 aa, Zea mays subsp. mays
  peptide (1)..(194): Ceres Seq. ID no. 12340578
  misc_feature (49)..(119): Pfam Name: linker histone H1 and H5 family Pfam Description: linker histone H1 and H5 family
  misc_feature (49)..(119): Pfam Name: linker histone H1 and H5 family Pfam Description: linker histone H1 and H5 family
  misc_feature (1)..(182): Homolog of NCBI NO: 121950 NR Description: HISTONE H1 >gi|7439629|pir||S26826 histone H1 -
  misc_feature (1)..(190): Homolog of NCBI NO: 34897182 NR Description: histone-like protein [Oryza sativa (japonica
  misc_feature (1)..(194): Homolog of NCBI NO: 11558848 NR Description: histone H1 [Triticum aestivum]
  misc_feature (1)..(194): Homolog of NCBI NO: 5230781 NR Description: histone H1 WH1A.1 [Triticum aestivum]
  misc_feature (1)..(194): Homolog of NCBI NO: 5230785 NR Description: histone H1 WH1B.1 [Triticum aestivum]
  misc_feature (1)..(190): Homolog of NCBI NO: 34897182 NR Description: histone-like protein [Oryza sativa (japonica
  misc_feature (1)..(194): Homolog of NCBI NO: 5230781 NR Description: histone H1 WH1A.1 [Triticum aestivum]
  misc_feature (1)..(194): Homolog of NCBI NO: 283024 NR Description: histone H1 - wheat
  misc_feature (9)..(194): Homolog of NCBI NO: 5230788 NR Description: histone H1 WH1A.3 [Triticum aestivum]
  misc_feature (1)..(194): Homolog of NCBI NO: 14916992 NR Description: HISTONE H1
  misc_feature (1)..(194): Homolog of NCBI NO: 5230783 NR Description: histone H1 WH1A.2 [Triticum aestivum]
  misc_feature (1)..(194): Homolog of NCBI NO: 5230790 NR Description: histone H1 WH1A.4 [Triticum aestivum]
  misc_feature (1)..(194): Homolog of NCBI NO: 5230785 NR Description: histone H1 WH1B.1 [Triticum aestivum]
  misc_feature (1)..(194): Homolog of NCBI NO: 11558848 NR Description: histone H1 [Triticum aestivum]
  misc_feature (1)..(182): Homolog of NCBI NO: 121950 NR Description: HISTONE H1 >gi|7439629|pir||S26826 histone H1 -
  misc_feature (1)..(194): Homolog of NCBI NO: 5230790 NR Description: histone H1 WH1A.4 [Triticum aestivum]
  misc_feature (1)..(194): Homolog of NCBI NO: 5230783 NR Description: histone H1 WH1A.2 [Triticum aestivum]
  misc_feature (1)..(194): Homolog of NCBI NO: 14916992 NR Description: HISTONE H1
  misc_feature (9)..(194): Homolog of NCBI NO: 5230788 NR Description: histone H1 WH1A.3 [Triticum aestivum]
  misc_feature (1)..(194): Homolog of NCBI NO: 283024 NR Description: histone H1 - wheat
MATDVAETPAPLVDAAPEAPADTPAAPAVDAKPAKAKKATAPKKRASPTHPPYAEMVSEAIASLKERTGSSSFAIAKFLEDKHKDKLPPNFRKLLNVQLKKLVAGGKLTKVKNSYKLSSATKPKAAPKKTKTGVKKPKAAAKPKAKSPAKPKPATKPKAAAKPASKPESSSKTQGTSQAQGQACCQGEAQGCRR

SEQ ID NO: 10518 - protein, 139 aa, Zea mays subsp. mays
  peptide (1)..(139): Ceres Seq. ID no. 12340579
  misc_feature (1)..(64): Pfam Name: linker histone H1 and H5 family Pfam Description: linker histone H1 and H5 family
  misc_feature (1)..(64): Pfam Name: linker histone H1 and H5 family Pfam Description: linker histone H1 and H5 family
  misc_feature (1)..(127): Homolog of NCBI NO: 121950 NR Description: HISTONE H1 >gi|7439629|pir||S26826 histone H1 -
  misc_feature (1)..(135): Homolog of NCBI NO: 34897182 NR Description: histone-like protein [Oryza sativa (japonica
  misc_feature (1)..(139): Homolog of NCBI NO: 11558848 NR Description: histone H1 [Triticum aestivum]
  misc_feature (1)..(139): Homolog of NCBI NO: 5230781 NR Description: histone H1 WH1A.1 [Triticum aestivum]
  misc_feature (1)..(139): Homolog of NCBI NO: 5230785 NR Description: histone H1 WH1B.1 [Triticum aestivum]
  misc_feature (1)..(135): Homolog of NCBI NO: 34897182 NR Description: histone-like protein [Oryza sativa (japonica
  misc_feature (1)..(139): Homolog of NCBI NO: 5230781 NR Description: histone H1 WH1A.1 [Triticum aestivum]
  misc_feature (1)..(139): Homolog of NCBI NO: 283024 NR Description: histone H1 - wheat
  misc_feature (1)..(139): Homolog of NCBI NO: 5230788 NR Description: histone H1 WH1A.3 [Triticum aestivum]
  misc_feature (1)..(139): Homolog of NCBI NO: 14916992 NR Description: HISTONE H1
  misc_feature (1)..(139): Homolog of NCBI NO: 5230783 NR Description: histone H1 WH1A.2 [Triticum aestivum]
  misc_feature (1)..(139): Homolog of NCBI NO: 5230790 NR Description: histone H1 WH1A.4 [Triticum aestivum]
  misc_feature (1)..(139): Homolog of NCBI NO: 5230785 NR Description: histone H1 WH1B.1 [Triticum aestivum]
  misc_feature (1)..(139): Homolog of NCBI NO: 11558848 NR Description: histone H1 [Triticum aestivum]
  misc_feature (1)..(127): Homolog of NCBI NO: 121950 NR Description: HISTONE H1 >gi|7439629|pir||S26826 histone H1 -
  misc_feature (1)..(139): Homolog of NCBI NO: 5230790 NR Description: histone H1 WH1A.4 [Triticum aestivum]
  misc_feature (1)..(139): Homolog of NCBI NO: 5230783 NR Description: histone H1 WH1A.2 [Triticum aestivum]
  misc_feature (1)..(139): Homolog of NCBI NO: 14916992 NR Description: HISTONE H1
  misc_feature (1)..(139): Homolog of NCBI NO: 5230788 NR Description: histone H1 WH1A.3 [Triticum aestivum]
  misc_feature (1)..(139): Homolog of NCBI NO: 283024 NR Description: histone H1 - wheat
MVSEAIASLKERTGSSSFAIAKFLEDKHKDKLPPNFRKLLNVQLKKLVAGGKLTKVKNSYKLSSATKPKAAPKKTKTGVKKPKAAAKPKAKSPAKPKPATKPKAAAKPASKPESSSKTQGTSQAQGQACCQGEAQGCRR

SEQ ID NO: 10519 - DNA, 1245 bp, Zea mays subsp. mays
  misc_feature (1)..(1245): Ceres Seq. ID no. 12372214
  misc_feature: MA Experiment ID: 108504 Result: Down-regulated in Transcription
  misc_feature: MA Experiment 108504 PARAMETER Experiment Name: Zm_Drought_P Parameter: Age (day) Value: 8
  misc_feature: MA Experiment 108504 PARAMETER Experiment Name: Zm_Drought_P Parameter: Organism Value: Zea mays
  misc_feature: MA Experiment 108504 PARAMETER Experiment Name: Zm_Drought_P Parameter: Plant Line Value: 35A19
  misc_feature: MA Experiment 108504 PARAMETER Experiment Name: Zm_Drought_P Parameter: Timepoint (hr) Value: 12
  misc_feature: MA Experiment 108504 PARAMETER Experiment Name: Zm_Drought_P Parameter: Tissue Value: Aerial
  misc_feature: MA Experiment 108504 PARAMETER Experiment Name: Zm_Drought_P Parameter: Treatment Value: Drought vs. No Drought
  misc_feature: MA Experiment ID: 108527 Result: Down-regulated in Transcription
  misc_feature: MA Experiment 108527 PARAMETER Experiment Name: Zm_5mM_NO_P Parameter: Age (day) Value: 8
  misc_feature: MA Experiment 108527 PARAMETER Experiment Name: Zm_5mM_NO_P Parameter: Organism Value: Zea mays
  misc_feature: MA Experiment 108527 PARAMETER Experiment Name: Zm_5mM_NO_P Parameter: Plant Line Value: 35A19
  misc_feature: MA Experiment 108527 PARAMETER Experiment Name: Zm_5mM_NO_P Parameter: Timepoint (hr) Value: 6
  misc_feature: MA Experiment 108527 PARAMETER Experiment Name: Zm_5mM_NO_P Parameter: Tissue Value: Aerial
  misc_feature: MA Experiment 108527 PARAMETER Experiment Name: Zm_5mM_NO_P Parameter: Treatment Value: 5mM NO vs. No Treatment
  misc_feature: MA Experiment ID: 108528 Result: Up-regulated in Transcription
  misc_feature: MA Experiment 108528 PARAMETER Experiment Name: Zm_Imbibed_Seeds_P Parameter: Age (day) Value: 5 vs. 2
  misc_feature: MA Experiment 108528 PARAMETER Experiment Name: Zm_Imbibed_Seeds_P Parameter: Organism Value: Zea mays
  misc_feature: MA Experiment 108528 PARAMETER Experiment Name: Zm_Imbibed_Seeds_P Parameter: Plant Line Value: 35A19
  misc_feature: MA Experiment 108528 PARAMETER Experiment Name: Zm_Imbibed_Seeds_P Parameter: Tissue Value: Aerial vs. Embryo
  misc_feature: MA Experiment ID: 108530 Result: Up-regulated in Transcription
  misc_feature: MA Experiment 108530 PARAMETER Experiment Name: Zm_Imbibed_Seeds_P Parameter: Age (day) Value: 6 vs. 2
  misc_feature: MA Experiment 108530 PARAMETER Experiment Name: Zm_Imbibed_Seeds_P Parameter: Organism Value: Zea mays
  misc_feature: MA Experiment 108530 PARAMETER Experiment Name: Zm_Imbibed_Seeds_P Parameter: Plant Line Value: 35A19
  misc_feature: MA Experiment 108530 PARAMETER Experiment Name: Zm_Imbibed_Seeds_P Parameter: Tissue Value: Aerial vs. Embryo
  misc_feature: MA Experiment ID: 108535 Result: Up-regulated in Transcription
  misc_feature: MA Experiment 108535 PARAMETER Experiment Name: Zm_Meristem_P Parameter: Age (day) Value: 8
  misc_feature: MA Experiment 108535 PARAMETER Experiment Name: Zm_Meristem_P Parameter: Organism Value: Zea mays
  misc_feature: MA Experiment 108535 PARAMETER Experiment Name: Zm_Meristem_P Parameter: Plant Line Value: 35A19
  misc_feature: MA Experiment 108535 PARAMETER Experiment Name: Zm_Meristem_P Parameter: Tissue Value: Root Meristem vs. Above Root Meristem
  misc_feature: MA Experiment ID: 108540 Result: Down-regulated in Transcription
  misc_feature: MA Experiment 108540 PARAMETER Experiment Name: Zm_20percent_PEG_P Parameter: Age (day) Value: 8
  misc_feature: MA Experiment 108540 PARAMETER Experiment Name: Zm_20percent_PEG_P Parameter: Organism Value: Zea mays
  misc_feature: MA Experiment 108540 PARAMETER Experiment Name: Zm_20percent_PEG_P Parameter: Plant Line Value: 35A19
  misc_feature: MA Experiment 108540 PARAMETER Experiment Name: Zm_20percent_PEG_P Parameter: Timepoint (hr) Value: 6
  misc_feature: MA Experiment 108540 PARAMETER Experiment Name: Zm_20percent_PEG_P Parameter: Tissue Value: Aerial
  misc_feature: MA Experiment 108540 PARAMETER Experiment Name: Zm_20percent_PEG_P Parameter: Treatment Value: 20percent PEG vs. No Treatment
  misc_feature: MA Experiment ID: 108544 Result: Up-regulated in Transcription
  misc_feature: MA Experiment ID: 108545 Result: Up-regulated in Transcription
  misc_feature: MA Experiment 108545 PARAMETER Experiment Name: Zm_Imbibed_Seeds_P Parameter: Age (day) Value: 3 vs. 2
  misc_feature: MA Experiment 108545 PARAMETER Experiment Name: Zm_Imbibed_Seeds_P Parameter: Organism Value: Zea mays
  misc_feature: MA Experiment 108545 PARAMETER Experiment Name: Zm_Imbibed_Seeds_P Parameter: Plant Line Value: 35A19
  misc_feature: MA Experiment 108545 PARAMETER Experiment Name: Zm_Imbibed_Seeds_P Parameter: Tissue Value: Aerial vs. Embryo
  misc_feature: MA Experiment ID: 108547 Result: Up-regulated in Transcription
  misc_feature: MA Experiment 108547 PARAMETER Experiment Name: Zm_Imbibed_Seeds_P Parameter: Age (day) Value: 4 vs. 2
  misc_feature: MA Experiment 108547 PARAMETER Experiment Name: Zm_Imbibed_Seeds_P Parameter: Organism Value: Zea mays
  misc_feature: MA Experiment 108547 PARAMETER Experiment Name: Zm_Imbibed_Seeds_P Parameter: Plant Line Value: 35A19
  misc_feature: MA Experiment 108547 PARAMETER Experiment Name: Zm_Imbibed_Seeds_P Parameter: Tissue Value: Aerial vs. Embryo
  misc_feature: MA Experiment ID: 108556 Result: Down-regulated in Transcription
  misc_feature: MA Experiment 108556 PARAMETER Experiment Name: Zm_Drought_P Parameter: Age (day) Value: 9
  misc_feature: MA Experiment 108556 PARAMETER Experiment Name: Zm_Drought_P Parameter: Organism Value: Zea mays
  misc_feature: MA Experiment 108556 PARAMETER Experiment Name: Zm_Drought_P Parameter: Plant Line Value: 35A19
  misc_feature: MA Experiment 108556 PARAMETER Experiment Name: Zm_Drought_P Parameter: Timepoint (hr) Value: 24
  misc_feature: MA Experiment 108556 PARAMETER Experiment Name: Zm_Drought_P Parameter: Tissue Value: Aerial
  misc_feature: MA Experiment 108556 PARAMETER Experiment Name: Zm_Drought_P Parameter: Treatment Value: Drought vs. No Drought
  misc_feature: MA Experiment ID: 108559 Result: Down-regulated in Transcription
  misc_feature: MA Experiment 108559 PARAMETER Experiment Name: Zm_5mM_NO_P Parameter: Age (day) Value: 8
  misc_feature: MA Experiment 108559 PARAMETER Experiment Name: Zm_5mM_NO_P Parameter: Organism Value: Zea mays
  misc_feature: MA Experiment 108559 PARAMETER Experiment Name: Zm_5mM_NO_P Parameter: Plant Line Value: 35A19
  misc_feature: MA Experiment 108559 PARAMETER Experiment Name: Zm_5mM_NO_P Parameter: Timepoint (hr) Value: 12
  misc_feature: MA Experiment 108559 PARAMETER Experiment Name: Zm_5mM_NO_P Parameter: Tissue Value: Aerial
  misc_feature: MA Experiment 108559 PARAMETER Experiment Name: Zm_5mM_NO_P Parameter: Treatment Value: 5mM NO vs. No Treatment
  misc_feature: MA Experiment ID: 108597 Result: Down-regulated in Transcription
  misc_feature: MA Experiment 108597 PARAMETER Experiment Name: Zm_100uM_ABA_P Parameter: Age (day) Value: 9
  misc_feature: MA Experiment 108597 PARAMETER Experiment Name: Zm_100uM_ABA_P Parameter: Organism Value: Zea mays
  misc_feature: MA Experiment 108597 PARAMETER Experiment Name: Zm_100uM_ABA_P Parameter: Plant Line Value: 35A19
  misc_feature: MA Experiment 108597 PARAMETER Experiment Name: Zm_100uM_ABA_P Parameter: Timepoint (hr) Value: 24
  misc_feature: MA Experiment 108597 PARAMETER Experiment Name: Zm_100uM_ABA_P Parameter: Tissue Value: Aerial
  misc_feature: MA Experiment 108597 PARAMETER Experiment Name: Zm_100uM_ABA_P Parameter: Treatment Value: 100uM ABA vs. No Treatment
  misc_feature: MA Experiment ID: 108687 Result: Down-regulated in Transcription
  misc_feature: MA Experiment 108687 PARAMETER Experiment Name: Zm_Embryos-Flowers__P Parameter: Tissue Value: Embryo vs. Aerial+
  misc_feature: MA Experiment ID: 108689 Result: Down-regulated in Transcription
  misc_feature: MA Experiment 108689 PARAMETER Experiment Name: Zm_Drought_Roots_P Parameter: Age (day) Value: 9
  misc_feature: MA Experiment 108689 PARAMETER Experiment Name: Zm_Drought_Roots_P Parameter: Organism Value: Zea mays
  misc_feature: MA Experiment 108689 PARAMETER Experiment Name: Zm_Drought_Roots_P Parameter: Plant Line Value: 35A19
  misc_feature: MA Experiment 108689 PARAMETER Experiment Name: Zm_Drought_Roots_P Parameter: Timepoint (hr) Value: 24
  misc_feature: MA Experiment 108689 PARAMETER Experiment Name: Zm_Drought_Roots_P Parameter: Tissue Value: Roots
  misc_feature: MA Experiment 108689 PARAMETER Experiment Name: Zm_Drought_Roots_P Parameter: Treatment Value: Drought vs. No Drought
  misc_feature: MA Experiment ID: 20000477 Result: Down-regulated in Transcription
  misc_feature: MA Experiment 20000477 PARAMETER Experiment Name: Zm_5mM_SA_P Parameter: Age (day) Value: 10
  misc_feature: MA Experiment 20000477 PARAMETER Experiment Name: Zm_5mM_SA_P Parameter: Organism Value: Zea mays
  misc_feature: MA Experiment 20000477 PARAMETER Experiment Name: Zm_5mM_SA_P Parameter: Plant Line Value: 35A19
  misc_feature: MA Experiment 20000477 PARAMETER Experiment Name: Zm_5mM_SA_P Parameter: Timepoint (hr) Value: 48
  misc_feature: MA Experiment 20000477 PARAMETER Experiment Name: Zm_5mM_SA_P Parameter: Tissue Value: Aerial
  misc_feature: MA Experiment 20000477 PARAMETER Experiment Name: Zm_5mM_SA_P Parameter: Treatment Value: 5mM SA vs. No Treatment
  misc_feature: MA Experiment ID: 20000479 Result: Down-regulated in Transcription
  misc_feature: MA Experiment 20000479 PARAMETER Experiment Name: Zm_Drought_P Parameter: Age (day) Value: 10
  misc_feature: MA Experiment 20000479 PARAMETER Experiment Name: Zm_Drought_P Parameter: Organism Value: Zea mays
  misc_feature: MA Experiment 20000479 PARAMETER Experiment Name: Zm_Drought_P Parameter: Plant Line Value: 35A19
  misc_feature: MA Experiment 20000479 PARAMETER Experiment Name: Zm_Drought_P Parameter: Timepoint (hr) Value: 48
  misc_feature: MA Experiment 20000479 PARAMETER Experiment Name: Zm_Drought_P Parameter: Tissue Value: Aerial
  misc_feature: MA Experiment 20000479 PARAMETER Experiment Name: Zm_Drought_P Parameter: Treatment Value: Drought vs. No Drought
  misc_feature: MA Experiment ID: 20000480 Result: Down-regulated in Transcription
  misc_feature: MA Experiment 20000480 PARAMETER Experiment Name: Zm_Drought_P Parameter: Age (day) Value: 11
  misc_feature: MA Experiment 20000480 PARAMETER Experiment Name: Zm_Drought_P Parameter: Organism Value: Zea mays
  misc_feature: MA Experiment 20000480 PARAMETER Experiment Name: Zm_Drought_P Parameter: Plant Line Value: 35A19
  misc_feature: MA Experiment 20000480 PARAMETER Experiment Name: Zm_Drought_P Parameter: Timepoint (hr) Value: 72
  misc_feature: MA Experiment 20000480 PARAMETER Experiment Name: Zm_Drought_P Parameter: Tissue Value: Aerial
  misc_feature: MA Experiment 20000480 PARAMETER Experiment Name: Zm_Drought_P Parameter: Treatment Value: Drought vs. No Drought
  misc_feature: MA Experiment ID: 20000626 Result: Down-regulated in Transcription
  misc_feature: MA Experiment 20000626 PARAMETER Experiment Name: Zm_Herbicide-Treatments_P Parameter: Timepoint (hr) Value: 12
  misc_feature: MA Experiment 20000626 PARAMETER Experiment Name: Zm_Herbicide-Treatments_P Parameter: Tissue Value: Aerial
  misc_feature: MA Experiment 20000626 PARAMETER Experiment Name: Zm_Herbicide-Treatments_P Parameter: Treatment Value: Roundup vs. No Treatment
attgattccagcgatttggccggggtcagtagctaacgttccatcccagaaaaccccatcttatcataggaagtctaccagttttgccaccaaggtcacaccatccaccacggccatggagtccggcgcagacgaggtggcgttcgagtccccggcacatttccgcatctacaagagcgggaggatcgagcgcctgaaccggcccccggtccttcccgccggcctcgacgaggccaccggtgtcacctcaaaggacgtcgtcctggacgccggcaccggcctttccgtacgcatctacctccccaagctccaggaaccatccaagaagctcccggtcctcgtctacttccacggcggcgcgttcctcctcgagtcggccggctctgccacgtaccacacctacgtcaacccactcgcagccgccgcgggcgtcctggtggtgtccgtggactaccgcctggcaccggagcacccggtcccggcggcctacgaggactcgtgggccgcgctccagtgggtgacgtcggcgcaggacgagtggatcgtcgagcacggcgacacggcgcggctcttcctcgccggcgacagcgccggcgcaaacatcgtgcacgacatgctgatgcgggcgtccggcgccggcgggccgcgcgtcgagggcgccatcctgctccacccgtggttcggcgggaacgcgcccatcgagggcgagccggagggtgccgcagcggccaccgctgggctctggacctacgcgtgcccgggcgcggtcggcggcgccgacgacccgaggatgaaccctctcgcgccgggcgcgccgccgctggagaggctcgggtgcgcgaggatgctggtgtgcgccgggaagaaggacgcgctctacgtgagggaccgcgcgtactatgaagccgtggcggccagcgcgtggcccggggacgtggcgtggctcgagtccgaaggagaggagcacgtcttcttcctcccgaagcccgagtgcgagaacgccaagctgctcatggaccgcgtcgtggccttcattgccggggcctgacttgctctcttgtggccttgttggcgcggcaccgcgcgacgcagcatcaggtcgccattgaagatttaagttgtggacttgtgggcaagtttctctcgctgaatattggtcttgtctaaatttttttctggtacaagtgtggtactgaagtcttgaaactgattttttaataagcaaactataagtccacattattc

SEQ ID NO: 10520 - protein, 348 aa, Zea mays subsp. mays
  peptide (1)..(348): Ceres Seq. ID no. 12372215
  misc_feature (98)..(155): Pfam Name: Carboxylesterase Pfam Description: Carboxylesterase
  misc_feature (44)..(346): Homolog of NCBI NO: 38344841 NR Description: OSJNBa0064H22.22 [Oryza sativa (japonica
  misc_feature (45)..(347): Homolog of NCBI NO: 18086341 NR Description: AT3g48690/T8P19_200 [Arabidopsis thaliana]
  misc_feature (45)..(347): Homolog of NCBI NO: 15228425 NR Description: putative protein; protein id: At3g48690.1, by cDNA: gi_18086340 [Arabidopsis thaliana]
  misc_feature (39)..(345): Homolog of NCBI NO: 18401743 NR Description: expressed protein; protein id: At1g47480.1, by cDNA: 111056. [Arabidopsis thaliana] >gi|25405208|pir||A96515
  misc_feature (39)..(345): Homolog of NCBI NO: 21536771 NR Description: unknown [Arabidopsis thaliana]
  misc_feature (45)..(347): Homolog of NCBI NO: 15228426 NR Description: putative protein; protein id: At3g48700.1
  misc_feature (33)..(347): Homolog of NCBI NO: 21537287 NR Description: putative esterase [Arabidopsis thaliana]
  misc_feature (33)..(347): Homolog of NCBI NO: 18402731 NR Description: expressed protein; protein id: At1g49650.1, by cDNA: 12638. [Arabidopsis thaliana]
  misc_feature (46)..(345): Homolog of NCBI NO: 15227669 NR Description: putative esterase; protein id: At2g03550.1
  misc_feature (46)..(345): Homolog of NCBI NO: 28393060 NR Description: putative esterase [Arabidopsis thaliana]
LIPAIWPGSVANVPSQKTPSYHRKSTSFATKVTPSTTAMESGADEVAFESPAHFRIYKSGRIERLNRPPVLPAGLDEATGVTSKDVVLDAGTGLSVRIYLPKLQEPSKKLPVLVYFHGGAFLLESAGSATYHTYVNPLAAAAGVLVVSVDYRLAPEHPVPAAYEDSWAALQWVTSAQDEWIVEHGDTARLFLAGDSAGANIVHDMLMRASGAGGPRVEGAILLHPWFGGNAPIEGEPEGAAAATAGLWTYACPGAVGGADDPRMNPLAPGAPPLERLGCARMLVCAGKKDALYVRDRAYYEAVAASAWPGDVAWLESEGEEHVFFLPKPECENAKLLMDRVVAFIAGA

SEQ ID NO: 10521 - protein, 310 aa, Zea mays subsp. mays
  peptide (1)..(310): Ceres Seq. ID no. 12372216
  misc_feature (60)..(117): Pfam Name: Carboxylesterase Pfam Description: Carboxylesterase
  misc_feature (6)..(308): Homolog of NCBI NO: 38344841 NR Description: OSJNBa0064H22.22 [Oryza sativa (japonica
  misc_feature (7)..(309): Homolog of NCBI NO: 18086341 NR Description: AT3g48690/T8P19_200 [Arabidopsis thaliana]
  misc_feature (7)..(309): Homolog of NCBI NO: 15228425 NR Description: putative protein; protein id: At3g48690.1, by cDNA: gi_18086340 [Arabidopsis thaliana]
  misc_feature (1)..(307): Homolog of NCBI NO: 18401743 NR Description: expressed protein; protein id: At1g47480.1, by cDNA: 111056. [Arabidopsis thaliana] >gi|25405208|pir||A96515
  misc_feature (1)..(307): Homolog of NCBI NO: 21536771 NR Description: unknown [Arabidopsis thaliana]
  misc_feature (7)..(309): Homolog of NCBI NO: 15228426 NR Description: putative protein; protein id: At3g48700.1
  misc_feature (1)..(309): Homolog of NCBI NO: 21537287 NR Description: putative esterase [Arabidopsis thaliana]
  misc_feature (1)..(309): Homolog of NCBI NO: 18402731 NR Description: expressed protein; protein id: At1g49650.1, by cDNA: 12638. [Arabidopsis thaliana]
  misc_feature (8)..(307): Homolog of NCBI NO: 15227669 NR Description: putative esterase; protein id: At2g03550.1
  misc_feature (8)..(307): Homolog of NCBI NO: 28393060 NR Description: putative esterase [Arabidopsis thaliana]
MESGADEVAFESPAHFRIYKSGRIERLNRPPVLPAGLDEATGVTSKDVVLDAGTGLSVRIYLPKLQEPSKKLPVLVYFHGGAFLLESAGSATYHTYVNPLAAAAGVLVVSVDYRLAPEHPVPAAYEDSWAALQWVTSAQDEWIVEHGDTARLFLAGDSAGANIVHDMLMRASGAGGPRVEGAILLHPWFGGNAPIEGEPEGAAAATAGLWTYACPGAVGGADDPRMNPLAPGAPPLERLGCARMLVCAGKKDALYVRDRAYYEAVAASAWPGDVAWLESEGEEHVFFLPKPECENAKLLMDRVVAFIAGA

SEQ ID NO: 10522 - DNA, 1049 bp, Zea mays subsp. mays; identical to SEQ ID NO: 10272
  misc_feature (1)..(1049): Ceres Seq. ID no. 12345528
  misc_feature: MA Experiment ID: 108527 Result: Up-regulated in Transcription
  misc_feature: MA Experiment 108527 PARAMETER Experiment Name: Zm_5mM_NO_P Parameter: Age (day) Value: 8
  misc_feature: MA Experiment 108527 PARAMETER Experiment Name: Zm_5mM_NO_P Parameter: Organism Value: Zea mays
  misc_feature: MA Experiment 108527 PARAMETER Experiment Name: Zm_5mM_NO_P Parameter: Plant Line Value: 35A19
  misc_feature: MA Experiment 108527 PARAMETER Experiment Name: Zm_5mM_NO_P Parameter: Timepoint (hr) Value: 6
  misc_feature: MA Experiment 108527 PARAMETER Experiment Name: Zm_5mM_NO_P Parameter: Tissue Value: Aerial
  misc_feature: MA Experiment 108527 PARAMETER Experiment Name: Zm_5mM_NO_P Parameter: Treatment Value: 5mM NO vs. No Treatment
  misc_feature: MA Experiment ID: 108535 Result: Up-regulated in Transcription
  misc_feature: MA Experiment 108535 PARAMETER Experiment Name: Zm_Meristem_P Parameter: Age (day) Value: 8
  misc_feature: MA Experiment 108535 PARAMETER Experiment Name: Zm_Meristem_P Parameter: Organism Value: Zea mays
  misc_feature: MA Experiment 108535 PARAMETER Experiment Name: Zm_Meristem_P Parameter: Plant Line Value: 35A19
  misc_feature: MA Experiment 108535 PARAMETER Experiment Name: Zm_Meristem_P Parameter: Tissue Value: Root Meristem vs. Above Root Meristem
  misc_feature: MA Experiment ID: 108543 Result: Down-regulated in Transcription
  misc_feature: MA Experiment ID: 108544 Result: Down-regulated in Transcription
  misc_feature: MA Experiment ID: 108547 Result: Down-regulated in Transcription
  misc_feature: MA Experiment 108547 PARAMETER Experiment Name: Zm_Imbibed_Seeds_P Parameter: Age (day) Value: 4 vs. 2
  misc_feature: MA Experiment 108547 PARAMETER Experiment Name: Zm_Imbibed_Seeds_P Parameter: Organism Value: Zea mays
  misc_feature: MA Experiment 108547 PARAMETER Experiment Name: Zm_Imbibed_Seeds_P Parameter: Plant Line Value: 35A19
  misc_feature: MA Experiment 108547 PARAMETER Experiment Name: Zm_Imbibed_Seeds_P Parameter: Tissue Value: Aerial vs. Embryo
  misc_feature: MA Experiment ID: 20000487 Result: Up-regulated in Transcription
  misc_feature: MA Experiment 20000487 PARAMETER Experiment Name: Zm_50mM_NH4NO3_L_to_H_P Parameter: Organism Value: Zea mays
  misc_feature: MA Experiment 20000487 PARAMETER Experiment Name: Zm_50mM_NH4NO3_L_to_H_P Parameter: Timepoint (hr) Value: 4
  misc_feature: MA Experiment 20000487 PARAMETER Experiment Name: Zm_50mM_NH4NO3_L_to_H_P Parameter: Tissue Value: Leaves
  misc_feature: MA Experiment 20000487 PARAMETER Experiment Name: Zm_50mM_NH4NO3_L_to_H_P Parameter: Treatment Value: 50mM NH4NO3 vs. 100mM Mannitol
  misc_feature: MA Experiment ID: 20000488 Result: Up-regulated in Transcription
  misc_feature: MA Experiment 20000488 PARAMETER Experiment Name: Zm_50mM_NH4NO3_L_to_H_P Parameter: Organism Value: Zea mays
  misc_feature: MA Experiment 20000488 PARAMETER Experiment Name: Zm_50mM_NH4NO3_L_to_H_P Parameter: Timepoint (hr) Value: 8
  misc_feature: MA Experiment 20000488 PARAMETER Experiment Name: Zm_50mM_NH4NO3_L_to_H_P Parameter: Tissue Value: Leaves
  misc_feature: MA Experiment 20000488 PARAMETER Experiment Name: Zm_50mM_NH4NO3_L_to_H_P Parameter: Treatment Value: 50mM NH4NO3 vs. 100mM Mannitol
  misc_feature: MA Experiment ID: 20000626 Result: Up-regulated in Transcription
  misc_feature: MA Experiment 20000626 PARAMETER Experiment Name: Zm_Herbicide-Treatments_P Parameter: Timepoint (hr) Value: 12
  misc_feature: MA Experiment 20000626 PARAMETER Experiment Name: Zm_Herbicide-Treatments_P Parameter: Tissue Value: Aerial
  misc_feature: MA Experiment 20000626 PARAMETER Experiment Name: Zm_Herbicide-Treatments_P Parameter: Treatment Value: Roundup vs. No Treatment

SEQ ID NO: 10523 - protein, 192 aa, Zea mays subsp. mays; identical to SEQ ID NO: 10273
  peptide (1)..(192): Ceres Seq. ID no. 12345529
  misc_feature (54)..(185): Pfam Name: Tim17/Tim22/Tim23 family Pfam Description: Tim17/Tim22/Tim23 family
  misc_feature (54)..(185): Pfam Name: Tim17/Tim22/Tim23 family Pfam Description: Tim17/Tim22/Tim23 family
  misc_feature (54)..(185): Pfam Name: Tim17/Tim22/Tim23 family Pfam Description: Tim17/Tim22/Tim23 family
  misc_feature (54)..(185): Pfam Name: Tim17/Tim22/Tim23 family Pfam Description: Tim17/Tim22/Tim23 family
  misc_feature (1)..(192): Homolog of NCBI NO: 37536126 NR Description: putaive mitochondrial inner membrane protein
  misc_feature (1)..(189): Homolog of NCBI NO: 34902184 NR Description: Putative mitochondrial inner membrane protein
  misc_feature (11)..(191): Homolog of NCBI NO: 15218593 NR Description: inner mitochondrial membrane protein; protein id: supported by cDNA: 6793., supported by cDNA: gi_14596208, by cDNA: gi_18377493, supported by cDNA: gi_603055 [Arabidopsis
  misc_feature (11)..(191): Homolog of NCBI NO: 18394498 NR Description: inner mitochondrial membrane protein, putative; id: At1g17530.1, supported by cDNA: gi_13641345, supported by gi_15010569, supported by cDNA: gi_20147386 [Arabidopsis
  misc_feature (11)..(191): Homolog of NCBI NO: 13641346 NR Description: translocase of inner mitochondrial membrane TIM23
  misc_feature (1)..(189): Homolog of NCBI NO: 34902184 NR Description: Putative mitochondrial inner membrane protein
  misc_feature (11)..(191): Homolog of NCBI NO: 18394498 NR Description: inner mitochondrial membrane protein, putative; id: At1g17530.1, supported by cDNA: gi_13641345, supported by gi_15010569, supported by cDNA: gi_20147386 [Arabidopsis
  misc_feature (11)..(191): Homolog of NCBI NO: 15218593 NR Description: inner mitochondrial membrane protein; protein id: supported by cDNA: 6793., supported by cDNA: gi_14596208, by cDNA: gi_18377493, supported by cDNA: gi_603055 [Arabidopsis
  misc_feature (1)..(189): Homolog of NCBI NO: 34902184 NR Description: Putative mitochondrial inner membrane protein
  misc_feature (1)..(192): Homolog of NCBI NO: 37536126 NR Description: putaive mitochondrial inner membrane protein
  misc_feature (90)..(188): Homolog of NCBI NO: 34394286 NR Description: hypothetical protein [Oryza sativa (japonica
  misc_feature (127)..(189): Homolog of NCBI NO: 12039278 NR Description: putative inner mitochondrial membrane protein
  misc_feature (23)..(187): Homolog of NCBI NO: 19075496 NR Description: putative mitochondrial import inner membrane subunit [Schizosaccharomyces pombe] Probable mitochondrial import inner membrane translocase subunit
  misc_feature (8)..(99): Homolog of NCBI NO: 38344267 NR Description: OSJNBa0005N02.5 [Oryza sativa (japonica
  misc_feature (1)..(191): Homolog of NCBI NO: 15229350 NR Description: putative inner mitochondrial membrane protein; id: At3g04800.1 [Arabidopsis thaliana] putative inner mitochondrial membrane protein [Arabidopsis
  misc_feature (11)..(191): Homolog of NCBI NO: 13641346 NR Description: translocase of inner mitochondrial membrane TIM23
  misc_feature (90)..(188): Homolog of NCBI NO: 34394286 NR Description: hypothetical protein [Oryza sativa (japonica
  misc_feature (127)..(189): Homolog of NCBI NO: 12039278 NR Description: putative inner mitochondrial membrane protein
  misc_feature (23)..(187): Homolog of NCBI NO: 19075496 NR Description: putative mitochondrial import inner membrane subunit [Schizosaccharomyces pombe] Probable mitochondrial import inner membrane translocase subunit
  misc_feature (8)..(99): Homolog of NCBI NO: 38344267 NR Description: OSJNBa0005N02.5 [Oryza sativa (japonica
  misc_feature (1)..(191): Homolog of NCBI NO: 15229350 NR Description: putative inner mitochondrial membrane protein; id: At3g04800.1 [Arabidopsis thaliana] putative inner mitochondrial membrane protein [Arabidopsis
  misc_feature (11)..(191): Homolog of NCBI NO: 13641346 NR Description: translocase of inner mitochondrial membrane TIM23
  misc_feature (11)..(191): Homolog of NCBI NO: 18394498 NR Description: inner mitochondrial membrane protein, putative; id: At1g17530.1, supported by cDNA: gi_13641345, supported by gi_15010569, supported by cDNA: gi_20147386 [Arabidopsis
  misc_feature (11)..(191): Homolog of NCBI NO: 15218593 NR Description: inner mitochondrial membrane protein; protein id: supported by cDNA: 6793., supported by cDNA: gi_14596208, by cDNA: gi_18377493, supported by cDNA: gi_603055 [Arabidopsis
  misc_feature (1)..(189): Homolog of NCBI NO: 34902184 NR Description: Putative mitochondrial inner membrane protein
  misc_feature (1)..(192): Homolog of NCBI NO: 37536126 NR Description: putaive mitochondrial inner membrane protein
  misc_feature (90)..(188): Homolog of NCBI NO: 34394286 NR Description: hypothetical protein [Oryza sativa (japonica
  misc_feature (127)..(189): Homolog of NCBI NO: 12039278 NR Description: putative inner mitochondrial membrane protein
  misc_feature (23)..(187): Homolog of NCBI NO: 19075496 NR Description: putative mitochondrial import inner membrane subunit [Schizosaccharomyces pombe] Probable mitochondrial import inner membrane translocase subunit
  misc_feature (8)..(99): Homolog of NCBI NO: 38344267 NR Description: OSJNBa0005N02.5 [Oryza sativa (japonica
  misc_feature (1)..(191): Homolog of NCBI NO: 15229350 NR Description: putative inner mitochondrial membrane protein; id: At3g04800.1 [Arabidopsis thaliana] putative inner mitochondrial membrane protein [Arabidopsis
  misc_feature (11)..(191): Homolog of NCBI NO: 13641346 NR Description: translocase of inner mitochondrial membrane TIM23
  misc_feature (11)..(191): Homolog of NCBI NO: 18394498 NR Description: inner mitochondrial membrane protein, putative; id: At1g17530.1, supported by cDNA: gi_13641345, supported by gi_15010569, supported by cDNA: gi_20147386 [Arabidopsis
  misc_feature (11)..(191): Homolog of NCBI NO: 15218593 NR Description: inner mitochondrial membrane protein; protein id: supported by cDNA: 6793., supported by cDNA: gi_14596208, by cDNA: gi_18377493, supported by cDNA: gi_603055 [Arabidopsis
  misc_feature (1)..(192): Homolog of NCBI NO: 37536126 NR Description: putaive mitochondrial inner membrane protein
  misc_feature (1)..(191): Homolog of NCBI NO: 15229350 NR Description: putative inner mitochondrial membrane protein; id: At3g04800.1 [Arabidopsis thaliana] putative inner mitochondrial membrane protein [Arabidopsis
  misc_feature (8)..(99): Homolog of NCBI NO: 38344267 NR Description: OSJNBa0005N02.5 [Oryza sativa (japonica
  misc_feature (23)..(187): Homolog of NCBI NO: 19075496 NR Description: putative mitochondrial import inner membrane subunit [Schizosaccharomyces pombe] Probable mitochondrial import inner membrane translocase subunit
  misc_feature (127)..(189): Homolog of NCBI NO: 12039278 NR Description: putative inner mitochondrial membrane protein
  misc_feature (90)..(188): Homolog of NCBI NO: 34394286 NR Description: hypothetical protein [Oryza sativa (japonica

SEQ ID NO: 10524 - protein, 187 aa, Zea mays subsp. mays; identical to SEQ ID NO: 10274
  peptide (1)..(187): Ceres Seq. ID no. 12345530
  misc_feature (49)..(180): Pfam Name: Tim17/Tim22/Tim23 family Pfam Description: Tim17/Tim22/Tim23 family
  misc_feature (49)..(180): Pfam Name: Tim17/Tim22/Tim23 family Pfam Description: Tim17/Tim22/Tim23 family
  misc_feature (49)..(180): Pfam Name: Tim17/Tim22/Tim23 family Pfam Description: Tim17/Tim22/Tim23 family
  misc_feature (49)..(180): Pfam Name: Tim17/Tim22/Tim23 family Pfam Description: Tim17/Tim22/Tim23 family
  misc_feature (1)..(187): Homolog of NCBI NO: 37536126 NR Description: putaive mitochondrial inner membrane protein
  misc_feature (1)..(184): Homolog of NCBI NO: 34902184 NR Description: Putative mitochondrial inner membrane protein
  misc_feature (6)..(186): Homolog of NCBI NO: 15218593 NR Description: inner mitochondrial membrane protein; protein id: supported by cDNA: 6793., supported by cDNA: gi_14596208, by cDNA: gi_18377493, supported by cDNA: gi_603055 [Arabidopsis
  misc_feature (6)..(186): Homolog of NCBI NO: 18394498 NR Description: inner mitochondrial membrane protein, putative; id: At1g17530.1, supported by cDNA: gi_13641345, supported by gi_15010569, supported by cDNA: gi_20147386 [Arabidopsis
  misc_feature (6)..(186): Homolog of NCBI NO: 13641346 NR Description: translocase of inner mitochondrial membrane TIM23
  misc_feature (1)..(184): Homolog of NCBI NO: 34902184 NR Description: Putative mitochondrial inner membrane protein
  misc_feature (6)..(186): Homolog of NCBI NO: 18394498 NR Description: inner mitochondrial membrane protein, putative; id: At1g17530.1, supported by cDNA: gi_13641345, supported by gi_15010569, supported by cDNA: gi_20147386 [Arabidopsis
  misc_feature (1)..(184): Homolog of NCBI NO: 34902184 NR Description: Putative mitochondrial inner membrane protein
  misc_feature (1)..(187): Homolog of NCBI NO: 37536126 NR Description: putaive mitochondrial inner membrane protein
  misc_feature (85)..(183): Homolog of NCBI NO: 34394286 NR Description: hypothetical protein [Oryza sativa (japonica
  misc_feature (85)..(183): Homolog of NCBI NO: 34394286 NR Description: hypothetical protein [Oryza sativa (japonica
  misc_feature (122)..(184): Homolog of NCBI NO: 12039278 NR Description: putative inner mitochondrial membrane protein
  misc_feature (18)..(182): Homolog of NCBI NO: 19075496 NR Description: putative mitochondrial import inner membrane subunit [Schizosaccharomyces pombe] Probable mitochondrial import inner membrane translocase subunit
  misc_feature (3)..(94): Homolog of NCBI NO: 38344267 NR Description: OSJNBa0005N02.5 [Oryza sativa (japonica
  misc_feature (1)..(186): Homolog of NCBI NO: 15229350 NR Description: putative inner mitochondrial membrane protein; id: At3g04800.1 [Arabidopsis thaliana] putative inner mitochondrial membrane protein [Arabidopsis
  misc_feature (6)..(186): Homolog of NCBI NO: 13641346 NR Description: translocase of inner mitochondrial membrane TIM23
  misc_feature (122)..(184): Homolog of NCBI NO: 12039278 NR Description: putative inner mitochondrial membrane protein
  misc_feature (18)..(182): Homolog of NCBI NO: 19075496 NR Description: putative mitochondrial import inner membrane subunit [Schizosaccharomyces pombe] Probable mitochondrial import inner membrane translocase subunit
  misc_feature (3)..(94): Homolog of NCBI NO: 38344267 NR Description: OSJNBa0005N02.5 [Oryza sativa (japonica
  misc_feature (1)..(186): Homolog of NCBI NO: 15229350 NR Description: putative inner mitochondrial membrane protein; id: At3g04800.1 [Arabidopsis thaliana] putative inner mitochondrial membrane protein [Arabidopsis
  misc_feature (6)..(186): Homolog of NCBI NO: 13641346 NR Description: translocase of inner mitochondrial membrane TIM23
  misc_feature (6)..(186): Homolog of NCBI NO: 18394498 NR Description: inner mitochondrial membrane protein, putative; id: At1g17530.1, supported by cDNA: gi_13641345, supported by gi_15010569, supported by cDNA: gi_20147386 [Arabidopsis
  misc_feature (6)..(186): Homolog of NCBI NO: 15218593 NR Description: inner mitochondrial membrane protein; protein id: supported by cDNA: 6793., supported by cDNA: gi_14596208, by cDNA: gi_18377493, supported by cDNA: gi_603055 [Arabidopsis
  misc_feature (1)..(184): Homolog of NCBI NO: 34902184 NR Description: Putative mitochondrial inner membrane protein
  misc_feature (1)..(187): Homolog of NCBI NO: 37536126 NR Description: putaive mitochondrial inner membrane protein
  misc_feature (85)..(183): Homolog of NCBI NO: 34394286 NR Description: hypothetical protein [Oryza sativa (japonica
  misc_feature (122)..(184): Homolog of NCBI NO: 12039278 NR Description: putative inner mitochondrial membrane protein
  misc_feature (18)..(182): Homolog of NCBI NO: 19075496 NR Description: putative mitochondrial import inner membrane subunit [Schizosaccharomyces pombe] Probable mitochondrial import inner membrane translocase subunit
  misc_feature (3)..(94): Homolog of NCBI NO: 38344267 NR Description: OSJNBa0005N02.5 [Oryza sativa (japonica
  misc_feature (1)..(186): Homolog of NCBI NO: 15229350 NR Description: putative inner mitochondrial membrane protein; id: At3g04800.1 [Arabidopsis thaliana] putative inner mitochondrial membrane protein [Arabidopsis
  misc_feature (6)..(186): Homolog of NCBI NO: 13641346 NR Description: translocase of inner mitochondrial membrane TIM23
  misc_feature (6)..(186): Homolog of NCBI NO: 18394498 NR Description: inner mitochondrial membrane protein, putative; id: At1g17530.1, supported by cDNA: gi_13641345, supported by gi_15010569, supported by cDNA: gi_20147386 [Arabidopsis
  misc_feature (6)..(186): Homolog of NCBI NO: 15218593 NR Description: inner mitochondrial membrane protein; protein id: supported by cDNA: 6793., supported by cDNA: gi_14596208, by cDNA: gi_18377493, supported by cDNA: gi_603055 [Arabidopsis
  misc_feature (6)..(186): Homolog of NCBI NO: 15218593 NR Description: inner mitochondrial membrane protein; protein id: supported by cDNA: 6793., supported by cDNA: gi_14596208, by cDNA: gi_18377493, supported by cDNA: gi_603055 [Arabidopsis
  misc_feature (1)..(187): Homolog of NCBI NO: 37536126 NR Description: putaive mitochondrial inner membrane protein
  misc_feature (1)..(186): Homolog of NCBI NO: 15229350 NR Description: putative inner mitochondrial membrane protein; id: At3g04800.1 [Arabidopsis thaliana] putative inner mitochondrial membrane protein [Arabidopsis
  misc_feature (3)..(94): Homolog of NCBI NO: 38344267 NR Description: OSJNBa0005N02.5 [Oryza sativa (japonica
  misc_feature (18)..(182): Homolog of NCBI NO: 19075496 NR Description: putative mitochondrial import inner membrane subunit [Schizosaccharomyces pombe] Probable mitochondrial import inner membrane translocase subunit
  misc_feature (122)..(184): Homolog of NCBI NO: 12039278 NR Description: putative inner mitochondrial membrane protein
  misc_feature (85)..(183): Homolog of NCBI NO: 34394286 NR Description: hypothetical protein [Oryza sativa (japonica

SEQ ID NO: 10525 - protein, 177 aa, Zea mays subsp. mays; identical to SEQ ID NO: 10275
  peptide (1)..(177): Ceres Seq. ID no. 12345531
  misc_feature (21)..(121): Pfam Name: Mucin-like glycoprotein Pfam Description: Mucin-like glycoprotein
  misc_feature (21)..(121): Pfam Name: Mucin-like glycoprotein Pfam Description: Mucin-like glycoprotein
  misc_feature (21)..(121): Pfam Name: Mucin-like glycoprotein Pfam Description: Mucin-like glycoprotein
  misc_feature (21)..(121): Pfam Name: Mucin-like glycoprotein Pfam Description: Mucin-like glycoprotein
  misc_feature (3)..(177): Homolog of NCBI NO: 27375632 NR Description: blr0521 [Bradyrhizobium japonicum]
  misc_feature (3)..(177): Homolog of NCBI NO: 27375632 NR Description: blr0521 [Bradyrhizobium japonicum]
  misc_feature (3)..(177): Homolog of NCBI NO: 27375632 NR Description: blr0521 [Bradyrhizobium japonicum]
  misc_feature (3)..(177): Homolog of NCBI NO: 27375632 NR Description: blr0521 [Bradyrhizobium japonicum]
  misc_feature (9)..(177): Homolog of NCBI NO: 186396 NR Description: mucin
  misc_feature (9)..(177): Homolog of NCBI NO: 188864 NR Description: mucin
  misc_feature (9)..(177): Homolog of NCBI NO: 186396 NR Description: mucin
  misc_feature (9)..(177): Homolog of NCBI NO: 188864 NR Description: mucin
  misc_feature (9)..(177): Homolog of NCBI NO: 186396 NR Description: mucin
  misc_feature (9)..(177): Homolog of NCBI NO: 188864 NR Description: mucin
  misc_feature (9)..(177): Homolog of NCBI NO: 188864 NR Description: mucin
  misc_feature (9)..(177): Homolog of NCBI NO: 186396 NR Description: mucin

SEQ ID NO: 10526 - DNA, 1097 bp, Zea mays subsp. mays
  misc_feature (1)..(1097): Ceres Seq. ID no. 12400951
  misc_feature: MA Experiment ID: 108528 Result: Up-regulated in Transcription
  misc_feature: MA Experiment 108528 PARAMETER Experiment Name: Zm_Imbibed_Seeds_P Parameter: Age (day) Value: 5 vs. 2
  misc_feature: MA Experiment 108528 PARAMETER Experiment Name: Zm_Imbibed_Seeds_P Parameter: Organism Value: Zea mays
  misc_feature: MA Experiment 108528 PARAMETER Experiment Name: Zm_Imbibed_Seeds_P Parameter: Plant Line Value: 35A19
  misc_feature: MA Experiment 108528 PARAMETER Experiment Name: Zm_Imbibed_Seeds_P Parameter: Tissue Value: Aerial vs. Embryo
  misc_feature: MA Experiment ID: 108530 Result: Up-regulated in Transcription
  misc_feature: MA Experiment 108530 PARAMETER Experiment Name: Zm_Imbibed_Seeds_P Parameter: Age (day) Value: 6 vs. 2
  misc_feature: MA Experiment 108530 PARAMETER Experiment Name: Zm_Imbibed_Seeds_P Parameter: Organism Value: Zea mays
  misc_feature: MA Experiment 108530 PARAMETER Experiment Name: Zm_Imbibed_Seeds_P Parameter: Plant Line Value: 35A19
  misc_feature: MA Experiment 108530 PARAMETER Experiment Name: Zm_Imbibed_Seeds_P Parameter: Tissue Value: Aerial vs. Embryo
  misc_feature: MA Experiment ID: 108545 Result: Up-regulated in Transcription
  misc_feature: MA Experiment 108545 PARAMETER Experiment Name: Zm_Imbibed_Seeds_P Parameter: Age (day) Value: 3 vs. 2
  misc_feature: MA Experiment 108545 PARAMETER Experiment Name: Zm_Imbibed_Seeds_P Parameter: Organism Value: Zea mays
  misc_feature: MA Experiment 108545 PARAMETER Experiment Name: Zm_Imbibed_Seeds_P Parameter: Plant Line Value: 35A19
  misc_feature: MA Experiment 108545 PARAMETER Experiment Name: Zm_Imbibed_Seeds_P Parameter: Tissue Value: Aerial vs. Embryo
  misc_feature: MA Experiment ID: 108547 Result: Up-regulated in Transcription
  misc_feature: MA Experiment 108547 PARAMETER Experiment Name: Zm_Imbibed_Seeds_P Parameter: Age (day) Value: 4 vs. 2
  misc_feature: MA Experiment 108547 PARAMETER Experiment Name: Zm_Imbibed_Seeds_P Parameter: Organism Value: Zea mays
  misc_feature: MA Experiment 108547 PARAMETER Experiment Name: Zm_Imbibed_Seeds_P Parameter: Plant Line Value: 35A19
  misc_feature: MA Experiment 108547 PARAMETER Experiment Name: Zm_Imbibed_Seeds_P Parameter: Tissue Value: Aerial vs. Embryo
  misc_feature: MA Experiment ID: 108559 Result: Down-regulated in Transcription
  misc_feature: MA Experiment 108559 PARAMETER Experiment Name: Zm_5mM_NO_P Parameter: Age (day) Value: 8
  misc_feature: MA Experiment 108559 PARAMETER Experiment Name: Zm_5mM_NO_P Parameter: Organism Value: Zea mays
  misc_feature: MA Experiment 108559 PARAMETER Experiment Name: Zm_5mM_NO_P Parameter: Plant Line Value: 35A19
  misc_feature: MA Experiment 108559 PARAMETER Experiment Name: Zm_5mM_NO_P Parameter: Timepoint (hr) Value: 12
  misc_feature: MA Experiment 108559 PARAMETER Experiment Name: Zm_5mM_NO_P Parameter: Tissue Value: Aerial
  misc_feature: MA Experiment 108559 PARAMETER Experiment Name: Zm_5mM_NO_P Parameter: Treatment Value: 5mM NO vs. No Treatment
  misc_feature: MA Experiment ID: 20000626 Result: Down-regulated in Transcription
  misc_feature: MA Experiment 20000626 PARAMETER Experiment Name: Zm_Herbicide-Treatments_P Parameter: Timepoint (hr) Value: 12
  misc_feature: MA Experiment 20000626 PARAMETER Experiment Name: Zm_Herbicide-Treatments_P Parameter: Tissue Value: Aerial
  misc_feature: MA Experiment 20000626 PARAMETER Experiment Name: Zm_Herbicide-Treatments_P Parameter: Treatment Value: Roundup vs. No Treatment
  misc_feature: MA Experiment ID: 20001612 Result: Up-regulated in Transcription
  misc_feature: MA Experiment 20001612 PARAMETER Experiment Name: Zm_50ppm_KNO3_L-to-H_P Parameter: Age (day) Value: 19
  misc_feature: MA Experiment 20001612 PARAMETER Experiment Name: Zm_50ppm_KNO3_L-to-H_P Parameter: Organism Value: Zea mays
  misc_feature: MA Experiment 20001612 PARAMETER Experiment Name: Zm_50ppm_KNO3_L-to-H_P Parameter: Plant Line Value: 35A19
  misc_feature: MA Experiment 20001612 PARAMETER Experiment Name: Zm_50ppm_KNO3_L-to-H_P Parameter: Timepoint (hr) Value: 8
  misc_feature: MA Experiment 20001612 PARAMETER Experiment Name: Zm_50ppm_KNO3_L-to-H_P Parameter: Tissue Value: Roots
  misc_feature: MA Experiment 20001612 PARAMETER Experiment Name: Zm_50ppm_KNO3_L-to-H_P Parameter: Treatment Value: 50ppm KNO3 vs. 50ppm KCl
  misc_feature: MA Experiment ID: 20001613 Result: Up-regulated in Transcription
  misc_feature: MA Experiment 20001613 PARAMETER Experiment Name: Zm_50ppm_KNO3_L-to-H_P Parameter: Age (day) Value: 20
  misc_feature: MA Experiment 20001613 PARAMETER Experiment Name: Zm_50ppm_KNO3_L-to-H_P Parameter: Organism Value: Zea mays
  misc_feature: MA Experiment 20001613 PARAMETER Experiment Name: Zm_50ppm_KNO3_L-to-H_P Parameter: Plant Line Value: 35A19
  misc_feature: MA Experiment 20001613 PARAMETER Experiment Name: Zm_50ppm_KNO3_L-to-H_P Parameter: Timepoint (hr) Value: 24
  misc_feature: MA Experiment 20001613 PARAMETER Experiment Name: Zm_50ppm_KNO3_L-to-H_P Parameter: Tissue Value: Roots
  misc_feature: MA Experiment 20001613 PARAMETER Experiment Name: Zm_50ppm_KNO3_L-to-H_P Parameter: Treatment Value: 50ppm KNO3 vs. 50ppm KCl
aatttcccattccatcctagggctcgcgagtcgcgtcccccaaagtgaatacagaaacctccagccccaggccaattcctcgaccgcatcgccacccaccccatctccatggctacctccgccctcgctgctctgtccgccaccgcggccgccgccggtaagcgcatcctcctgtcgcgccccgcctcctcctcctccctctccttcgcctcccgccgcctggccgccggggcacccctccgggggttccttggcgagccaatccgggccgtggcgtcgtcggcgtcggcggcccccgcggcggcggccaagaccatcgcggtcggggaccggctccctgacgcgacgctctcctacttcgacacgtcctcccccgacggcgagctgaagacggtgacggtccgcgacctcaccgcggggaagaaggtggtgctcttcgccgtgcccggcgcgttcacgcccacctgcacccagaagcacctcccggggttcgtggccaaggccggggagctccgcgccaagggcgtcgacaccgtggcctgcgtctccgtcaacgacgccttcgtgatgcgcgcgtggaaggagagtctggggatcggggacgaggtgctgctcctgtcggacggcaacggcgagctggcgcgcgccatgggcgtcgagctcgacctctccgacaagcccgtggggctcggcgtccggtcccgccgctacgcgctgctcgcggaggacggcgtggtcaaggtgatcaacctcgaggagggcggcgcgttcaccaacagcagcgccgaggacatgctcaacgcgctctgaactcgcgacgccatggttggttcgtctcttccggcaagagttggtttcttttccctgaaaataatcgtgacggcaacggtggcttgtgttactgccgccactgttgtgaccggcgctgttactagtgcactgcagagatgcaagtttcttgcgaacatggctttataggtctagcttcatgcaattgttgacgccctctgtttcatgacttgtcatggtatgcaactcttgtctgagaattgatcatctgcatagtaccactactatcacaggcgttctctattatt

SEQ ID NO: 10527 - protein, 233 aa, Zea mays subsp. mays
  peptide (1)..(233): Ceres Seq. ID no. 12400952
  misc_feature (72)..(230): Pfam Name: AhpC/TSA family Pfam Description: AhpC/TSA family
  misc_feature (4)..(233): Homolog of NCBI NO: 5441879 NR Description: ESTs AU070372(S13446),AU075541(S0353) correspond a region of the predicted gene.~Similar to Arabidopsis thaliana
  misc_feature (1)..(233): Homolog of NCBI NO: 15231718 NR Description: peroxiredoxin - like protein; protein id: supported by cDNA: gi_15292892, supported by cDNA: gi_15451115,
  misc_feature (1)..(233): Homolog of NCBI NO: 15292893 NR Description: putative peroxiredoxin protein [Arabidopsis
  misc_feature (70)..(233): Homolog of NCBI NO: 30841938 NR Description: thioredoxin peroxidase 1 [Lycopersicon esculentum]
  misc_feature (70)..(233): Homolog of NCBI NO: 15218877 NR Description: type 2 peroxiredoxin, putative; protein id: supported by cDNA: 5476., supported by cDNA: gi_12083335,
  misc_feature (70)..(233): Homolog of NCBI NO: 18654477 NR Description: thioredoxin peroxidase [Capsicum annuum]
  misc_feature (70)..(233): Homolog of NCBI NO: 21593881 NR Description: type 2 peroxiredoxin, putative [Arabidopsis
  misc_feature (70)..(233): Homolog of NCBI NO: 4928472 NR Description: type 2 peroxiredoxin [Brassica rapa subsp.
  misc_feature (70)..(233): Homolog of NCBI NO: 19548660 NR Description: peroxiredoxin [Populus tremula x Populus
  misc_feature (70)..(233): Homolog of NCBI NO: 15218876 NR Description: type 2 peroxiredoxin, putative; protein id: supported by cDNA: 10862., supported by cDNA: gi_12083333, by cDNA: gi_4704731 [Arabidopsis thaliana]
MATSALAALSATAAAAGKRILLSRPASSSSLSFASRRLAAGAPLRGFLGEPIRAVASSASAAPAAAAKTIAVGDRLPDATLSYFDTSSPDGELKTVTVRDLTAGKKVVLFAVPGAFTPTCTQKHLPGFVAKAGELRAKGVDTVACVSVNDAFVMRAWKESLGIGDEVLLLSDGNGELARAMGVELDLSDKPVGLGVRSRRYALLAEDGVVKVINLEEGGAFTNSSAEDMLNAL

SEQ ID NO: 10528 - protein, 128 aa, Zea mays subsp. mays
  peptide (1)..(128): Ceres Seq. ID no. 12400953
  misc_feature (31)..(128): Pfam Name: Formin Homology 2 Domain Pfam Description: Formin Homology 2 Domain
  misc_feature (31)..(128): Homolog of NCBI NO: 6523547 NR Description: hydroxyproline-rich glycoprotein DZ-HRGP [Volvox
  misc_feature (21)..(128): Homolog of NCBI NO: 6523547 NR Description: hydroxyproline-rich glycoprotein DZ-HRGP [Volvox
  misc_feature (13)..(128): Homolog of NCBI NO: 23017082 NR Description: hypothetical protein [Thermobifida fusca]
  misc_feature (9)..(128): Homolog of NCBI NO: 81286 NR Description: extensin - Volvox carteri (fragment)
  misc_feature (12)..(128): Homolog of NCBI NO: 20138131 NR Description: Vegetative cell wall protein gp1 precursor rich glycoprotein 1) >gi|12018147|gb|AAG45420.1|AF309494_1
  misc_feature (11)..(128): Homolog of NCBI NO: 6523547 NR Description: hydroxyproline-rich glycoprotein DZ-HRGP [Volvox
  misc_feature (22)..(128): Homolog of NCBI NO: 23017082 NR Description: hypothetical protein [Thermobifida fusca]
  misc_feature (31)..(128): Homolog of NCBI NO: 14017929 NR Description: KIAA1856 protein [Homo sapiens]
  misc_feature (21)..(128): Homolog of NCBI NO: 27375632 NR Description: blr0521 [Bradyrhizobium japonicum]
  misc_feature (5)..(128): Homolog of NCBI NO: 7441829 NR Description: proline-rich cell wall protein - upland cotton
ISHSILGLASRVPQSEYRNLQPQANSSTASPPTPSPWLPPPSLLCPPPRPPPVSASSCRAPPPPPPSPSPPAAWPPGHPSGGSLASQSGPWRRRRRRPPRRRPRPSRSGTGSLTRRSPTSTRPPPTAS

SEQ ID NO: 10529 - DNA, 1187 bp, Zea mays subsp. mays
  misc_feature (1)..(1187): Ceres Seq. ID no. 12341028
  misc_feature: MA Experiment ID: 108535 Result: Down-regulated in Transcription
  misc_feature: MA Experiment 108535 PARAMETER Experiment Name: Zm_Meristem_P Parameter: Age (day) Value: 8
  misc_feature: MA Experiment 108535 PARAMETER Experiment Name: Zm_Meristem_P Parameter: Organism Value: Zea mays
  misc_feature: MA Experiment 108535 PARAMETER Experiment Name: Zm_Meristem_P Parameter: Plant Line Value: 35A19
  misc_feature: MA Experiment 108535 PARAMETER Experiment Name: Zm_Meristem_P Parameter: Tissue Value: Root Meristem vs. Above Root Meristem
  misc_feature: MA Experiment ID: 108544 Result: Up-regulated in Transcription
agtctggtaccgccggcaaagcagtcgttttcgtcctcttccttgattaaaccttccgtacccatatccacctgctgctccgaccttccagtcttctccgtaggggcttcgctccatagatttcgccgcaaggggcaacggcacacccaccaactgacctgacccacgagggatccgcagatgaagatcattccggtcccttgcctggatgacaactatgcctacttaatcgtggacgagagcaccaagaaggcagcggccgttgaccctgtggaaccggagaaggttctcaaggcggccggcgaggtcggcgcctacgtcgactgcgttctcaccacccatcaccactgggatcatgctggtggcaatgagaagatgaggctgcaggtgccagggataaaggtatttggaggatccctggacaatgtgaaaggctgcactgatcaggtggagaatggaatgaagttgtcacttgggaaggacattgagatactatgcctacacacgccttgccacactaaaggtcatatcagctactatgttactagtaaggagggtgaagatccagcggtcttcaccggagataccttgttcattgctgggtgtgggaagttttttgagggttctgcagagcaaatgtatcagtcccttattgttacactgggttcgctgccaaagtcaacccgagtttactgtgggcatgagtacactgtgaagaacctaaaattcatgctgacactggagccagagaatgagaagacgaaacagaaactggaatgggctgaaaagcagcgcgaagcgaatcagccaacagtgccctcgactataggagatgagtttgagataaatactttcatgcgtgttgatctaccagaaatacaggcgaaattcagtgtcaactctccagttgaagcaatgatagaggtcaggaagaccaaggataattggagaggttgaggacacccatggccgccactagtctgttgaaccagcattccaaagtgaactaatgcagaaaccttgccctgtaggtgggaatgaggtttactgccgtgcaatgctttgagaaatgtgttgttgtgaaggagaagactcctacaataagctccgcgttaatgagtagtaacaatacgctccttgtaacttgtggtctgtttgccaataataatgtacgaactgtagtgcct

SEQ ID NO: 10530 - protein, 258 aa, Zea mays subsp. mays
  peptide (1)..(258): Ceres Seq. ID no. 12341029
  misc_feature (11)..(174): Pfam Name: Metallo-beta-lactamase superfamily Pfam Description: Metallo-beta-lactamase superfamily
  misc_feature (1)..(258): Homolog of NCBI NO: 2570342 NR Description: glyoxalase II cytoplasmic isozyme [Arabidopsis
  misc_feature (1)..(257): Homolog of NCBI NO: 21729786 NR Description: hydroxyacyl glutathione hydrolase; glyoxylase 2; II; round spermatid protein RSP29 [Mus musculus] Hydroxyacylglutathione hydrolase (Glyoxalase II) (Glx II)
  misc_feature (1)..(257): Homolog of NCBI NO: 4885389 NR Description: hydroxyacyl glutathione hydrolase; hydroxyacyl hydrolase; glyoxalase 2; Hydroxyacyl glutathione hydrolase; II; hydroxyacylglutathione hydroxylase [Homo sapiens]
  misc_feature (1)..(257): Homolog of NCBI NO: 2494848 NR Description: Hydroxyacylglutathione hydrolase (Glyoxalase II) II) (Germ cell specific protein) >gi|1167481|emb|CAA64612.1| ORF
  misc_feature (1)..(257): Homolog of NCBI NO: 15375320 NR Description: hydroxyacyl glutathione hydrolase; glyoxalase II; spermatid protein RSP29 [Rattus norvegicus] Hydroxyacylglutathione hydrolase (Glyoxalase II) (Glx II) (Round
  misc_feature (1)..(258): Homolog of NCBI NO: 15228389 NR Description: glyoxalase II (hydroxyacylglutathione protein id: At3g10850.1, supported by cDNA: gi_15450456, by cDNA: gi_2570341 [Arabidopsis thaliana]
  misc_feature (1)..(256): Homolog of NCBI NO: 29841459 NR Description: similar to probable hydroxyacylglutathione
  misc_feature (1)..(257): Homolog of NCBI NO: 24667703 NR Description: CG4365-PC [Drosophila melanogaster]
  misc_feature (1)..(257): Homolog of NCBI NO: 21356335 NR Description: CG4365-PA [Drosophila melanogaster]
  misc_feature (1)..(257): Homolog of NCBI NO: 24667711 NR Description: CG4365-PB [Drosophila melanogaster]
MKIIPVPCLDDNYAYLIVDESTKKAAAVDPVEPEKVLKAAGEVGAYVDCVLTTHHHWDHAGGNEKMRLQVPGIKVFGGSLDNVKGCTDQVENGMKLSLGKDIEILCLHTPCHTKGHISYYVTSKEGEDPAVFTGDTLFIAGCGKFFEGSAEQMYQSLIVTLGSLPKSTRVYCGHEYTVKNLKFMLTLEPENEKTKQKLEWAEKQREANQPTVPSTIGDEFEINTFMRVDLPEIQAKFSVNSPVEAMIEVRKTKDNWRG

SEQ ID NO: 10531 - protein, 193 aa, Zea mays subsp. mays
  peptide (1)..(193): Ceres Seq. ID no. 12341030
  misc_feature (1)..(109): Pfam Name: Metallo-beta-lactamase superfamily Pfam Description: Metallo-beta-lactamase superfamily
  misc_feature (1)..(193): Homolog of NCBI NO: 15228389 NR Description: glyoxalase II (hydroxyacylglutathione protein id: At3g10850.1, supported by cDNA: gi_15450456, by cDNA: gi_2570341 [Arabidopsis thaliana]
  misc_feature (1)..(193): Homolog of NCBI NO: 2570342 NR Description: glyoxalase II cytoplasmic isozyme [Arabidopsis
  misc_feature (1)..(192): Homolog of NCBI NO: 21729786 NR Description: hydroxyacyl glutathione hydrolase; glyoxylase 2; II; round spermatid protein RSP29 [Mus musculus] Hydroxyacylglutathione hydrolase (Glyoxalase II) (Glx II)
  misc_feature (1)..(192): Homolog of NCBI NO: 4885389 NR Description: hydroxyacyl glutathione hydrolase; hydroxyacyl hydrolase; glyoxalase 2; Hydroxyacyl glutathione hydrolase; II; hydroxyacylglutathione hydroxylase [Homo sapiens]
  misc_feature (1)..(192): Homolog of NCBI NO: 2494848 NR Description: Hydroxyacylglutathione hydrolase (Glyoxalase II) II) (Germ cell specific protein) >gi|1167481|emb|CAA64612.1| ORF
  misc_feature (1)..(192): Homolog of NCBI NO: 15375320 NR Description: hydroxyacyl glutathione hydrolase; glyoxalase II; spermatid protein RSP29 [Rattus norvegicus] Hydroxyacylglutathione hydrolase (Glyoxalase II) (Glx II) (Round
  misc_feature (1)..(191): Homolog of NCBI NO: 29841459 NR Description: similar to probable hydroxyacylglutathione
  misc_feature (1)..(192): Homolog of NCBI NO: 24667703 NR Description: CG4365-PC [Drosophila melanogaster]
  misc_feature (1)..(192): Homolog of NCBI NO: 21356335 NR Description: CG4365-PA [Drosophila melanogaster]
  misc_feature (1)..(192): Homolog of NCBI NO: 24667711 NR Description: CG4365-PB [Drosophila melanogaster]
MRLQVPGIKVFGGSLDNVKGCTDQVENGMKLSLGKDIEILCLHTPCHTKGHISYYVTSKEGEDPAVFTGDTLFIAGCGKFFEGSAEQMYQSLIVTLGSLPKSTRVYCGHEYTVKNLKFMLTLEPENEKTKQKLEWAEKQREANQPTVPSTIGDEFEINTFMRVDLPEIQAKFSVNSPVEAMIEVRKTKDNWRG

SEQ ID NO: 10532 - protein, 165 aa, Zea mays subsp. mays
  peptide (1)..(165): Ceres Seq. ID no. 12341031
  misc_feature (1)..(81): Pfam Name: Metallo-beta-lactamase superfamily Pfam Description: Metallo-beta-lactamase superfamily
  misc_feature (1)..(165): Homolog of NCBI NO: 15228389 NR Description: glyoxalase II (hydroxyacylglutathione protein id: At3g10850.1, supported by cDNA: gi_15450456, by cDNA: gi_2570341 [Arabidopsis thaliana]
  misc_feature (1)..(165): Homolog of NCBI NO: 2570342 NR Description: glyoxalase II cytoplasmic isozyme [Arabidopsis
  misc_feature (1)..(164): Homolog of NCBI NO: 21729786 NR Description: hydroxyacyl glutathione hydrolase; glyoxylase 2; II; round spermatid protein RSP29 [Mus musculus] Hydroxyacylglutathione hydrolase (Glyoxalase II) (Glx II)
  misc_feature (1)..(164): Homolog of NCBI NO: 4885389 NR Description: hydroxyacyl glutathione hydrolase; hydroxyacyl hydrolase; glyoxalase 2; Hydroxyacyl glutathione hydrolase; II; hydroxyacylglutathione hydroxylase [Homo sapiens]
  misc_feature (1)..(164): Homolog of NCBI NO: 2494848 NR Description: Hydroxyacylglutathione hydrolase (Glyoxalase II) II) (Germ cell specific protein) >gi|1167481|emb|CAA64612.1| ORF
  misc_feature (1)..(164): Homolog of NCBI NO: 15375320 NR Description: hydroxyacyl glutathione hydrolase; glyoxalase II; spermatid protein RSP29 [Rattus norvegicus] Hydroxyacylglutathione hydrolase (Glyoxalase II) (Glx II) (Round
  misc_feature (1)..(163): Homolog of NCBI NO: 29841459 NR Description: similar to probable hydroxyacylglutathione
  misc_feature (1)..(164): Homolog of NCBI NO: 24667703 NR Description: CG4365-PC [Drosophila melanogaster]
  misc_feature (1)..(164): Homolog of NCBI NO: 21356335 NR Description: CG4365-PA [Drosophila melanogaster]
  misc_feature (1)..(164): Homolog of NCBI NO: 24667711 NR Description: CG4365-PB [Drosophila melanogaster]
MKLSLGKDIEILCLHTPCHTKGHISYYVTSKEGEDPAVFTGDTLFIAGCGKFFEGSAEQMYQSLIVTLGSLPKSTRVYCGHEYTVKNLKFMLTLEPENEKTKQKLEWAEKQREANQPTVPSTIGDEFEINTFMRVDLPEIQAKFSVNSPVEAMIEVRKTKDNWRG

SEQ ID NO: 10533 - DNA, 754 bp, Zea mays subsp. mays
  misc_feature (1)..(754): Ceres Seq. ID no. 13492727
  misc_feature: MA Experiment ID: 108522 Result: Down-regulated in Transcription
  misc_feature: MA Experiment 108522 PARAMETER Experiment Name: Zm_42deg_Heat_P Parameter: Age (day) Value: 8
  misc_feature: MA Experiment 108522 PARAMETER Experiment Name: Zm_42deg_Heat_P Parameter: Organism Value: Zea mays
  misc_feature: MA Experiment 108522 PARAMETER Experiment Name: Zm_42deg_Heat_P Parameter: Plant Line Value: 35A19
  misc_feature: MA Experiment 108522 PARAMETER Experiment Name: Zm_42deg_Heat_P Parameter: Temperature (deg C) Value: 42 vs. 22
  misc_feature: MA Experiment 108522 PARAMETER Experiment Name: Zm_42deg_Heat_P Parameter: Timepoint (hr) Value: 1
  misc_feature: MA Experiment 108522 PARAMETER Experiment Name: Zm_42deg_Heat_P Parameter: Tissue Value: Aerial
  misc_feature: MA Experiment ID: 108535 Result: Up-regulated in Transcription
  misc_feature: MA Experiment 108535 PARAMETER Experiment Name: Zm_Meristem_P Parameter: Age (day) Value: 8
  misc_feature: MA Experiment 108535 PARAMETER Experiment Name: Zm_Meristem_P Parameter: Organism Value: Zea mays
  misc_feature: MA Experiment 108535 PARAMETER Experiment Name: Zm_Meristem_P Parameter: Plant Line Value: 35A19
  misc_feature: MA Experiment 108535 PARAMETER Experiment Name: Zm_Meristem_P Parameter: Tissue Value: Root Meristem vs. Above Root Meristem
  misc_feature: MA Experiment ID: 108544 Result: Down-regulated in Transcription
  misc_feature: MA Experiment ID: 20000488 Result: Up-regulated in Transcription
  misc_feature: MA Experiment 20000488 PARAMETER Experiment Name: Zm_50mM_NH4NO3_L_to_H_P Parameter: Organism Value: Zea mays
  misc_feature: MA Experiment 20000488 PARAMETER Experiment Name: Zm_50mM_NH4NO3_L_to_H_P Parameter: Timepoint (hr) Value: 8
  misc_feature: MA Experiment 20000488 PARAMETER Experiment Name: Zm_50mM_NH4NO3_L_to_H_P Parameter: Tissue Value: Leaves
  misc_feature: MA Experiment 20000488 PARAMETER Experiment Name: Zm_50mM_NH4NO3_L_to_H_P Parameter: Treatment Value: 50mM NH4NO3 vs. 100mM Mannitol
  misc_feature: MA Experiment ID: 20001612 Result: Up-regulated in Transcription
  misc_feature: MA Experiment 20001612 PARAMETER Experiment Name: Zm_50ppm_KNO3_L-to-H_P Parameter: Age (day) Value: 19
  misc_feature: MA Experiment 20001612 PARAMETER Experiment Name: Zm_50ppm_KNO3_L-to-H_P Parameter: Organism Value: Zea mays
  misc_feature: MA Experiment 20001612 PARAMETER Experiment Name: Zm_50ppm_KNO3_L-to-H_P Parameter: Plant Line Value: 35A19
  misc_feature: MA Experiment 20001612 PARAMETER Experiment Name: Zm_50ppm_KNO3_L-to-H_P Parameter: Timepoint (hr) Value: 8
  misc_feature: MA Experiment 20001612 PARAMETER Experiment Name: Zm_50ppm_KNO3_L-to-H_P Parameter: Tissue Value: Roots
  misc_feature: MA Experiment 20001612 PARAMETER Experiment Name: Zm_50ppm_KNO3_L-to-H_P Parameter: Treatment Value: 50ppm KNO3 vs. 50ppm KCl
atcgccccgcgaaccctagctcccgcaactgccgccgccactcccacgctcgcagccatgccgcccaagctcgacccgtcgcaggtggtggaggtgttcgtccgtgtgaccggcggcgaggtcggcgcagcgtcttcgctggcccccaagatcggcccgctcggtctttcccccaagaagatcggagaggacatcgccaaggagacggccaaggactggaagggcctccgcgtcaccgtcaagctcaccgtccagaaccggcaggccaaggtctccgtcgtcccctccgccgcggcgctcgtcatcaaggcgctcaaggagccagagagggaccgcaagaaggtcaagaacatcaagcacagcggcaacatcagcctcgacgacgtcatcgagatcgccaggaccatgaggcacaggtccatggccaaggaattggccggcaccgtcaaggagatcctcggtacctgcgtcagcgtcgggtgcaccgtcgacggcaaggaccccaaggacctgcagcaggagattgacgacggcgaggtggagatcccgtccgcttaagaaggattggtgtccaggactgtgttatctttgctgctgaagccattctctgcctagattttctcatatttatttgaggtgggggtggacgtggacgtggaactatggaagttatcacagcggagttttgcttagaaactttgtcatgctttaagtctgagacaatttctgtcaaattttatgaacattcctaggt

SEQ ID NO: 10534 - protein, 185 aa, Zea mays subsp. mays
  peptide (1)..(185): Ceres Seq. ID no. 13492728
  misc_feature (95)..(163): Pfam Name: Ribosomal protein L11, RNA binding domain Pfam Description: Ribosomal protein L11, RNA binding domain
  misc_feature (20)..(185): Homolog of NCBI NO: 38567975 NR Description: OSJNBa0093F12.16 [Oryza sativa (japonica
  misc_feature (20)..(183): Homolog of NCBI NO: 40287508 NR Description: 60S ribosomal protein L12 [Capsicum annuum]
  misc_feature (20)..(183): Homolog of NCBI NO: 6094002 NR Description: 60S RIBOSOMAL PROTEIN L12
  misc_feature (20)..(183): Homolog of NCBI NO: 15228098 NR Description: 60S ribosomal protein L12 (RPL12A) [Arabidopsis
  misc_feature (20)..(183): Homolog of NCBI NO: 15231814 NR Description: 60S ribosomal protein L12 (RPL12B) [Arabidopsis
  misc_feature (20)..(184): Homolog of NCBI NO: 15239409 NR Description: 60S ribosomal protein L12 (RPL12C) [Arabidopsis >gi|9759331|dbj|BAB09840.1| 60S ribosomal protein L12 thaliana] >gi|14517558|gb|AAK62669.1| AT5g60670/mup24_80
  misc_feature (20)..(161): Homolog of NCBI NO: 3986695 NR Description: ribosomal protein L12 [Cichorium intybus]
  misc_feature (20)..(183): Homolog of NCBI NO: 19075397 NR Description: 60s ribosomal protein l12 [Schizosaccharomyces
  misc_feature (29)..(185): Homolog of NCBI NO: 1710485 NR Description: 60S RIBOSOMAL PROTEIN L12 >gi|7440807|pir||T08157
  misc_feature (20)..(185): Homolog of NCBI NO: 27371046 NR Description: Similar to ribosomal protein L12 [Xenopus laevis]
IAPRTLAPATAAATPTLAAMPPKLDPSQVVEVFVRVTGGEVGAASSLAPKIGPLGLSPKKIGEDIAKETAKDWKGLRVTVKLTVQNRQAKVSVVPSAAALVIKALKEPERDRKKVKNIKHSGNISLDDVIEIARTMRHRSMAKELAGTVKEILGTCVSVGCTVDGKDPKDLQQEIDDGEVEIPSA

SEQ ID NO: 10535 - protein, 174 aa, Zea mays subsp. mays
  peptide (1)..(174): Ceres Seq. ID no. 13492729
RPANPSSRNCRRHSHARSHAAQARPVAGGGGVRPCDRRRGRRSVFAGPQDRPARSFPQEDRRGHRQGDGQGLEGPPRHRQAHRPEPAGQGLRRPLRRGARHQGAQGAREGPQEGQEHQAQRQHQPRRRHRDRQDHEAQVHGQGIGRHRQGDPRYLRQRRVHRRRQGPQGPAAGD

SEQ ID NO: 10536 - protein, 166 aa, Zea mays subsp. mays
  peptide (1)..(166): Ceres Seq. ID no. 13492730
  misc_feature (76)..(144): Pfam Name: Ribosomal protein L11, RNA binding domain Pfam Description: Ribosomal protein L11, RNA binding domain
  misc_feature (1)..(166): Homolog of NCBI NO: 38567975 NR Description: OSJNBa0093F12.16 [Oryza sativa (japonica
  misc_feature (1)..(164): Homolog of NCBI NO: 40287508 NR Description: 60S ribosomal protein L12 [Capsicum annuum]
  misc_feature (1)..(164): Homolog of NCBI NO: 6094002 NR Description: 60S RIBOSOMAL PROTEIN L12
  misc_feature (1)..(164): Homolog of NCBI NO: 15228098 NR Description: 60S ribosomal protein L12 (RPL12A) [Arabidopsis
  misc_feature (1)..(164): Homolog of NCBI NO: 15231814 NR Description: 60S ribosomal protein L12 (RPL12B) [Arabidopsis
  misc_feature (1)..(165): Homolog of NCBI NO: 15239409 NR Description: 60S ribosomal protein L12 (RPL12C) [Arabidopsis >gi|9759331|dbj|BAB09840.1| 60S ribosomal protein L12 thaliana] >gi|14517558|gb|AAK62669.1| AT5g60670/mup24_80
  misc_feature (1)..(142): Homolog of NCBI NO: 3986695 NR Description: ribosomal protein L12 [Cichorium intybus]
  misc_feature (1)..(164): Homolog of NCBI NO: 19075397 NR Description: 60s ribosomal protein l12 [Schizosaccharomyces
  misc_feature (10)..(166): Homolog of NCBI NO: 1710485 NR Description: 60S RIBOSOMAL PROTEIN L12 >gi|7440807|pir||T08157
  misc_feature (1)..(166): Homolog of NCBI NO: 27371046 NR Description: Similar to ribosomal protein L12 [Xenopus laevis]
MPPKLDPSQVVEVFVRVTGGEVGAASSLAPKIGPLGLSPKKIGEDIAKETAKDWKGLRVTVKLTVQNRQAKVSVVPSAAALVIKALKEPERDRKKVKNIKHSGNISLDDVIEIARTMRHRSMAKELAGTVKEILGTCVSVGCTVDGKDPKDLQQEIDDGEVEIPSA

SEQ ID NO: 10537 - DNA, 1020 bp, Zea mays subsp. mays
  misc_feature (1)..(1020): Ceres Seq. ID no. 12351061
  misc_feature: MA Experiment ID: 108515 Result: Down-regulated in Transcription
  misc_feature: MA Experiment 108515 PARAMETER Experiment Name: Zm_2mM_SA_P Parameter: Age (day) Value: 8
  misc_feature: MA Experiment 108515 PARAMETER Experiment Name: Zm_2mM_SA_P Parameter: Organism Value: Zea mays
  misc_feature: MA Experiment 108515 PARAMETER Experiment Name: Zm_2mM_SA_P Parameter: Plant Line Value: 35A19
  misc_feature: MA Experiment 108515 PARAMETER Experiment Name: Zm_2mM_SA_P Parameter: Timepoint (hr) Value: 12
  misc_feature: MA Experiment 108515 PARAMETER Experiment Name: Zm_2mM_SA_P Parameter: Tissue Value: Aerial
  misc_feature: MA Experiment 108515 PARAMETER Experiment Name: Zm_2mM_SA_P Parameter: Treatment Value: 2mM SA vs. No Treatment
  misc_feature: MA Experiment ID: 108522 Result: Up-regulated in Transcription
  misc_feature: MA Experiment 108522 PARAMETER Experiment Name: Zm_42deg_Heat_P Parameter: Age (day) Value: 8
  misc_feature: MA Experiment 108522 PARAMETER Experiment Name: Zm_42deg_Heat_P Parameter: Organism Value: Zea mays
  misc_feature: MA Experiment 108522 PARAMETER Experiment Name: Zm_42deg_Heat_P Parameter: Plant Line Value: 35A19
  misc_feature: MA Experiment 108522 PARAMETER Experiment Name: Zm_42deg_Heat_P Parameter: Temperature (deg C) Value: 42 vs. 22
  misc_feature: MA Experiment 108522 PARAMETER Experiment Name: Zm_42deg_Heat_P Parameter: Timepoint (hr) Value: 1
  misc_feature: MA Experiment 108522 PARAMETER Experiment Name: Zm_42deg_Heat_P Parameter: Tissue Value: Aerial
  misc_feature: MA Experiment ID: 108523 Result: Down-regulated in Transcription
  misc_feature: MA Experiment 108523 PARAMETER Experiment Name: Zm_42deg_Heat_P Parameter: Age (day) Value: 8
  misc_feature: MA Experiment 108523 PARAMETER Experiment Name: Zm_42deg_Heat_P Parameter: Organism Value: Zea mays
  misc_feature: MA Experiment 108523 PARAMETER Experiment Name: Zm_42deg_Heat_P Parameter: Plant Line Value: 35A19
  misc_feature: MA Experiment 108523 PARAMETER Experiment Name: Zm_42deg_Heat_P Parameter: Temperature (deg C) Value: 42 vs. 22
  misc_feature: MA Experiment 108523 PARAMETER Experiment Name: Zm_42deg_Heat_P Parameter: Timepoint (hr) Value: 6
  misc_feature: MA Experiment 108523 PARAMETER Experiment Name: Zm_42deg_Heat_P Parameter: Tissue Value: Aerial
  misc_feature: MA Experiment ID: 108528 Result: Up-regulated in Transcription
  misc_feature: MA Experiment 108528 PARAMETER Experiment Name: Zm_Imbibed_Seeds_P Parameter: Age (day) Value: 5 vs. 2
  misc_feature: MA Experiment 108528 PARAMETER Experiment Name: Zm_Imbibed_Seeds_P Parameter: Organism Value: Zea mays
  misc_feature: MA Experiment 108528 PARAMETER Experiment Name: Zm_Imbibed_Seeds_P Parameter: Plant Line Value: 35A19
  misc_feature: MA Experiment 108528 PARAMETER Experiment Name: Zm_Imbibed_Seeds_P Parameter: Tissue Value: Aerial vs. Embryo
  misc_feature: MA Experiment ID: 108530 Result: Up-regulated in Transcription
  misc_feature: MA Experiment 108530 PARAMETER Experiment Name: Zm_Imbibed_Seeds_P Parameter: Age (day) Value: 6 vs. 2
  misc_feature: MA Experiment 108530 PARAMETER Experiment Name: Zm_Imbibed_Seeds_P Parameter: Organism Value: Zea mays
  misc_feature: MA Experiment 108530 PARAMETER Experiment Name: Zm_Imbibed_Seeds_P Parameter: Plant Line Value: 35A19
  misc_feature: MA Experiment 108530 PARAMETER Experiment Name: Zm_Imbibed_Seeds_P Parameter: Tissue Value: Aerial vs. Embryo
  misc_feature: MA Experiment ID: 108543 Result: Up-regulated in Transcription
  misc_feature: MA Experiment ID: 108545 Result: Up-regulated in Transcription
  misc_feature: MA Experiment 108545 PARAMETER Experiment Name: Zm_Imbibed_Seeds_P Parameter: Age (day) Value: 3 vs. 2
  misc_feature: MA Experiment 108545 PARAMETER Experiment Name: Zm_Imbibed_Seeds_P Parameter: Organism Value: Zea mays
  misc_feature: MA Experiment 108545 PARAMETER Experiment Name: Zm_Imbibed_Seeds_P Parameter: Plant Line Value: 35A19
  misc_feature: MA Experiment 108545 PARAMETER Experiment Name: Zm_Imbibed_Seeds_P Parameter: Tissue Value: Aerial vs. Embryo
  misc_feature: MA Experiment ID: 108546 Result: Down-regulated in Transcription
  misc_feature: MA Experiment 108546 PARAMETER Experiment Name: Zm_Imbibed_Seeds_P Parameter: Age (day) Value: 3 vs. 2
  misc_feature: MA Experiment 108546 PARAMETER Experiment Name: Zm_Imbibed_Seeds_P Parameter: Organism Value: Zea mays
  misc_feature: MA Experiment 108546 PARAMETER Experiment Name: Zm_Imbibed_Seeds_P Parameter: Plant Line Value: 35A19
  misc_feature: MA Experiment 108546 PARAMETER Experiment Name: Zm_Imbibed_Seeds_P Parameter: Tissue Value: Roots vs. Embryo
  misc_feature: MA Experiment ID: 108547 Result: Up-regulated in Transcription
  misc_feature: MA Experiment 108547 PARAMETER Experiment Name: Zm_Imbibed_Seeds_P Parameter: Age (day) Value: 4 vs. 2
  misc_feature: MA Experiment 108547 PARAMETER Experiment Name: Zm_Imbibed_Seeds_P Parameter: Organism Value: Zea mays
  misc_feature: MA Experiment 108547 PARAMETER Experiment Name: Zm_Imbibed_Seeds_P Parameter: Plant Line Value: 35A19
  misc_feature: MA Experiment 108547 PARAMETER Experiment Name: Zm_Imbibed_Seeds_P Parameter: Tissue Value: Aerial vs. Embryo
  misc_feature: MA Experiment ID: 108556 Result: Down-regulated in Transcription
  misc_feature: MA Experiment 108556 PARAMETER Experiment Name: Zm_Drought_P Parameter: Age (day) Value: 9
  misc_feature: MA Experiment 108556 PARAMETER Experiment Name: Zm_Drought_P Parameter: Organism Value: Zea mays
  misc_feature: MA Experiment 108556 PARAMETER Experiment Name: Zm_Drought_P Parameter: Plant Line Value: 35A19
  misc_feature: MA Experiment 108556 PARAMETER Experiment Name: Zm_Drought_P Parameter: Timepoint (hr) Value: 24
  misc_feature: MA Experiment 108556 PARAMETER Experiment Name: Zm_Drought_P Parameter: Tissue Value: Aerial
  misc_feature: MA Experiment 108556 PARAMETER Experiment Name: Zm_Drought_P Parameter: Treatment Value: Drought vs. No Drought
  misc_feature: MA Experiment ID: 108559 Result: Up-regulated in Transcription
  misc_feature: MA Experiment 108559 PARAMETER Experiment Name: Zm_5mM_NO_P Parameter: Age (day) Value: 8
  misc_feature: MA Experiment 108559 PARAMETER Experiment Name: Zm_5mM_NO_P Parameter: Organism Value: Zea mays
  misc_feature: MA Experiment 108559 PARAMETER Experiment Name: Zm_5mM_NO_P Parameter: Plant Line Value: 35A19
  misc_feature: MA Experiment 108559 PARAMETER Experiment Name: Zm_5mM_NO_P Parameter: Timepoint (hr) Value: 12
  misc_feature: MA Experiment 108559 PARAMETER Experiment Name: Zm_5mM_NO_P Parameter: Tissue Value: Aerial
  misc_feature: MA Experiment 108559 PARAMETER Experiment Name: Zm_5mM_NO_P Parameter: Treatment Value: 5mM NO vs. No Treatment
  misc_feature: MA Experiment ID: 108689 Result: Down-regulated in Transcription
  misc_feature: MA Experiment 108689 PARAMETER Experiment Name: Zm_Drought_Roots_P Parameter: Age (day) Value: 9
  misc_feature: MA Experiment 108689 PARAMETER Experiment Name: Zm_Drought_Roots_P Parameter: Organism Value: Zea mays
  misc_feature: MA Experiment 108689 PARAMETER Experiment Name: Zm_Drought_Roots_P Parameter: Plant Line Value: 35A19
  misc_feature: MA Experiment 108689 PARAMETER Experiment Name: Zm_Drought_Roots_P Parameter: Timepoint (hr) Value: 24
  misc_feature: MA Experiment 108689 PARAMETER Experiment Name: Zm_Drought_Roots_P Parameter: Tissue Value: Roots
  misc_feature: MA Experiment 108689 PARAMETER Experiment Name: Zm_Drought_Roots_P Parameter: Treatment Value: Drought vs. No Drought
  misc_feature: MA Experiment ID: 20000477 Result: Down-regulated in Transcription
  misc_feature: MA Experiment 20000477 PARAMETER Experiment Name: Zm_5mM_SA_P Parameter: Age (day) Value: 10
  misc_feature: MA Experiment 20000477 PARAMETER Experiment Name: Zm_5mM_SA_P Parameter: Organism Value: Zea mays
  misc_feature: MA Experiment 20000477 PARAMETER Experiment Name: Zm_5mM_SA_P Parameter: Plant Line Value: 35A19
  misc_feature: MA Experiment 20000477 PARAMETER Experiment Name: Zm_5mM_SA_P Parameter: Timepoint (hr) Value: 48
  misc_feature: MA Experiment 20000477 PARAMETER Experiment Name: Zm_5mM_SA_P Parameter: Tissue Value: Aerial
  misc_feature: MA Experiment 20000477 PARAMETER Experiment Name: Zm_5mM_SA_P Parameter: Treatment Value: 5mM SA vs. No Treatment
  misc_feature: MA Experiment ID: 20000479 Result: Down-regulated in Transcription
  misc_feature: MA Experiment 20000479 PARAMETER Experiment Name: Zm_Drought_P Parameter: Age (day) Value: 10
  misc_feature: MA Experiment 20000479 PARAMETER Experiment Name: Zm_Drought_P Parameter: Organism Value: Zea mays
  misc_feature: MA Experiment 20000479 PARAMETER Experiment Name: Zm_Drought_P Parameter: Plant Line Value: 35A19
  misc_feature: MA Experiment 20000479 PARAMETER Experiment Name: Zm_Drought_P Parameter: Timepoint (hr) Value: 48
  misc_feature: MA Experiment 20000479 PARAMETER Experiment Name: Zm_Drought_P Parameter: Tissue Value: Aerial
  misc_feature: MA Experiment 20000479 PARAMETER Experiment Name: Zm_Drought_P Parameter: Treatment Value: Drought vs. No Drought
  misc_feature: MA Experiment ID: 20000480 Result: Down-regulated in Transcription
  misc_feature: MA Experiment 20000480 PARAMETER Experiment Name: Zm_Drought_P Parameter: Age (day) Value: 11
  misc_feature: MA Experiment 20000480 PARAMETER Experiment Name: Zm_Drought_P Parameter: Organism Value: Zea mays
  misc_feature: MA Experiment 20000480 PARAMETER Experiment Name: Zm_Drought_P Parameter: Plant Line Value: 35A19
  misc_feature: MA Experiment 20000480 PARAMETER Experiment Name: Zm_Drought_P Parameter: Timepoint (hr) Value: 72
  misc_feature: MA Experiment 20000480 PARAMETER Experiment Name: Zm_Drought_P Parameter: Tissue Value: Aerial
  misc_feature: MA Experiment 20000480 PARAMETER Experiment Name: Zm_Drought_P Parameter: Treatment Value: Drought vs. No Drought
  misc_feature: MA Experiment ID: 20000626 Result: Down-regulated in Transcription
  misc_feature: MA Experiment 20000626 PARAMETER Experiment Name: Zm_Herbicide-Treatments_P Parameter: Timepoint (hr) Value: 12
  misc_feature: MA Experiment 20000626 PARAMETER Experiment Name: Zm_Herbicide-Treatments_P Parameter: Tissue Value: Aerial
  misc_feature: MA Experiment 20000626 PARAMETER Experiment Name: Zm_Herbicide-Treatments_P Parameter: Treatment Value: Roundup vs. No Treatment
gacacagccatcacacgcatactgcatacacaacacagagcatcagaaggagctacgatctgatcgacatggctgccgccaccatggctatcacctcccgcgcgctcgtcggcaagccggcggctggcacgagggacgtcttcggcgagggccgcatcaccatgcgcaagancgccgccaagcccaagccggcggcgtccggcagcccatggtacggtgccgaccgcgtcctgtacctgggcccgctgtccggctcgcccccgagctacctgaccggcgagttccccggcgactacgggtgggacaccgcggggctgtcggcggacccggagaccttcgccaagaaccgcgagctggaggtgatccactgccgctgggccatgctcggcgcgctcgggtgcgtgttcccggagctgctcgcccgcaacggcgtcaagttcggcgaggcggtgtggttcaaggcgggctcccagatcttcagcgagggcgggctggactacctcggcaacccgagcctggtccacgcgcagagcatcctggccatctgggcgtgccaggtggtgctcatgggcgccgtcgaggggtaccgcgtcgccggcggcccgctcggagaggtggtcgacccgctgtaccctggcggcagcttcgacccgctcgggctcgccgacgacccggaggcgttcgccgagctcaaggtgaaggagatcaagaacggccgcctcgccatgttctccatgttcggcttcttcgtgcaggctatcgtcaccggcaagggccccctcgagaacctcgccgaccacatcgccgaccccgtcaacaacaacgcctgggcttacgccaccaacttcgtccccggcaagtgagcgagggcatgatgcttgcatgcgtgtaccgtagacgtacgtattcctacgtactgcaggttgcaccagtatttgtgaagggagctttgggagccagagattgtaccgctagtgtatttgtatgcatgctgtggagctgaacaataaaatatgctgt

SEQ ID NO: 10538 - protein, 333 aa, Zea mays subsp. mays
  peptide (1)..(333): Ceres Seq. ID no. 12351062
  misc_feature (59)..(228): Pfam Name: HlyD family secretion protein Pfam Description: HlyD family secretion protein
  misc_feature (57)..(57): Xaa is any aa, unknown or other
TQPSHAYCIHNTEHQKELRSDRHGCRHHGYHLPRARRQAGGWHEGRLRRGPHHHAQXRRQAQAGGVRQPMVRCRPRPVPGPAVRLAPELPDRRVPRRLRVGHRGAVGGPGDLRQEPRAGGDPLPLGHARRARVRVPGAARPQRRQVRRGGVVQGGLPDLQRGRAGLPRQPEPGPRAEHPGHLGVPGGAHGRRRGVPRRRRPARRGGRPAVPWRQLRPARARRRPGGVRRAQGEGDQERPPRHVLHVRLLRAGYRHRQGPPREPRRPHRRPRQQQRLGLRHQLRPRQVSEGMMLACVYRRRTYSYVLQVAPVFVKGALGARDCTASVFVCMLWS

SEQ ID NO: 10539 - protein, 286 aa, Zea mays subsp. mays
  peptide (1)..(286): Ceres Seq. ID no. 12351063
  misc_feature (87)..(253): Pfam Name: Chlorophyll A-B binding protein Pfam Description: Chlorophyll A-B binding protein
  misc_feature (23)..(286): Homolog of NCBI NO: 34912356 NR Description: putative chlorophyll a/b-binding protein 2 [Oryza
  misc_feature (23)..(286): Homolog of NCBI NO: 34910682 NR Description: chlorophyll a/b binding protein [Oryza sativa
  misc_feature (23)..(286): Homolog of NCBI NO: 543938 NR Description: Chlorophyll A-B binding protein 48, chloroplast
  misc_feature (23)..(286): Homolog of NCBI NO: 115787 NR Description: Chlorophyll A-B binding protein 2, chloroplast
  misc_feature (23)..(286): Homolog of NCBI NO: 7443224 NR Description: chlorophyll a/b-binding protein precursor kcdl895 rice >gi|1661160|gb|AAB18404.1| chlorophyll a/b binding protein
  misc_feature (3)..(286): Homolog of NCBI NO: 31753114 NR Description: Unknown (protein for IMAGE:5194336) [Homo sapiens]
  misc_feature (23)..(286): Homolog of NCBI NO: 115786 NR Description: Chlorophyll A-B binding protein, chloroplast
  misc_feature (23)..(286): Homolog of NCBI NO: 115815 NR Description: Chlorophyll A-B binding protein M9, chloroplast
  misc_feature (23)..(285): Homolog of NCBI NO: 115771 NR Description: Chlorophyll A-B binding protein 1, chloroplast
  misc_feature (23)..(286): Homolog of NCBI NO: 1657859 NR Description: chlorophyll a/b-binding protein WCAB precursor
  misc_feature (57)..(57): Xaa is any aa, unknown or other
HSHHTHTAYTTQSIRRSYDLIDMAAATMAITSRALVGKPAAGTRDVFGEGRITMRKXAAKPKPAASGSPWYGADRVLYLGPLSGSPPSYLTGEFPGDYGWDTAGLSADPETFAKNRELEVIHCRWAMLGALGCVFPELLARNGVKFGEAVWFKAGSQIFSEGGLDYLGNPSLVHAQSILAIWACQVVLMGAVEGYRVAGGPLGEVVDPLYPGGSFDPLGLADDPEAFAELKVKEIKNGRLAMFSMFGFFVQAIVTGKGPLENLADHIADPVNNNAWAYATNFVPGK

SEQ ID NO: 10540 - protein, 264 aa, Zea mays subsp. mays
  peptide (1)..(264): Ceres Seq. ID no. 12351064
  misc_feature (1)..(159): Pfam Name: HlyD family secretion protein Pfam Description: HlyD family secretion protein
MVRCRPRPVPGPAVRLAPELPDRRVPRRLRVGHRGAVGGPGDLRQEPRAGGDPLPLGHARRARVRVPGAARPQRRQVRRGGVVQGGLPDLQRGRAGLPRQPEPGPRAEHPGHLGVPGGAHGRRRGVPRRRRPARRGGRPAVPWRQLRPARARRRPGGVRRAQGEGDQERPPRHVLHVRLLRAGYRHRQGPPREPRRPHRRPRQQQRLGLRHQLRPRQVSEGMMLACVYRRRTYSYVLQVAPVFVKGALGARDCTASVFVCMLWS

SEQ ID NO: 10541 - protein, 264 aa, Zea mays subsp. mays
  peptide (1)..(264): Ceres Seq. ID no. 12351065
  misc_feature (65)..(231): Pfam Name: Chlorophyll A-B binding protein Pfam Description: Chlorophyll A-B binding protein
  misc_feature (1)..(264): Homolog of NCBI NO: 34912356 NR Description: putative chlorophyll a/b-binding protein 2 [Oryza
  misc_feature (1)..(264): Homolog of NCBI NO: 34910682 NR Description: chlorophyll a/b binding protein [Oryza sativa
  misc_feature (1)..(264): Homolog of NCBI NO: 543938 NR Description: Chlorophyll A-B binding protein 48, chloroplast
  misc_feature (1)..(264): Homolog of NCBI NO: 115787 NR Description: Chlorophyll A-B binding protein 2, chloroplast
  misc_feature (1)..(264): Homolog of NCBI NO: 7443224 NR Description: chlorophyll a/b-binding protein precursor kcdl895 rice >gi|1661160|gb|AAB18404.1| chlorophyll a/b binding protein
  misc_feature (1)..(264): Homolog of NCBI NO: 31753114 NR Description: Unknown (protein for IMAGE:5194336) [Homo sapiens]
  misc_feature (1)..(264): Homolog of NCBI NO: 115786 NR Description: Chlorophyll A-B binding protein, chloroplast
  misc_feature (1)..(264): Homolog of NCBI NO: 115815 NR Description: Chlorophyll A-B binding protein M9, chloroplast
  misc_feature (1)..(263): Homolog of NCBI NO: 115771 NR Description: Chlorophyll A-B binding protein 1, chloroplast
  misc_feature (1)..(264): Homolog of NCBI NO: 1657859 NR Description: chlorophyll a/b-binding protein WCAB precursor
  misc_feature (35)..(35): Xaa is any aa, unknown or other
MAAATMAITSRALVGKPAAGTRDVFGEGRITMRKXAAKPKPAASGSPWYGADRVLYLGPLSGSPPSYLTGEFPGDYGWDTAGLSADPETFAKNRELEVIHCRWAMLGALGCVFPELLARNGVKFGEAVWFKAGSQIFSEGGLDYLGNPSLVHAQSILAIWACQVVLMGAVEGYRVAGGPLGEVVDPLYPGGSFDPLGLADDPEAFAELKVKEIKNGRLAMFSMFGFFVQAIVTGKGPLENLADHIADPVNNNAWAYATNFVPGK

SEQ ID NO: 10542 - DNA, 1233 bp, Zea mays subsp. mays
  misc_feature (1)..(1233): Ceres Seq. ID no. 12462338
  misc_feature: MA Experiment ID: 20000534 Result: Down-regulated in Transcription
  misc_feature: MA Experiment 20000534 PARAMETER Experiment Name: Zm_Hybrid_Pollen_P Parameter: Age (day) Value: 8
  misc_feature: MA Experiment 20000534 PARAMETER Experiment Name: Zm_Hybrid_Pollen_P Parameter: Organism Value: Zea mays
  misc_feature: MA Experiment 20000534 PARAMETER Experiment Name: Zm_Hybrid_Pollen_P Parameter: Plant Line Value: 35A19
  misc_feature: MA Experiment 20000534 PARAMETER Experiment Name: Zm_Hybrid_Pollen_P Parameter: Tissue Value: Pollen vs. Aerial
aagctacacacacaggcagacaccgttccgcgggggaaaggtgcggacgcttgaatcctctccaactccggcaccgcattcgcacgcccgcgccgccccgaatcggagaggacagaggagtcatggacgcggcggcggcggctgcgagccccacgagcaagaggatcgcgctggtgacgggagggaacaagggcatcgggctcgagacgtgccggcagctggcgtccaggggcgtcagggtcgtcctgacggcgaggaacgaggcgaggggtttggaagcggtcgagcgcgtcaggtgcgcccgcggcgacgccgaggtttacttccaccagctcgatgtcaccgacccctgcagcgccgcccggctcgcggatttcgtcagggatcagttcggtaggctggacatcctgatcaacaatgcgggaatttcaggtgttcaccgtgatccagttttgtctgctgcggtcaaggataaggtcgatggcatggatgtaaatcagagagtcgaatggatgaaggaaaattcgaaagaaacatacgaggaggctgtacaatgtatgaaaacaaactattatggtgccaaacttgtcacagaggcactacttcctcttcttcagttatcctcctctggaaggattgtcaacgtatcgtcaggctttggactactgagaaatttcaacagcgaagaccttaggaaggagtttgaagacatcgacaatcttactgaaagtagactggaggaactgatggataagtttctagaggattttaaggccaacttagtagaggagcatgggtggccgacaggtggatcttcagcctacaaagtcgtcaaagcggcgctcaatgcgtacacgaggattcttgccaagaagtatcctacactgcgtatcaattgtttgacgcctggttatgtcaagaccgacatttctatgcacatgggggtactgacacttgaggaaggcgctcgcaaccccgtgaaggttgctctcttgcctgacgacggaccgactggtgcttattttgatctgaatggcgaggcgtcctttgtgtgatggtatttctcctttttcagcttcagaataaaagaaagagctatgaagtagttagtgccaatcagtattgtagttcgacttgaatacttaaactagcacgttgagcaaaccgtagagctcaacaccagggatttcctcgtcttctgtataatatctctggtgatgattgtatatttcc

SEQ ID NO: 10543 - protein, 350 aa, Zea mays subsp. mays
  peptide (1)..(350): Ceres Seq. ID no. 12462339
  misc_feature (44)..(350): Homolog of NCBI NO: 38346767 NR Description: OSJNBa0081C01.18 [Oryza sativa (japonica
  misc_feature (41)..(350): Homolog of NCBI NO: 38346774 NR Description: OSJNBa0081C01.25 [Oryza sativa (japonica
  misc_feature (50)..(350): Homolog of NCBI NO: 38346768 NR Description: OSJNBa0081C01.19 [Oryza sativa (japonica
  misc_feature (50)..(350): Homolog of NCBI NO: 38346769 NR Description: OSJNBa0081C01.20 [Oryza sativa (japonica
  misc_feature (49)..(350): Homolog of NCBI NO: 38346772 NR Description: OSJNBa0081C01.23 [Oryza sativa (japonica
  misc_feature (15)..(347): Homolog of NCBI NO: 33146492 NR Description: carbonyl reductase -like protein [Oryza sativa
  misc_feature (52)..(349): Homolog of NCBI NO: 15224100 NR Description: putative carbonyl reductase; protein id: [Arabidopsis thaliana] >gi|25412197|pir||F84633 probable carbonyl
  misc_feature (54)..(349): Homolog of NCBI NO: 15233062 NR Description: putative protein; protein id: At3g61220.1, by cDNA: gi_15028054, supported by cDNA: gi_20259056 [Arabidopsis
  misc_feature (53)..(341): Homolog of NCBI NO: 34559416 NR Description: (-)-isopiperitenone reductase [Mentha x piperita]
  misc_feature (54)..(349): Homolog of NCBI NO: 18378884 NR Description: carbonyl reductase, putative; protein id: [Arabidopsis thaliana] >gi|13878161|gb|AAK44158.1|AF370343_1 carbonyl reductase [Arabidopsis thaliana]
ATHTGRHRSAGERCGRLNPLQLRHRIRTPAPPRIGEDRGVMDAAAAAASPTSKRIALVTGGNKGIGLETCRQLASRGVRVVLTARNEARGLEAVERVRCARGDAEVYFHQLDVTDPCSAARLADFVRDQFGRLDILINNAGISGVHRDPVLSAAVKDKVDGMDVNQRVEWMKENSKETYEEAVQCMKTNYYGAKLVTEALLPLLQLSSSGRIVNVSSGFGLLRNFNSEDLRKEFEDIDNLTESRLEELMDKFLEDFKANLVEEHGWPTGGSSAYKVVKAALNAYTRILAKKYPTLRINCLTPGYVKTDISMHMGVLTLEEGARNPVKVALLPDDGPTGAYFDLNGEASFV

SEQ ID NO: 10544 - protein, 310 aa, Zea mays subsp. mays
  peptide (1)..(310): Ceres Seq. ID no. 12462340
  misc_feature (4)..(310): Homolog of NCBI NO: 38346767 NR Description: OSJNBa0081C01.18 [Oryza sativa (japonica
  misc_feature (1)..(310): Homolog of NCBI NO: 38346774 NR Description: OSJNBa0081C01.25 [Oryza sativa (japonica
  misc_feature (10)..(310): Homolog of NCBI NO: 38346768 NR Description: OSJNBa0081C01.19 [Oryza sativa (japonica
  misc_feature (10)..(310): Homolog of NCBI NO: 38346769 NR Description: OSJNBa0081C01.20 [Oryza sativa (japonica
  misc_feature (9)..(310): Homolog of NCBI NO: 38346772 NR Description: OSJNBa0081C01.23 [Oryza sativa (japonica
  misc_feature (1)..(307): Homolog of NCBI NO: 33146492 NR Description: carbonyl reductase -like protein [Oryza sativa
  misc_feature (12)..(309): Homolog of NCBI NO: 15224100 NR Description: putative carbonyl reductase; protein id: [Arabidopsis thaliana] >gi|25412197|pir||F84633 probable carbonyl
  misc_feature (14)..(309): Homolog of NCBI NO: 15233062 NR Description: putative protein; protein id: At3g61220.1, by cDNA: gi_15028054, supported by cDNA: gi_20259056 [Arabidopsis
  misc_feature (13)..(301): Homolog of NCBI NO: 34559416 NR Description: (-)-isopiperitenone reductase [Mentha x piperita]
  misc_feature (14)..(309): Homolog of NCBI NO: 18378884 NR Description: carbonyl reductase, putative; protein id: [Arabidopsis thaliana] >gi|13878161|gb|AAK44158.1|AF370343_1 carbonyl reductase [Arabidopsis thaliana]
MDAAAAAASPTSKRIALVTGGNKGIGLETCRQLASRGVRVVLTARNEARGLEAVERVRCARGDAEVYFHQLDVTDPCSAARLADFVRDQFGRLDILINNAGISGVHRDPVLSAAVKDKVDGMDVNQRVEWMKENSKETYEEAVQCMKTNYYGAKLVTEALLPLLQLSSSGRIVNVSSGFGLLRNFNSEDLRKEFEDIDNLTESRLEELMDKFLEDFKANLVEEHGWPTGGSSAYKVVKAALNAYTRILAKKYPTLRINCLTPGYVKTDISMHMGVLTLEEGARNPVKVALLPDDGPTGAYFDLNGEASFV

SEQ ID NO: 10545 - protein, 189 aa, Zea mays subsp. mays
  peptide (1)..(189): Ceres Seq. ID no. 12462341
  misc_feature (1)..(189): Homolog of NCBI NO: 38346767 NR Description: OSJNBa0081C01.18 [Oryza sativa (japonica
  misc_feature (1)..(189): Homolog of NCBI NO: 38346774 NR Description: OSJNBa0081C01.25 [Oryza sativa (japonica
  misc_feature (1)..(189): Homolog of NCBI NO: 38346768 NR Description: OSJNBa0081C01.19 [Oryza sativa (japonica
  misc_feature (1)..(189): Homolog of NCBI NO: 38346769 NR Description: OSJNBa0081C01.20 [Oryza sativa (japonica
  misc_feature (1)..(189): Homolog of NCBI NO: 38346772 NR Description: OSJNBa0081C01.23 [Oryza sativa (japonica
  misc_feature (1)..(186): Homolog of NCBI NO: 33146492 NR Description: carbonyl reductase -like protein [Oryza sativa
  misc_feature (1)..(188): Homolog of NCBI NO: 15224100 NR Description: putative carbonyl reductase; protein id: [Arabidopsis thaliana] >gi|25412197|pir||F84633 probable carbonyl
  misc_feature (1)..(188): Homolog of NCBI NO: 15233062 NR Description: putative protein; protein id: At3g61220.1, by cDNA: gi_15028054, supported by cDNA: gi_20259056 [Arabidopsis
  misc_feature (1)..(180): Homolog of NCBI NO: 34559416 NR Description: (-)-isopiperitenone reductase [Mentha x piperita]
  misc_feature (1)..(188): Homolog of NCBI NO: 18378884 NR Description: carbonyl reductase, putative; protein id: [Arabidopsis thaliana] >gi|13878161|gb|AAK44158.1|AF370343_1 carbonyl reductase [Arabidopsis thaliana]
MDVNQRVEWMKENSKETYEEAVQCMKTNYYGAKLVTEALLPLLQLSSSGRIVNVSSGFGLLRNFNSEDLRKEFEDIDNLTESRLEELMDKFLEDFKANLVEEHGWPTGGSSAYKVVKAALNAYTRILAKKYPTLRINCLTPGYVKTDISMHMGVLTLEEGARNPVKVALLPDDGPTGAYFDLNGEASFV

SEQ ID NO: 10546 - DNA, 998 bp, Zea mays subsp. mays
  misc_feature (1)..(998): Ceres Seq. ID no. 12404088
  misc_feature: MA Experiment ID: 108535 Result: Up-regulated in Transcription
  misc_feature: MA Experiment 108535 PARAMETER Experiment Name: Zm_Meristem_P Parameter: Age (day) Value: 8
  misc_feature: MA Experiment 108535 PARAMETER Experiment Name: Zm_Meristem_P Parameter: Organism Value: Zea mays
  misc_feature: MA Experiment 108535 PARAMETER Experiment Name: Zm_Meristem_P Parameter: Plant Line Value: 35A19
  misc_feature: MA Experiment 108535 PARAMETER Experiment Name: Zm_Meristem_P Parameter: Tissue Value: Root Meristem vs. Above Root Meristem
  misc_feature: MA Experiment ID: 108556 Result: Down-regulated in Transcription
  misc_feature: MA Experiment 108556 PARAMETER Experiment Name: Zm_Drought_P Parameter: Age (day) Value: 9
  misc_feature: MA Experiment 108556 PARAMETER Experiment Name: Zm_Drought_P Parameter: Organism Value: Zea mays
  misc_feature: MA Experiment 108556 PARAMETER Experiment Name: Zm_Drought_P Parameter: Plant Line Value: 35A19
  misc_feature: MA Experiment 108556 PARAMETER Experiment Name: Zm_Drought_P Parameter: Timepoint (hr) Value: 24
  misc_feature: MA Experiment 108556 PARAMETER Experiment Name: Zm_Drought_P Parameter: Tissue Value: Aerial
  misc_feature: MA Experiment 108556 PARAMETER Experiment Name: Zm_Drought_P Parameter: Treatment Value: Drought vs. No Drought
  misc_feature: MA Experiment ID: 108687 Result: Down-regulated in Transcription
  misc_feature: MA Experiment 108687 PARAMETER Experiment Name: Zm_Embryos-Flowers__P Parameter: Tissue Value: Embryo vs. Aerial+
acggggagaagtcgaacagcggccgcgcgcgggaagttgctcggaggcggcggcggatctcggaggcagcgacgcgcgggtggaggagctcagtgacagcgccagtgcctatcgagctagcgaatcgaggagattttccccactgtttctttcctgctgattccgatttcacgttgaaacaccggggggagaagaattgcgggcgaccataactcggcaagaagcggctccaaaaagggcatctacctttgccgattccggcaccgatggataccgcggcgtcggggaggttcgacaagctccagagctcgttcaagctctccatccagtgcctcctcacggcctgctcccgcgaggatgtcaatgacgctttctcgtccttcactgatgctgagaaggagcgtttgcaccggatgctcacccttgtgatgaagaatctgcatgccaacgtagtggatgagtttgacgacttctgccaagaaacacaggtggctgctgcccttgaaaagatagatgactttgttgaaaagcagaatcttgatgcattatcttcagagaagactactgttgaagaaatcgaagaaaaggtatcaagagcaaaaaaggatgaaattgaatatttgactggtttactgaaaaaggttgaagaaagtaacaatgctatgaaagctcgaattgacctcctaaagaaaggggaggatctaactgctgcaagagatgtcctcaataagatgacgcagtggaactctgcactcgtggagaacattaacccttgaatctgtgtgatgacgattcattggcgtcaaaggacatctttgtataggggtgtgttagattggatgacatgtgaatgtgattcatggatcagcctggatgttctgttatgattaagaactgctatgtatcgtgcaatagacacatcgtctgtacttttgatgttattatcaggtcccaaacttctttatatccaatatgttacaatatcattttggtgactc

SEQ ID NO: 10547 - protein, 169 aa, Zea mays subsp. mays
  peptide (1)..(169): Ceres Seq. ID no. 12404089
  misc_feature (4)..(167): Homolog of NCBI NO: 34905298 NR Description: P0577B11.20 [Oryza sativa (japonica
  misc_feature (2)..(165): Homolog of NCBI NO: 18415295 NR Description: putative protein; protein id: At4g19350.1, by cDNA: 38902. [Arabidopsis thaliana] unknown [Arabidopsis thaliana] >gi|26450673|dbj|BAC42447.1|
  misc_feature (44)..(165): Homolog of NCBI NO: 7487713 NR Description: hypothetical protein T5K18.130 - Arabidopsis >gi|3080365|emb|CAA18622.1| putative protein [Arabidopsis >gi|7268730|emb|CAB78937.1| putative protein [Arabidopsis
MDTAASGRFDKLQSSFKLSIQCLLTACSREDVNDAFSSFTDAEKERLHRMLTLVMKNLHANVVDEFDDFCQETQVAAALEKIDDFVEKQNLDALSSEKTTVEEIEEKVSRAKKDEIEYLTGLLKKVEESNNAMKARIDLLKKGEDLTAARDVLNKMTQWNSALVENINP

SEQ ID NO: 10548 - protein, 120 aa, Zea mays subsp. mays
  peptide (1)..(120): Ceres Seq. ID no. 12404090
  misc_feature (1)..(116): Homolog of NCBI NO: 7487713 NR Description: hypothetical protein T5K18.130 - Arabidopsis >gi|3080365|emb|CAA18622.1| putative protein [Arabidopsis >gi|7268730|emb|CAB78937.1| putative protein [Arabidopsis
  misc_feature (1)..(118): Homolog of NCBI NO: 34905298 NR Description: P0577B11.20 [Oryza sativa (japonica
  misc_feature (1)..(116): Homolog of NCBI NO: 18415295 NR Description: putative protein; protein id: At4g19350.1, by cDNA: 38902. [Arabidopsis thaliana] unknown [Arabidopsis thaliana] >gi|26450673|dbj|BAC42447.1|
MLTLVMKNLHANVVDEFDDFCQETQVAAALEKIDDFVEKQNLDALSSEKTTVEEIEEKVSRAKKDEIEYLTGLLKKVEESNNAMKARIDLLKKGEDLTAARDVLNKMTQWNSALVENINP

SEQ ID NO: 10549 - protein, 115 aa, Zea mays subsp. mays
  peptide (1)..(115): Ceres Seq. ID no. 12404091
  misc_feature (1)..(113): Homolog of NCBI NO: 34905298 NR Description: P0577B11.20 [Oryza sativa (japonica
  misc_feature (1)..(111): Homolog of NCBI NO: 18415295 NR Description: putative protein; protein id: At4g19350.1, by cDNA: 38902. [Arabidopsis thaliana] unknown [Arabidopsis thaliana] >gi|26450673|dbj|BAC42447.1|
  misc_feature (1)..(111): Homolog of NCBI NO: 7487713 NR Description: hypothetical protein T5K18.130 - Arabidopsis >gi|3080365|emb|CAA18622.1| putative protein [Arabidopsis >gi|7268730|emb|CAB78937.1| putative protein [Arabidopsis
MKNLHANVVDEFDDFCQETQVAAALEKIDDFVEKQNLDALSSEKTTVEEIEEKVSRAKKDEIEYLTGLLKKVEESNNAMKARIDLLKKGEDLTAARDVLNKMTQWNSALVENINP

SEQ ID NO: 10550 - DNA, 1517 bp, Zea mays subsp. mays; identical to SEQ ID NO: 6442
  misc_feature (1)..(1517): Ceres Seq. ID no. 12404731
  misc_feature: MA Experiment ID: 108543 Result: Up-regulated in Transcription

SEQ ID NO: 10551 - protein, 406 aa, Zea mays subsp. mays; identical to SEQ ID NO: 6443
  peptide (1)..(406): Ceres Seq. ID no. 12404732
  misc_feature (177)..(219): Pfam Name: LysM domain Pfam Description: LysM domain
  misc_feature (177)..(219): Pfam Name: LysM domain Pfam Description: LysM domain
  misc_feature (10)..(396): Homolog of NCBI NO: 18395044 NR Description: expressed protein; protein id: At1g21880.1, by cDNA: gi_15982869 [Arabidopsis thaliana]
  misc_feature (1)..(375): Homolog of NCBI NO: 30699276 NR Description: expressed protein [Arabidopsis thaliana]
  misc_feature (10)..(314): Homolog of NCBI NO: 30687570 NR Description: expressed protein [Arabidopsis thaliana]
  misc_feature (1)..(375): Homolog of NCBI NO: 25406518 NR Description: unknown protein T5M16.22 [imported] - Arabidopsis
  misc_feature (30)..(325): Homolog of NCBI NO: 28207683 NR Description: Erwinia induced protein 1 [Solanum tuberosum]
  misc_feature (1)..(375): Homolog of NCBI NO: 30699276 NR Description: expressed protein [Arabidopsis thaliana]
  misc_feature (1)..(375): Homolog of NCBI NO: 25406518 NR Description: unknown protein T5M16.22 [imported] - Arabidopsis
  misc_feature (187)..(385): Homolog of NCBI NO: 13592175 NR Description: ppg3 [Leishmania major]
  misc_feature (323)..(380): Homolog of NCBI NO: 1084362 NR Description: extensin-like protein S3 - alfalfa
  misc_feature (1)..(330): Homolog of NCBI NO: 21593990 NR Description: unknown [Arabidopsis thaliana]
  misc_feature (1)..(330): Homolog of NCBI NO: 18398317 NR Description: expressed protein; protein id: At2g17120.1, by cDNA: 6280., supported by cDNA: gi_15810364, supported by
  misc_feature (1)..(324): Homolog of NCBI NO: 22758281 NR Description: Unknown protein [Oryza sativa (japonica
  misc_feature (30)..(325): Homolog of NCBI NO: 28207683 NR Description: Erwinia induced protein 1 [Solanum tuberosum]
  misc_feature (10)..(314): Homolog of NCBI NO: 30687570 NR Description: expressed protein [Arabidopsis thaliana]
  misc_feature (10)..(396): Homolog of NCBI NO: 18395044 NR Description: expressed protein; protein id: At1g21880.1, by cDNA: gi_15982869 [Arabidopsis thaliana]
  misc_feature (1)..(324): Homolog of NCBI NO: 22758281 NR Description: Unknown protein [Oryza sativa (japonica
  misc_feature (1)..(330): Homolog of NCBI NO: 18398317 NR Description: expressed protein; protein id: At2g17120.1, by cDNA: 6280., supported by cDNA: gi_15810364, supported by
  misc_feature (1)..(330): Homolog of NCBI NO: 21593990 NR Description: unknown [Arabidopsis thaliana]
  misc_feature (323)..(380): Homolog of NCBI NO: 1084362 NR Description: extensin-like protein S3 - alfalfa
  misc_feature (187)..(385): Homolog of NCBI NO: 13592175 NR Description: ppg3 [Leishmania major]

SEQ ID NO: 10552 - protein, 359 aa, Zea mays subsp. mays; identical to SEQ ID NO: 6444
  peptide (1)..(359): Ceres Seq. ID no. 12404733
  misc_feature (130)..(172): Pfam Name: LysM domain Pfam Description: LysM domain
  misc_feature (130)..(172): Pfam Name: LysM domain Pfam Description: LysM domain
  misc_feature (1)..(349): Homolog of NCBI NO: 18395044 NR Description: expressed protein; protein id: At1g21880.1, by cDNA: gi_15982869 [Arabidopsis thaliana]
  misc_feature (1)..(328): Homolog of NCBI NO: 30699276 NR Description: expressed protein [Arabidopsis thaliana]
  misc_feature (1)..(267): Homolog of NCBI NO: 30687570 NR Description: expressed protein [Arabidopsis thaliana]
  misc_feature (1)..(328): Homolog of NCBI NO: 25406518 NR Description: unknown protein T5M16.22 [imported] - Arabidopsis
  misc_feature (1)..(278): Homolog of NCBI NO: 28207683 NR Description: Erwinia induced protein 1 [Solanum tuberosum]
  misc_feature (1)..(277): Homolog of NCBI NO: 22758281 NR Description: Unknown protein [Oryza sativa (japonica
  misc_feature (1)..(283): Homolog of NCBI NO: 18398317 NR Description: expressed protein; protein id: At2g17120.1, by cDNA: 6280., supported by cDNA: gi_15810364, supported by
  misc_feature (1)..(283): Homolog of NCBI NO: 21593990 NR Description: unknown [Arabidopsis thaliana]
  misc_feature (276)..(333): Homolog of NCBI NO: 1084362 NR Description: extensin-like protein S3 - alfalfa
  misc_feature (140)..(338): Homolog of NCBI NO: 13592175 NR Description: ppg3 [Leishmania major]
  misc_feature (1)..(328): Homolog of NCBI NO: 30699276 NR Description: expressed protein [Arabidopsis thaliana]
  misc_feature (1)..(267): Homolog of NCBI NO: 30687570 NR Description: expressed protein [Arabidopsis thaliana]
  misc_feature (1)..(328): Homolog of NCBI NO: 25406518 NR Description: unknown protein T5M16.22 [imported] - Arabidopsis
  misc_feature (1)..(278): Homolog of NCBI NO: 28207683 NR Description: Erwinia induced protein 1 [Solanum tuberosum]
  misc_feature (1)..(277): Homolog of NCBI NO: 22758281 NR Description: Unknown protein [Oryza sativa (japonica
  misc_feature (1)..(283): Homolog of NCBI NO: 18398317 NR Description: expressed protein; protein id: At2g17120.1, by cDNA: 6280., supported by cDNA: gi_15810364, supported by
  misc_feature (1)..(349): Homolog of NCBI NO: 18395044 NR Description: expressed protein; protein id: At1g21880.1, by cDNA: gi_15982869 [Arabidopsis thaliana]
  misc_feature (1)..(283): Homolog of NCBI NO: 21593990 NR Description: unknown [Arabidopsis thaliana]
  misc_feature (276)..(333): Homolog of NCBI NO: 1084362 NR Description: extensin-like protein S3 - alfalfa
  misc_feature (140)..(338): Homolog of NCBI NO: 13592175 NR Description: ppg3 [Leishmania major]

SEQ ID NO: 10553 - DNA, 882 bp, Zea mays subsp. mays
  misc_feature (1)..(882): Ceres Seq. ID no. 12595582
  misc_feature: MA Experiment ID: 108528 Result: Down-regulated in Transcription
  misc_feature: MA Experiment 108528 PARAMETER Experiment Name: Zm_Imbibed_Seeds_P Parameter: Age (day) Value: 5 vs. 2
  misc_feature: MA Experiment 108528 PARAMETER Experiment Name: Zm_Imbibed_Seeds_P Parameter: Organism Value: Zea mays
  misc_feature: MA Experiment 108528 PARAMETER Experiment Name: Zm_Imbibed_Seeds_P Parameter: Plant Line Value: 35A19
  misc_feature: MA Experiment 108528 PARAMETER Experiment Name: Zm_Imbibed_Seeds_P Parameter: Tissue Value: Aerial vs. Embryo
  misc_feature: MA Experiment ID: 108529 Result: Down-regulated in Transcription
  misc_feature: MA Experiment 108529 PARAMETER Experiment Name: Zm_Imbibed_Seeds_P Parameter: Age (day) Value: 5 vs. 2
  misc_feature: MA Experiment 108529 PARAMETER Experiment Name: Zm_Imbibed_Seeds_P Parameter: Organism Value: Zea mays
  misc_feature: MA Experiment 108529 PARAMETER Experiment Name: Zm_Imbibed_Seeds_P Parameter: Plant Line Value: 35A19
  misc_feature: MA Experiment 108529 PARAMETER Experiment Name: Zm_Imbibed_Seeds_P Parameter: Tissue Value: Roots vs. Embryo
  misc_feature: MA Experiment ID: 108530 Result: Down-regulated in Transcription
  misc_feature: MA Experiment 108530 PARAMETER Experiment Name: Zm_Imbibed_Seeds_P Parameter: Age (day) Value: 6 vs. 2
  misc_feature: MA Experiment 108530 PARAMETER Experiment Name: Zm_Imbibed_Seeds_P Parameter: Organism Value: Zea mays
  misc_feature: MA Experiment 108530 PARAMETER Experiment Name: Zm_Imbibed_Seeds_P Parameter: Plant Line Value: 35A19
  misc_feature: MA Experiment 108530 PARAMETER Experiment Name: Zm_Imbibed_Seeds_P Parameter: Tissue Value: Aerial vs. Embryo
  misc_feature: MA Experiment ID: 108543 Result: Down-regulated in Transcription
  misc_feature: MA Experiment ID: 108544 Result: Down-regulated in Transcription
  misc_feature: MA Experiment ID: 108545 Result: Down-regulated in Transcription
  misc_feature: MA Experiment 108545 PARAMETER Experiment Name: Zm_Imbibed_Seeds_P Parameter: Age (day) Value: 3 vs. 2
  misc_feature: MA Experiment 108545 PARAMETER Experiment Name: Zm_Imbibed_Seeds_P Parameter: Organism Value: Zea mays
  misc_feature: MA Experiment 108545 PARAMETER Experiment Name: Zm_Imbibed_Seeds_P Parameter: Plant Line Value: 35A19
  misc_feature: MA Experiment 108545 PARAMETER Experiment Name: Zm_Imbibed_Seeds_P Parameter: Tissue Value: Aerial vs. Embryo
  misc_feature: MA Experiment ID: 108546 Result: Down-regulated in Transcription
  misc_feature: MA Experiment 108546 PARAMETER Experiment Name: Zm_Imbibed_Seeds_P Parameter: Age (day) Value: 3 vs. 2
  misc_feature: MA Experiment 108546 PARAMETER Experiment Name: Zm_Imbibed_Seeds_P Parameter: Organism Value: Zea mays
  misc_feature: MA Experiment 108546 PARAMETER Experiment Name: Zm_Imbibed_Seeds_P Parameter: Plant Line Value: 35A19
  misc_feature: MA Experiment 108546 PARAMETER Experiment Name: Zm_Imbibed_Seeds_P Parameter: Tissue Value: Roots vs. Embryo
  misc_feature: MA Experiment ID: 108547 Result: Down-regulated in Transcription
  misc_feature: MA Experiment 108547 PARAMETER Experiment Name: Zm_Imbibed_Seeds_P Parameter: Age (day) Value: 4 vs. 2
  misc_feature: MA Experiment 108547 PARAMETER Experiment Name: Zm_Imbibed_Seeds_P Parameter: Organism Value: Zea mays
  misc_feature: MA Experiment 108547 PARAMETER Experiment Name: Zm_Imbibed_Seeds_P Parameter: Plant Line Value: 35A19
  misc_feature: MA Experiment 108547 PARAMETER Experiment Name: Zm_Imbibed_Seeds_P Parameter: Tissue Value: Aerial vs. Embryo
  misc_feature: MA Experiment ID: 108688 Result: Down-regulated in Transcription
  misc_feature: MA Experiment 108688 PARAMETER Experiment Name: Zm_Embryos-Flowers__P Parameter: Tissue Value: Immature Flowers vs. Aerial+
  misc_feature: MA Experiment ID: 20000535 Result: Up-regulated in Transcription
  misc_feature: MA Experiment 20000535 PARAMETER Experiment Name: Zm_Hybrid_Seed_Dev_P Parameter: DAP Value: 30 vs. 12
  misc_feature: MA Experiment 20000535 PARAMETER Experiment Name: Zm_Hybrid_Seed_Dev_P Parameter: Organism Value: Zea mays
  misc_feature: MA Experiment 20000535 PARAMETER Experiment Name: Zm_Hybrid_Seed_Dev_P Parameter: Plant Line Value: 35A19
  misc_feature: MA Experiment 20000535 PARAMETER Experiment Name: Zm_Hybrid_Seed_Dev_P Parameter: Tissue Value: Embryo vs. Unfert Floret
gaatctatcgcactcgtagtcgtagctcaagcatcagcggcaggagctctgggcagcgtgcgcacgtggggtacctagctcgctctgctagcctaccatggctgatcaccaccggggcgcgacgggaggtggcgggggctacggcgacctccagcgcgggggcggcatgcacggcgaggcgcagcagcagcagaagcagggcgccatgatgacggcgctcaaggccgcgacggccgcgaccttcggcgggtcgatgctggtgctgtccgggctgatcctggccggcaccgtgatcgcgctcacggtggccacccccgtgctggtgatcttcagcccggtgctggtgccagccgccatcgcgctggcgctcatggcggccgggttcgtcacctccggcggcctcggcgtcgctgcgctgtccgtgttctcctggatgtacaagtacctgacgggcaagcacccgccgggcgccgaccagctggaccacgccaaggcgaggctggcgtccaaggcccgcgacatcaaggatgcagcacagcaccgcatcgaccaggcgcaggggtcttgagagaagaaccacactcgagcggaccgcgcgcgcgtcctccttgaaccactgccggcgcggcggcatatggcccttaaaggcggtggctgctgctacgtacgctgccgtagagtctcggtcgccgcgatagctctagctagtcgtttatgtgttgtgctttgtgtgtgcatgcatgtgtctgggggcatgcagtgcagtgcagtactatatgctgtatgcgtctctctttgatcggagaggcggatgtacagcatgctcgatatgtctagtttggatgtcatgtttatgatgaggaataaaatgcaggtcaggtg

SEQ ID NO: 10554 - protein, 156 aa, Zea mays subsp. mays
  peptide (1)..(156): Ceres Seq. ID no. 12595583
  misc_feature (36)..(146): Pfam Name: Oleosin Pfam Description: Oleosin
  misc_feature (36)..(146): Pfam Name: Oleosin Pfam Description: Oleosin
  misc_feature (1)..(156): Homolog of NCBI NO: 3334474 NR Description: OLEOSIN ZM-I (OLEOSIN 16 KD) (LIPID
  misc_feature (11)..(156): Homolog of NCBI NO: 82705 NR Description: lipid body-associated major protein L3 - maize
  misc_feature (1)..(156): Homolog of NCBI NO: 3334280 NR Description: OLEOSIN 16 KD (OSE701) >gi|7442010|pir||T03378
  misc_feature (1)..(156): Homolog of NCBI NO: 38346165 NR Description: OSJNBa0079A21.12 [Oryza sativa (japonica
  misc_feature (2)..(156): Homolog of NCBI NO: 1362168 NR Description: oleosin 2 - barley >gi|963064|emb|CAA57995.1| low
  misc_feature (11)..(156): Homolog of NCBI NO: 82705 NR Description: lipid body-associated major protein L3 - maize
  misc_feature (1)..(156): Homolog of NCBI NO: 38346165 NR Description: OSJNBa0079A21.12 [Oryza sativa (japonica
  misc_feature (24)..(147): Homolog of NCBI NO: 2119749 NR Description: oleosin - almond
  misc_feature (26)..(156): Homolog of NCBI NO: 8515912 NR Description: oleosin [Elaeis guineensis]
  misc_feature (1)..(132): Homolog of NCBI NO: 4096177 NR Description: early embryogenesis protein [Oryza sativa]
  misc_feature (1)..(156): Homolog of NCBI NO: 7442012 NR Description: oleosin isoform R16 - rice
  misc_feature (1)..(156): Homolog of NCBI NO: 3334281 NR Description: Oleosin 16 kDa >gi|1622939|gb|AAB67992.1| oleosin
  misc_feature (2)..(156): Homolog of NCBI NO: 1362168 NR Description: oleosin 2 - barley >gi|963064|emb|CAA57995.1| low
  misc_feature (1)..(156): Homolog of NCBI NO: 3334280 NR Description: OLEOSIN 16 KD (OSE701) >gi|7442010|pir||T03378
  misc_feature (1)..(156): Homolog of NCBI NO: 3334474 NR Description: OLEOSIN ZM-I (OLEOSIN 16 KD) (LIPID
  misc_feature (1)..(156): Homolog of NCBI NO: 3334281 NR Description: Oleosin 16 kDa >gi|1622939|gb|AAB67992.1| oleosin
  misc_feature (1)..(156): Homolog of NCBI NO: 7442012 NR Description: oleosin isoform R16 - rice
  misc_feature (1)..(132): Homolog of NCBI NO: 4096177 NR Description: early embryogenesis protein [Oryza sativa]
  misc_feature (26)..(156): Homolog of NCBI NO: 8515912 NR Description: oleosin [Elaeis guineensis]
  misc_feature (24)..(147): Homolog of NCBI NO: 2119749 NR Description: oleosin - almond
MADHHRGATGGGGGYGDLQRGGGMHGEAQQQQKQGAMMTALKAATAATFGGSMLVLSGLILAGTVIALTVATPVLVIFSPVLVPAAIALALMAAGFVTSGGLGVAALSVFSWMYKYLTGKHPPGADQLDHAKARLASKARDIKDAAQHRIDQAQGS

SEQ ID NO: 10555 - protein, 133 aa, Zea mays subsp. mays
  peptide (1)..(133): Ceres Seq. ID no. 12595584
  misc_feature (13)..(123): Pfam Name: Oleosin Pfam Description: Oleosin
  misc_feature (13)..(123): Pfam Name: Oleosin Pfam Description: Oleosin
  misc_feature (1)..(133): Homolog of NCBI NO: 3334474 NR Description: OLEOSIN ZM-I (OLEOSIN 16 KD) (LIPID
  misc_feature (1)..(133): Homolog of NCBI NO: 82705 NR Description: lipid body-associated major protein L3 - maize
  misc_feature (1)..(133): Homolog of NCBI NO: 3334280 NR Description: OLEOSIN 16 KD (OSE701) >gi|7442010|pir||T03378
  misc_feature (1)..(133): Homolog of NCBI NO: 38346165 NR Description: OSJNBa0079A21.12 [Oryza sativa (japonica
  misc_feature (1)..(133): Homolog of NCBI NO: 1362168 NR Description: oleosin 2 - barley >gi|963064|emb|CAA57995.1| low
  misc_feature (1)..(133): Homolog of NCBI NO: 82705 NR Description: lipid body-associated major protein L3 - maize
  misc_feature (1)..(133): Homolog of NCBI NO: 38346165 NR Description: OSJNBa0079A21.12 [Oryza sativa (japonica
  misc_feature (1)..(124): Homolog of NCBI NO: 2119749 NR Description: oleosin - almond
  misc_feature (3)..(133): Homolog of NCBI NO: 8515912 NR Description: oleosin [Elaeis guineensis]
  misc_feature (1)..(109): Homolog of NCBI NO: 4096177 NR Description: early embryogenesis protein [Oryza sativa]
  misc_feature (1)..(133): Homolog of NCBI NO: 7442012 NR Description: oleosin isoform R16 - rice
  misc_feature (1)..(133): Homolog of NCBI NO: 3334281 NR Description: Oleosin 16 kDa >gi|1622939|gb|AAB67992.1| oleosin
  misc_feature (1)..(133): Homolog of NCBI NO: 1362168 NR Description: oleosin 2 - barley >gi|963064|emb|CAA57995.1| low
  misc_feature (1)..(133): Homolog of NCBI NO: 3334280 NR Description: OLEOSIN 16 KD (OSE701) >gi|7442010|pir||T03378
  misc_feature (1)..(133): Homolog of NCBI NO: 3334474 NR Description: OLEOSIN ZM-I (OLEOSIN 16 KD) (LIPID
  misc_feature (1)..(133): Homolog of NCBI NO: 3334281 NR Description: Oleosin 16 kDa >gi|1622939|gb|AAB67992.1| oleosin
  misc_feature (1)..(133): Homolog of NCBI NO: 7442012 NR Description: oleosin isoform R16 - rice
  misc_feature (1)..(109): Homolog of NCBI NO: 4096177 NR Description: early embryogenesis protein [Oryza sativa]
  misc_feature (3)..(133): Homolog of NCBI NO: 8515912 NR Description: oleosin [Elaeis guineensis]
  misc_feature (1)..(124): Homolog of NCBI NO: 2119749 NR Description: oleosin - almond
MHGEAQQQQKQGAMMTALKAATAATFGGSMLVLSGLILAGTVIALTVATPVLVIFSPVLVPAAIALALMAAGFVTSGGLGVAALSVFSWMYKYLTGKHPPGADQLDHAKARLASKARDIKDAAQHRIDQAQGS

SEQ ID NO: 10556 - protein, 120 aa, Zea mays subsp. mays
  peptide (1)..(120): Ceres Seq. ID no. 12595585
  misc_feature (1)..(110): Pfam Name: Oleosin Pfam Description: Oleosin
  misc_feature (1)..(110): Pfam Name: Oleosin Pfam Description: Oleosin
  misc_feature (1)..(120): Homolog of NCBI NO: 3334474 NR Description: OLEOSIN ZM-I (OLEOSIN 16 KD) (LIPID
  misc_feature (1)..(120): Homolog of NCBI NO: 82705 NR Description: lipid body-associated major protein L3 - maize
  misc_feature (1)..(120): Homolog of NCBI NO: 3334280 NR Description: OLEOSIN 16 KD (OSE701) >gi|7442010|pir||T03378
  misc_feature (1)..(120): Homolog of NCBI NO: 38346165 NR Description: OSJNBa0079A21.12 [Oryza sativa (japonica
  misc_feature (1)..(120): Homolog of NCBI NO: 1362168 NR Description: oleosin 2 - barley >gi|963064|emb|CAA57995.1| low
  misc_feature (1)..(120): Homolog of NCBI NO: 82705 NR Description: lipid body-associated major protein L3 - maize
  misc_feature (1)..(120): Homolog of NCBI NO: 38346165 NR Description: OSJNBa0079A21.12 [Oryza sativa (japonica
  misc_feature (1)..(111): Homolog of NCBI NO: 2119749 NR Description: oleosin - almond
  misc_feature (1)..(120): Homolog of NCBI NO: 8515912 NR Description: oleosin [Elaeis guineensis]
  misc_feature (1)..(96): Homolog of NCBI NO: 4096177 NR Description: early embryogenesis protein [Oryza sativa]
  misc_feature (1)..(120): Homolog of NCBI NO: 7442012 NR Description: oleosin isoform R16 - rice
  misc_feature (1)..(120): Homolog of NCBI NO: 3334281 NR Description: Oleosin 16 kDa >gi|1622939|gb|AAB67992.1| oleosin
  misc_feature (1)..(120): Homolog of NCBI NO: 1362168 NR Description: oleosin 2 - barley >gi|963064|emb|CAA57995.1| low
  misc_feature (1)..(120): Homolog of NCBI NO: 3334280 NR Description: OLEOSIN 16 KD (OSE701) >gi|7442010|pir||T03378
  misc_feature (1)..(120): Homolog of NCBI NO: 3334474 NR Description: OLEOSIN ZM-I (OLEOSIN 16 KD) (LIPID
  misc_feature (1)..(120): Homolog of NCBI NO: 3334281 NR Description: Oleosin 16 kDa >gi|1622939|gb|AAB67992.1| oleosin
  misc_feature (1)..(120): Homolog of NCBI NO: 7442012 NR Description: oleosin isoform R16 - rice
  misc_feature (1)..(96): Homolog of NCBI NO: 4096177 NR Description: early embryogenesis protein [Oryza sativa]
  misc_feature (1)..(120): Homolog of NCBI NO: 8515912 NR Description: oleosin [Elaeis guineensis]
  misc_feature (1)..(111): Homolog of NCBI NO: 2119749 NR Description: oleosin - almond
MMTALKAATAATFGGSMLVLSGLILAGTVIALTVATPVLVIFSPVLVPAAIALALMAAGFVTSGGLGVAALSVFSWMYKYLTGKHPPGADQLDHAKARLASKARDIKDAAQHRIDQAQGS

SEQ ID NO: 10557 - DNA, 834 bp, Zea mays subsp. mays
  misc_feature (1)..(834): Ceres Seq. ID no. 12376239
  misc_feature: MA Experiment ID: 108504 Result: Down-regulated in Transcription
  misc_feature: MA Experiment 108504 PARAMETER Experiment Name: Zm_Drought_P Parameter: Age (day) Value: 8
  misc_feature: MA Experiment 108504 PARAMETER Experiment Name: Zm_Drought_P Parameter: Organism Value: Zea mays
  misc_feature: MA Experiment 108504 PARAMETER Experiment Name: Zm_Drought_P Parameter: Plant Line Value: 35A19
  misc_feature: MA Experiment 108504 PARAMETER Experiment Name: Zm_Drought_P Parameter: Timepoint (hr) Value: 12
  misc_feature: MA Experiment 108504 PARAMETER Experiment Name: Zm_Drought_P Parameter: Tissue Value: Aerial
  misc_feature: MA Experiment 108504 PARAMETER Experiment Name: Zm_Drought_P Parameter: Treatment Value: Drought vs. No Drought
  misc_feature: MA Experiment ID: 108527 Result: Down-regulated in Transcription
  misc_feature: MA Experiment 108527 PARAMETER Experiment Name: Zm_5mM_NO_P Parameter: Age (day) Value: 8
  misc_feature: MA Experiment 108527 PARAMETER Experiment Name: Zm_5mM_NO_P Parameter: Organism Value: Zea mays
  misc_feature: MA Experiment 108527 PARAMETER Experiment Name: Zm_5mM_NO_P Parameter: Plant Line Value: 35A19
  misc_feature: MA Experiment 108527 PARAMETER Experiment Name: Zm_5mM_NO_P Parameter: Timepoint (hr) Value: 6
  misc_feature: MA Experiment 108527 PARAMETER Experiment Name: Zm_5mM_NO_P Parameter: Tissue Value: Aerial
  misc_feature: MA Experiment 108527 PARAMETER Experiment Name: Zm_5mM_NO_P Parameter: Treatment Value: 5mM NO vs. No Treatment
  misc_feature: MA Experiment ID: 108535 Result: Up-regulated in Transcription
  misc_feature: MA Experiment 108535 PARAMETER Experiment Name: Zm_Meristem_P Parameter: Age (day) Value: 8
  misc_feature: MA Experiment 108535 PARAMETER Experiment Name: Zm_Meristem_P Parameter: Organism Value: Zea mays
  misc_feature: MA Experiment 108535 PARAMETER Experiment Name: Zm_Meristem_P Parameter: Plant Line Value: 35A19
  misc_feature: MA Experiment 108535 PARAMETER Experiment Name: Zm_Meristem_P Parameter: Tissue Value: Root Meristem vs. Above Root Meristem
  misc_feature: MA Experiment ID: 108540 Result: Down-regulated in Transcription
  misc_feature: MA Experiment 108540 PARAMETER Experiment Name: Zm_20percent_PEG_P Parameter: Age (day) Value: 8
  misc_feature: MA Experiment 108540 PARAMETER Experiment Name: Zm_20percent_PEG_P Parameter: Organism Value: Zea mays
  misc_feature: MA Experiment 108540 PARAMETER Experiment Name: Zm_20percent_PEG_P Parameter: Plant Line Value: 35A19
  misc_feature: MA Experiment 108540 PARAMETER Experiment Name: Zm_20percent_PEG_P Parameter: Timepoint (hr) Value: 6
  misc_feature: MA Experiment 108540 PARAMETER Experiment Name: Zm_20percent_PEG_P Parameter: Tissue Value: Aerial
  misc_feature: MA Experiment 108540 PARAMETER Experiment Name: Zm_20percent_PEG_P Parameter: Treatment Value: 20percent PEG vs. No Treatment
  misc_feature: MA Experiment ID: 108544 Result: Down-regulated in Transcription
  misc_feature: MA Experiment ID: 108559 Result: Down-regulated in Transcription
  misc_feature: MA Experiment 108559 PARAMETER Experiment Name: Zm_5mM_NO_P Parameter: Age (day) Value: 8
  misc_feature: MA Experiment 108559 PARAMETER Experiment Name: Zm_5mM_NO_P Parameter: Organism Value: Zea mays
  misc_feature: MA Experiment 108559 PARAMETER Experiment Name: Zm_5mM_NO_P Parameter: Plant Line Value: 35A19
  misc_feature: MA Experiment 108559 PARAMETER Experiment Name: Zm_5mM_NO_P Parameter: Timepoint (hr) Value: 12
  misc_feature: MA Experiment 108559 PARAMETER Experiment Name: Zm_5mM_NO_P Parameter: Tissue Value: Aerial
  misc_feature: MA Experiment 108559 PARAMETER Experiment Name: Zm_5mM_NO_P Parameter: Treatment Value: 5mM NO vs. No Treatment
  misc_feature: MA Experiment ID: 108597 Result: Down-regulated in Transcription
  misc_feature: MA Experiment 108597 PARAMETER Experiment Name: Zm_100uM_ABA_P Parameter: Age (day) Value: 9
  misc_feature: MA Experiment 108597 PARAMETER Experiment Name: Zm_100uM_ABA_P Parameter: Organism Value: Zea mays
  misc_feature: MA Experiment 108597 PARAMETER Experiment Name: Zm_100uM_ABA_P Parameter: Plant Line Value: 35A19
  misc_feature: MA Experiment 108597 PARAMETER Experiment Name: Zm_100uM_ABA_P Parameter: Timepoint (hr) Value: 24
  misc_feature: MA Experiment 108597 PARAMETER Experiment Name: Zm_100uM_ABA_P Parameter: Tissue Value: Aerial
  misc_feature: MA Experiment 108597 PARAMETER Experiment Name: Zm_100uM_ABA_P Parameter: Treatment Value: 100uM ABA vs. No Treatment
  misc_feature: MA Experiment ID: 108687 Result: Down-regulated in Transcription
  misc_feature: MA Experiment 108687 PARAMETER Experiment Name: Zm_Embryos-Flowers__P Parameter: Tissue Value: Embryo vs. Aerial+
  misc_feature: MA Experiment ID: 108689 Result: Down-regulated in Transcription
  misc_feature: MA Experiment 108689 PARAMETER Experiment Name: Zm_Drought_Roots_P Parameter: Age (day) Value: 9
  misc_feature: MA Experiment 108689 PARAMETER Experiment Name: Zm_Drought_Roots_P Parameter: Organism Value: Zea mays
  misc_feature: MA Experiment 108689 PARAMETER Experiment Name: Zm_Drought_Roots_P Parameter: Plant Line Value: 35A19
  misc_feature: MA Experiment 108689 PARAMETER Experiment Name: Zm_Drought_Roots_P Parameter: Timepoint (hr) Value: 24
  misc_feature: MA Experiment 108689 PARAMETER Experiment Name: Zm_Drought_Roots_P Parameter: Tissue Value: Roots
  misc_feature: MA Experiment 108689 PARAMETER Experiment Name: Zm_Drought_Roots_P Parameter: Treatment Value: Drought vs. No Drought
  misc_feature: MA Experiment ID: 20000108 Result: Up-regulated in Transcription
  misc_feature: MA Experiment 20000108 PARAMETER Experiment Name: Zm_Root-Tips_P Parameter: Age (day) Value: 12
  misc_feature: MA Experiment 20000108 PARAMETER Experiment Name: Zm_Root-Tips_P Parameter: Organism Value: Zea mays
  misc_feature: MA Experiment 20000108 PARAMETER Experiment Name: Zm_Root-Tips_P Parameter: Tissue Value: Root tips vs. Root mid region    35
  misc_feature: MA Experiment 20000108 PARAMETER Experiment Name: Zm_Root-Tips_P Parameter: Tissue Value: Root tips vs. Root mid region   Sequence Listing-Misc Features (4)
  misc_feature: MA Experiment ID: 20000478 Result: Down-regulated in Transcription
  misc_feature: MA Experiment 20000478 PARAMETER Experiment Name: Zm_5mM_SA_P Parameter: Age (day) Value: 11
  misc_feature: MA Experiment 20000478 PARAMETER Experiment Name: Zm_5mM_SA_P Parameter: Organism Value: Zea mays
  misc_feature: MA Experiment 20000478 PARAMETER Experiment Name: Zm_5mM_SA_P Parameter: Plant Line Value: 35A19
  misc_feature: MA Experiment 20000478 PARAMETER Experiment Name: Zm_5mM_SA_P Parameter: Timepoint (hr) Value: 72
  misc_feature: MA Experiment 20000478 PARAMETER Experiment Name: Zm_5mM_SA_P Parameter: Tissue Value: Aerial
  misc_feature: MA Experiment 20000478 PARAMETER Experiment Name: Zm_5mM_SA_P Parameter: Treatment Value: 5mM SA vs. No Treatment
  misc_feature: MA Experiment ID: 20000479 Result: Down-regulated in Transcription
  misc_feature: MA Experiment 20000479 PARAMETER Experiment Name: Zm_Drought_P Parameter: Age (day) Value: 10
  misc_feature: MA Experiment 20000479 PARAMETER Experiment Name: Zm_Drought_P Parameter: Organism Value: Zea mays
  misc_feature: MA Experiment 20000479 PARAMETER Experiment Name: Zm_Drought_P Parameter: Plant Line Value: 35A19
  misc_feature: MA Experiment 20000479 PARAMETER Experiment Name: Zm_Drought_P Parameter: Timepoint (hr) Value: 48
  misc_feature: MA Experiment 20000479 PARAMETER Experiment Name: Zm_Drought_P Parameter: Tissue Value: Aerial
  misc_feature: MA Experiment 20000479 PARAMETER Experiment Name: Zm_Drought_P Parameter: Treatment Value: Drought vs. No Drought
  misc_feature: MA Experiment ID: 20000480 Result: Down-regulated in Transcription
  misc_feature: MA Experiment 20000480 PARAMETER Experiment Name: Zm_Drought_P Parameter: Age (day) Value: 11
  misc_feature: MA Experiment 20000480 PARAMETER Experiment Name: Zm_Drought_P Parameter: Organism Value: Zea mays
  misc_feature: MA Experiment 20000480 PARAMETER Experiment Name: Zm_Drought_P Parameter: Plant Line Value: 35A19
  misc_feature: MA Experiment 20000480 PARAMETER Experiment Name: Zm_Drought_P Parameter: Timepoint (hr) Value: 72
  misc_feature: MA Experiment 20000480 PARAMETER Experiment Name: Zm_Drought_P Parameter: Tissue Value: Aerial
  misc_feature: MA Experiment 20000480 PARAMETER Experiment Name: Zm_Drought_P Parameter: Treatment Value: Drought vs. No Drought
  misc_feature: MA Experiment ID: 20000492 Result: Down-regulated in Transcription
  misc_feature: MA Experiment 20000492 PARAMETER Experiment Name: Zm_Hybrid_Seed_Dev_P Parameter: DAP Value: 12
  misc_feature: MA Experiment 20000492 PARAMETER Experiment Name: Zm_Hybrid_Seed_Dev_P Parameter: Organism Value: Zea mays
  misc_feature: MA Experiment 20000492 PARAMETER Experiment Name: Zm_Hybrid_Seed_Dev_P Parameter: Plant Line Value: 35A19
  misc_feature: MA Experiment 20000492 PARAMETER Experiment Name: Zm_Hybrid_Seed_Dev_P Parameter: Tissue Value: Fert Kernel vs. Unfert Floret
  misc_feature: MA Experiment ID: 20000535 Result: Down-regulated in Transcription
  misc_feature: MA Experiment 20000535 PARAMETER Experiment Name: Zm_Hybrid_Seed_Dev_P Parameter: DAP Value: 30 vs. 12
  misc_feature: MA Experiment 20000535 PARAMETER Experiment Name: Zm_Hybrid_Seed_Dev_P Parameter: Organism Value: Zea mays
  misc_feature: MA Experiment 20000535 PARAMETER Experiment Name: Zm_Hybrid_Seed_Dev_P Parameter: Plant Line Value: 35A19
  misc_feature: MA Experiment 20000535 PARAMETER Experiment Name: Zm_Hybrid_Seed_Dev_P Parameter: Tissue Value: Embryo vs. Unfert Floret
  misc_feature: MA Experiment ID: 20000626 Result: Down-regulated in Transcription
  misc_feature: MA Experiment 20000626 PARAMETER Experiment Name: Zm_Herbicide-Treatments_P Parameter: Timepoint (hr) Value: 12
  misc_feature: MA Experiment 20000626 PARAMETER Experiment Name: Zm_Herbicide-Treatments_P Parameter: Tissue Value: Aerial
  misc_feature: MA Experiment 20000626 PARAMETER Experiment Name: Zm_Herbicide-Treatments_P Parameter: Treatment Value: Roundup vs. No Treatment
agctttgaacctggttctcctgtcgctcttcgtgcgggcgtgcggcacaccaccagaagagcggccgagcggcgcagagaagagagaaccagccgagcggagcggctgcgcttccggagggaggaaggaggatggagaaggctctcaccaagctcggcagcttcacaatctcccgcaaggccaagcaggagctctccgccatcggtgacgacatctcccgtttttcgagcacggtggaggagaaggcaaaatgggtgttcgagaaactcaaagggcacaagaagtcgctccctgatctactgcgcgagcacaacctccctccaggtctcttccctcgtaacatcatctgctacgagtacgacgaatcgacctcgaagctggtggtgcacctgtccaagccctgcgaggtgagcttcaaggattcctccaccgtaaggtatgctcctcgtgtcaaggcgactctgtcccgaggcaagctttccggggttgaaggcatgaagaccaaggtggtggtatgggtgaaggtggccagcgtgagcatcgagagctacaagtctgacaagatatgcttcatcgccggtgtgaagaagctgagaccgaaggatgcttatgaggtccctcgtgaagccatctctgtcgaggagttctgagctcaactcaactccattggtttgcctacgtagtatcattcattcgtagcatttttcgggtcccatgtgatcggcgattgatgtgctgtgatttggtagctttgtactgatattggaagcatgtggatctgttctgcctggcagaagataacccgtgcatgttatctgacgtgacgagtccttc

SEQ ID NO: 10558 - protein, 172 aa, Zea mays subsp. mays
  peptide (1)..(172): Ceres Seq. ID no. 12376240
  misc_feature (32)..(169): Pfam Name: Protein of unknown function, DUF538 Pfam Description: Protein of unknown function, DUF538
  misc_feature (1)..(169): Homolog of NCBI NO: 18395537 NR Description: expressed protein; protein id: At2g03350.1, by cDNA: 1697. [Arabidopsis thaliana] >gi|25364434|pir||D84447
  misc_feature (1)..(169): Homolog of NCBI NO: 21553803 NR Description: unknown [Arabidopsis thaliana]
  misc_feature (1)..(172): Homolog of NCBI NO: 18398279 NR Description: expressed protein; protein id: At3g08890.1, by cDNA: 20180. [Arabidopsis thaliana] unknown protein [Arabidopsis thaliana]
  misc_feature (1)..(172): Homolog of NCBI NO: 15240103 NR Description: putative protein; protein id: At5g37070.1 thaliana] >gi|10177986|dbj|BAB11359.1|
  misc_feature (1)..(172): Homolog of NCBI NO: 34914210 NR Description: OSJNBb0049O23.18 [Oryza sativa (japonica
  misc_feature (1)..(172): Homolog of NCBI NO: 15241019 NR Description: putative protein; protein id: At5g01610.1, by cDNA: 21740. [Arabidopsis thaliana] >gi|11290054|pir||T48182
  misc_feature (1)..(172): Homolog of NCBI NO: 40642817 NR Description: cp protein [Celosia cristata]
  misc_feature (1)..(172): Homolog of NCBI NO: 28466909 NR Description: At5g01610 [Arabidopsis thaliana]
  misc_feature (50)..(163): Homolog of NCBI NO: 18407279 NR Description: Expressed protein; protein id: At1g61667.1,
  misc_feature (50)..(163): Homolog of NCBI NO: 21553956 NR Description: unknown [Arabidopsis thaliana]
MEKALTKLGSFTISRKAKQELSAIGDDISRFSSTVEEKAKWVFEKLKGHKKSLPDLLREHNLPPGLFPRNIICYEYDESTSKLVVHLSKPCEVSFKDSSTVRYAPRVKATLSRGKLSGVEGMKTKVVVWVKVASVSIESYKSDKICFIAGVKKLRPKDAYEVPREAISVEEF

SEQ ID NO: 10559 - protein, 136 aa, Zea mays subsp. mays
  peptide (1)..(136): Ceres Seq. ID no. 12376241
SFEPGSPVALRAGVRHTTRRAAERRREERTSRAERLRFRREEGGWRRLSPSSAASQSPARPSRSSPPSVTTSPVFRARWRRRQNGCSRNSKGTRSRSLIYCASTTSLQVSSLVTSSATSTTNRPRSWWCTCPSPAR

SEQ ID NO: 10560 - DNA, 799 bp, Zea mays subsp. mays
  misc_feature (1)..(799): Ceres Seq. ID no. 13498294
  misc_feature: MA Experiment ID: 108528 Result: Up-regulated in Transcription
  misc_feature: MA Experiment 108528 PARAMETER Experiment Name: Zm_Imbibed_Seeds_P Parameter: Age (day) Value: 5 vs. 2
  misc_feature: MA Experiment 108528 PARAMETER Experiment Name: Zm_Imbibed_Seeds_P Parameter: Organism Value: Zea mays
  misc_feature: MA Experiment 108528 PARAMETER Experiment Name: Zm_Imbibed_Seeds_P Parameter: Plant Line Value: 35A19
  misc_feature: MA Experiment 108528 PARAMETER Experiment Name: Zm_Imbibed_Seeds_P Parameter: Tissue Value: Aerial vs. Embryo
  misc_feature: MA Experiment ID: 108529 Result: Down-regulated in Transcription
  misc_feature: MA Experiment 108529 PARAMETER Experiment Name: Zm_Imbibed_Seeds_P Parameter: Age (day) Value: 5 vs. 2
  misc_feature: MA Experiment 108529 PARAMETER Experiment Name: Zm_Imbibed_Seeds_P Parameter: Organism Value: Zea mays
  misc_feature: MA Experiment 108529 PARAMETER Experiment Name: Zm_Imbibed_Seeds_P Parameter: Plant Line Value: 35A19
  misc_feature: MA Experiment 108529 PARAMETER Experiment Name: Zm_Imbibed_Seeds_P Parameter: Tissue Value: Roots vs. Embryo
  misc_feature: MA Experiment ID: 108530 Result: Up-regulated in Transcription
  misc_feature: MA Experiment 108530 PARAMETER Experiment Name: Zm_Imbibed_Seeds_P Parameter: Age (day) Value: 6 vs. 2
  misc_feature: MA Experiment 108530 PARAMETER Experiment Name: Zm_Imbibed_Seeds_P Parameter: Organism Value: Zea mays
  misc_feature: MA Experiment 108530 PARAMETER Experiment Name: Zm_Imbibed_Seeds_P Parameter: Plant Line Value: 35A19
  misc_feature: MA Experiment 108530 PARAMETER Experiment Name: Zm_Imbibed_Seeds_P Parameter: Tissue Value: Aerial vs. Embryo
  misc_feature: MA Experiment ID: 108536 Result: Down-regulated in Transcription
  misc_feature: MA Experiment 108536 PARAMETER Experiment Name: Zm_Meristem_P Parameter: Age (day) Value: 8
  misc_feature: MA Experiment 108536 PARAMETER Experiment Name: Zm_Meristem_P Parameter: Organism Value: Zea mays
  misc_feature: MA Experiment 108536 PARAMETER Experiment Name: Zm_Meristem_P Parameter: Plant Line Value: 35A19
  misc_feature: MA Experiment 108536 PARAMETER Experiment Name: Zm_Meristem_P Parameter: Tissue Value: Shoot Meristem vs. Above Shoot Meristem
  misc_feature: MA Experiment ID: 108543 Result: Up-regulated in Transcription
  misc_feature: MA Experiment ID: 108545 Result: Up-regulated in Transcription
  misc_feature: MA Experiment 108545 PARAMETER Experiment Name: Zm_Imbibed_Seeds_P Parameter: Age (day) Value: 3 vs. 2
  misc_feature: MA Experiment 108545 PARAMETER Experiment Name: Zm_Imbibed_Seeds_P Parameter: Organism Value: Zea mays
  misc_feature: MA Experiment 108545 PARAMETER Experiment Name: Zm_Imbibed_Seeds_P Parameter: Plant Line Value: 35A19
  misc_feature: MA Experiment 108545 PARAMETER Experiment Name: Zm_Imbibed_Seeds_P Parameter: Tissue Value: Aerial vs. Embryo
  misc_feature: MA Experiment ID: 108547 Result: Up-regulated in Transcription
  misc_feature: MA Experiment 108547 PARAMETER Experiment Name: Zm_Imbibed_Seeds_P Parameter: Age (day) Value: 4 vs. 2
  misc_feature: MA Experiment 108547 PARAMETER Experiment Name: Zm_Imbibed_Seeds_P Parameter: Organism Value: Zea mays
  misc_feature: MA Experiment 108547 PARAMETER Experiment Name: Zm_Imbibed_Seeds_P Parameter: Plant Line Value: 35A19
  misc_feature: MA Experiment 108547 PARAMETER Experiment Name: Zm_Imbibed_Seeds_P Parameter: Tissue Value: Aerial vs. Embryo
  misc_feature: MA Experiment ID: 108687 Result: Down-regulated in Transcription
  misc_feature: MA Experiment 108687 PARAMETER Experiment Name: Zm_Embryos-Flowers__P Parameter: Tissue Value: Embryo vs. Aerial+
  misc_feature: MA Experiment ID: 20000488 Result: Up-regulated in Transcription
  misc_feature: MA Experiment 20000488 PARAMETER Experiment Name: Zm_50mM_NH4NO3_L_to_H_P Parameter: Organism Value: Zea mays
  misc_feature: MA Experiment 20000488 PARAMETER Experiment Name: Zm_50mM_NH4NO3_L_to_H_P Parameter: Timepoint (hr) Value: 8
  misc_feature: MA Experiment 20000488 PARAMETER Experiment Name: Zm_50mM_NH4NO3_L_to_H_P Parameter: Tissue Value: Leaves
  misc_feature: MA Experiment 20000488 PARAMETER Experiment Name: Zm_50mM_NH4NO3_L_to_H_P Parameter: Treatment Value: 50mM NH4NO3 vs. 100mM Mannitol
  misc_feature: MA Experiment ID: 20000535 Result: Down-regulated in Transcription
  misc_feature: MA Experiment 20000535 PARAMETER Experiment Name: Zm_Hybrid_Seed_Dev_P Parameter: DAP Value: 30 vs. 12
  misc_feature: MA Experiment 20000535 PARAMETER Experiment Name: Zm_Hybrid_Seed_Dev_P Parameter: Organism Value: Zea mays
  misc_feature: MA Experiment 20000535 PARAMETER Experiment Name: Zm_Hybrid_Seed_Dev_P Parameter: Plant Line Value: 35A19
  misc_feature: MA Experiment 20000535 PARAMETER Experiment Name: Zm_Hybrid_Seed_Dev_P Parameter: Tissue Value: Embryo vs. Unfert Floret
acgcagggcgtagcaaatcaggtaggcgaaatcggagcagaggccagggacgcgccagcgcgagcgataaggcacactgacatggccgccacggcgtactccaccgcgctccccggcggggcgcgcctccccgctgccggagccgccgcaccgccctctgccctcctcctcccgcggcgtaataaactgtctccgctccctctccggctccaagatgcgccgaggctgtcgttgctccgggtgaaggcctcctccgacgactcctcggccgcgagcggggacgagctcatcgccgacttgaaagccaagtgggacgccgtcgagaacaagagcactgtcctcacctacgccggcggcgctgtcgtcgctctctggctgacgtccgtcatcgtcggcgccatcaactccgtgcctctgctccccaagatcatggagcttgtcggcctcggctacaccggatggttcgtctaccgctaccttctcttcaaggaaagcaggaaagagctcgccgacgacatcgagtcgctcaagaaaaaaattgctgggacagagtaaaacatgttgttctcgtgaaactttttttggacgattctttcgggaacacgttgcctcttgtctagactccagatcagtgctacatgtctttgcactttttttttttgttgcataccttatgtcctcgtctctctggagagctttgtacgacgatggagaacaacagtgtacgatcgaactggacgccatcctcggggattgttttcttaaaatgaaatagggtatgtatccgggttttcttttc

SEQ ID NO: 10561 - protein, 184 aa, Zea mays subsp. mays
  peptide (1)..(184): Ceres Seq. ID no. 13498295
  misc_feature (29)..(184): Homolog of NCBI NO: 18411555 NR Description: expressed protein [Arabidopsis thaliana]
  misc_feature (29)..(184): Homolog of NCBI NO: 687677 NR Description: unknown
  misc_feature (28)..(184): Homolog of NCBI NO: 38175474 NR Description: unknown protein [Oryza sativa (japonica
  misc_feature (95)..(184): Homolog of NCBI NO: 7485852 NR Description: hypothetical protein F20D10.220 - Arabidopsis >gi|4467116|emb|CAB37550.1| hypothetical protein [Arabidopsis >gi|7270793|emb|CAB80475.1| hypothetical protein [Arabidopsis
  misc_feature (95)..(184): Homolog of NCBI NO: 18420175 NR Description: expressed protein [Arabidopsis thaliana]
  misc_feature (83)..(183): Homolog of NCBI NO: 18407178 NR Description: expressed protein [Arabidopsis thaliana]
  misc_feature (83)..(183): Homolog of NCBI NO: 21555057 NR Description: unknown [Arabidopsis thaliana]
  misc_feature (48)..(183): Homolog of NCBI NO: 34393236 NR Description: unknown protein [Oryza sativa (japonica
  misc_feature (61)..(181): Homolog of NCBI NO: 18403896 NR Description: expressed protein [Arabidopsis thaliana]
  misc_feature (15)..(167): Homolog of NCBI NO: 37536446 NR Description: hypothetical protein [Oryza sativa (japonica group)] >gi|18057096|gb|AAL58119.1| hypothetical protein [Oryza
TQGVANQVGEIGAEARDAPARAIRHTDMAATAYSTALPGGARLPAAGAAAPPSALLLPRRNKLSPLPLRLQDAPRLSLLRVKASSDDSSAASGDELIADLKAKWDAVENKSTVLTYAGGAVVALWLTSVIVGAINSVPLLPKIMELVGLGYTGWFVYRYLLFKESRKELADDIESLKKKIAGTE

SEQ ID NO: 10562 - protein, 157 aa, Zea mays subsp. mays
  peptide (1)..(157): Ceres Seq. ID no. 13498296
  misc_feature (2)..(157): Homolog of NCBI NO: 18411555 NR Description: expressed protein [Arabidopsis thaliana]
  misc_feature (2)..(157): Homolog of NCBI NO: 687677 NR Description: unknown
  misc_feature (1)..(157): Homolog of NCBI NO: 38175474 NR Description: unknown protein [Oryza sativa (japonica
  misc_feature (68)..(157): Homolog of NCBI NO: 7485852 NR Description: hypothetical protein F20D10.220 - Arabidopsis >gi|4467116|emb|CAB37550.1| hypothetical protein [Arabidopsis >gi|7270793|emb|CAB80475.1| hypothetical protein [Arabidopsis
  misc_feature (68)..(157): Homolog of NCBI NO: 18420175 NR Description: expressed protein [Arabidopsis thaliana]
  misc_feature (56)..(156): Homolog of NCBI NO: 18407178 NR Description: expressed protein [Arabidopsis thaliana]
  misc_feature (56)..(156): Homolog of NCBI NO: 21555057 NR Description: unknown [Arabidopsis thaliana]
  misc_feature (21)..(156): Homolog of NCBI NO: 34393236 NR Description: unknown protein [Oryza sativa (japonica
  misc_feature (34)..(154): Homolog of NCBI NO: 18403896 NR Description: expressed protein [Arabidopsis thaliana]
  misc_feature (1)..(140): Homolog of NCBI NO: 37536446 NR Description: hypothetical protein [Oryza sativa (japonica group)] >gi|18057096|gb|AAL58119.1| hypothetical protein [Oryza
MAATAYSTALPGGARLPAAGAAAPPSALLLPRRNKLSPLPLRLQDAPRLSLLRVKASSDDSSAASGDELIADLKAKWDAVENKSTVLTYAGGAVVALWLTSVIVGAINSVPLLPKIMELVGLGYTGWFVYRYLLFKESRKELADDIESLKKKIAGTE

SEQ ID NO: 10563 - DNA, 1241 bp, Zea mays subsp. mays; identical to SEQ ID NO: 7344
  misc_feature (1)..(1241): Ceres Seq. ID no. 12344775
  misc_feature: MA Experiment ID: 108522 Result: Up-regulated in Transcription
  misc_feature: MA Experiment 108522 PARAMETER Experiment Name: Zm_42deg_Heat_P Parameter: Age (day) Value: 8
  misc_feature: MA Experiment 108522 PARAMETER Experiment Name: Zm_42deg_Heat_P Parameter: Organism Value: Zea mays
  misc_feature: MA Experiment 108522 PARAMETER Experiment Name: Zm_42deg_Heat_P Parameter: Plant Line Value: 35A19
  misc_feature: MA Experiment 108522 PARAMETER Experiment Name: Zm_42deg_Heat_P Parameter: Temperature (deg C) Value: 42 vs. 22
  misc_feature: MA Experiment 108522 PARAMETER Experiment Name: Zm_42deg_Heat_P Parameter: Timepoint (hr) Value: 1
  misc_feature: MA Experiment 108522 PARAMETER Experiment Name: Zm_42deg_Heat_P Parameter: Tissue Value: Aerial
  misc_feature: MA Experiment ID: 108523 Result: Up-regulated in Transcription
  misc_feature: MA Experiment 108523 PARAMETER Experiment Name: Zm_42deg_Heat_P Parameter: Age (day) Value: 8
  misc_feature: MA Experiment 108523 PARAMETER Experiment Name: Zm_42deg_Heat_P Parameter: Organism Value: Zea mays
  misc_feature: MA Experiment 108523 PARAMETER Experiment Name: Zm_42deg_Heat_P Parameter: Plant Line Value: 35A19
  misc_feature: MA Experiment 108523 PARAMETER Experiment Name: Zm_42deg_Heat_P Parameter: Temperature (deg C) Value: 42 vs. 22
  misc_feature: MA Experiment 108523 PARAMETER Experiment Name: Zm_42deg_Heat_P Parameter: Timepoint (hr) Value: 6
  misc_feature: MA Experiment 108523 PARAMETER Experiment Name: Zm_42deg_Heat_P Parameter: Tissue Value: Aerial
  misc_feature: MA Experiment ID: 108543 Result: Down-regulated in Transcription
  misc_feature: MA Experiment ID: 20000534 Result: Down-regulated in Transcription
  misc_feature: MA Experiment 20000534 PARAMETER Experiment Name: Zm_Hybrid_Pollen_P Parameter: Age (day) Value: 8
  misc_feature: MA Experiment 20000534 PARAMETER Experiment Name: Zm_Hybrid_Pollen_P Parameter: Organism Value: Zea mays
  misc_feature: MA Experiment 20000534 PARAMETER Experiment Name: Zm_Hybrid_Pollen_P Parameter: Plant Line Value: 35A19
  misc_feature: MA Experiment 20000534 PARAMETER Experiment Name: Zm_Hybrid_Pollen_P Parameter: Tissue Value: Pollen vs. Aerial

SEQ ID NO: 10564 - protein, 236 aa, Zea mays subsp. mays; identical to SEQ ID NO: 7345
  peptide (1)..(236): Ceres Seq. ID no. 12344776

SEQ ID NO: 10565 - protein, 222 aa, Zea mays subsp. mays; identical to SEQ ID NO: 7346
  peptide (1)..(222): Ceres Seq. ID no. 12344777
  misc_feature (1)..(222): Homolog of NCBI NO: 34394571 NR Description: translocase inner membrane-like protein [Oryza
  misc_feature (1)..(222): Homolog of NCBI NO: 15217923 NR Description: mitochondrial inner membrane translocase
  misc_feature (1)..(171): Homolog of NCBI NO: 15228131 NR Description: putative protein translocase; protein id: supported by cDNA: gi_13430691, supported by cDNA: gi_15810185, by cDNA: gi_6103721 [Arabidopsis thaliana]
  misc_feature (1)..(171): Homolog of NCBI NO: 38678772 NR Description: mitochondrial inner membrane translocase TM17-2
  misc_feature (1)..(171): Homolog of NCBI NO: 6103722 NR Description: TIM17 [Arabidopsis thaliana]
  misc_feature (5)..(162): Homolog of NCBI NO: 5032181 NR Description: translocase of inner mitochondrial membrane 17 B (yeast); inner mitochondrial membrane preprotein translocase sapiens] >gi|12643624|sp|O60830|IM7B_HUMAN Mitochondrial import
  misc_feature (5)..(162): Homolog of NCBI NO: 34933423 NR Description: similar to mitochondrial inner membrane
  misc_feature (5)..(162): Homolog of NCBI NO: 33468937 NR Description: translocator of inner mitochondrial membrane b; of inner mitochondrial membrane 17 kDa, b [Mus musculus] Mitochondrial import inner membrane translocase subunit TIM17 B
  misc_feature (5)..(156): Homolog of NCBI NO: 30923567 NR Description: CG40451-PA [Drosophila melanogaster]
  misc_feature (5)..(165): Homolog of NCBI NO: 33468943 NR Description: translocator of inner mitochondrial membrane a; of inner mitochondrial membrane 17 kDa, a [Mus musculus] Mitochondrial import inner membrane translocase subunit TIM17 A
  misc_feature (1)..(222): Homolog of NCBI NO: 34394571 NR Description: translocase inner membrane-like protein [Oryza
  misc_feature (1)..(222): Homolog of NCBI NO: 15217923 NR Description: mitochondrial inner membrane translocase
  misc_feature (1)..(171): Homolog of NCBI NO: 15228131 NR Description: putative protein translocase; protein id: supported by cDNA: gi_13430691, supported by cDNA: gi_15810185, by cDNA: gi_6103721 [Arabidopsis thaliana]
  misc_feature (1)..(171): Homolog of NCBI NO: 38678772 NR Description: mitochondrial inner membrane translocase TM17-2
  misc_feature (1)..(171): Homolog of NCBI NO: 6103722 NR Description: TIM17 [Arabidopsis thaliana]
  misc_feature (5)..(162): Homolog of NCBI NO: 5032181 NR Description: translocase of inner mitochondrial membrane 17 B (yeast); inner mitochondrial membrane preprotein translocase sapiens] >gi|12643624|sp|O60830|IM7B_HUMAN Mitochondrial import
  misc_feature (5)..(162): Homolog of NCBI NO: 34933423 NR Description: similar to mitochondrial inner membrane
  misc_feature (5)..(162): Homolog of NCBI NO: 33468937 NR Description: translocator of inner mitochondrial membrane b; of inner mitochondrial membrane 17 kDa, b [Mus musculus] Mitochondrial import inner membrane translocase subunit TIM17 B
  misc_feature (5)..(156): Homolog of NCBI NO: 30923567 NR Description: CG40451-PA [Drosophila melanogaster]
  misc_feature (5)..(165): Homolog of NCBI NO: 33468943 NR Description: translocator of inner mitochondrial membrane a; of inner mitochondrial membrane 17 kDa, a [Mus musculus] Mitochondrial import inner membrane translocase subunit TIM17 A

SEQ ID NO: 10566 - protein, 198 aa, Zea mays subsp. mays; identical to SEQ ID NO: 7347
  peptide (1)..(198): Ceres Seq. ID no. 12344778
  misc_feature (1)..(198): Homolog of NCBI NO: 34394571 NR Description: translocase inner membrane-like protein [Oryza
  misc_feature (1)..(198): Homolog of NCBI NO: 15217923 NR Description: mitochondrial inner membrane translocase
  misc_feature (1)..(147): Homolog of NCBI NO: 15228131 NR Description: putative protein translocase; protein id: supported by cDNA: gi_13430691, supported by cDNA: gi_15810185, by cDNA: gi_6103721 [Arabidopsis thaliana]
  misc_feature (1)..(147): Homolog of NCBI NO: 38678772 NR Description: mitochondrial inner membrane translocase TM17-2
  misc_feature (1)..(147): Homolog of NCBI NO: 6103722 NR Description: TIM17 [Arabidopsis thaliana]
  misc_feature (1)..(138): Homolog of NCBI NO: 5032181 NR Description: translocase of inner mitochondrial membrane 17 B (yeast); inner mitochondrial membrane preprotein translocase sapiens] >gi|12643624|sp|O60830|IM7B_HUMAN Mitochondrial import
  misc_feature (1)..(138): Homolog of NCBI NO: 34933423 NR Description: similar to mitochondrial inner membrane
  misc_feature (1)..(138): Homolog of NCBI NO: 33468937 NR Description: translocator of inner mitochondrial membrane b; of inner mitochondrial membrane 17 kDa, b [Mus musculus] Mitochondrial import inner membrane translocase subunit TIM17 B
  misc_feature (1)..(132): Homolog of NCBI NO: 30923567 NR Description: CG40451-PA [Drosophila melanogaster]
  misc_feature (1)..(141): Homolog of NCBI NO: 33468943 NR Description: translocator of inner mitochondrial membrane a; of inner mitochondrial membrane 17 kDa, a [Mus musculus] Mitochondrial import inner membrane translocase subunit TIM17 A
  misc_feature (1)..(198): Homolog of NCBI NO: 34394571 NR Description: translocase inner membrane-like protein [Oryza
  misc_feature (1)..(198): Homolog of NCBI NO: 15217923 NR Description: mitochondrial inner membrane translocase
  misc_feature (1)..(147): Homolog of NCBI NO: 15228131 NR Description: putative protein translocase; protein id: supported by cDNA: gi_13430691, supported by cDNA: gi_15810185, by cDNA: gi_6103721 [Arabidopsis thaliana]
  misc_feature (1)..(147): Homolog of NCBI NO: 38678772 NR Description: mitochondrial inner membrane translocase TM17-2
  misc_feature (1)..(147): Homolog of NCBI NO: 6103722 NR Description: TIM17 [Arabidopsis thaliana]
  misc_feature (1)..(138): Homolog of NCBI NO: 5032181 NR Description: translocase of inner mitochondrial membrane 17 B (yeast); inner mitochondrial membrane preprotein translocase sapiens] >gi|12643624|sp|O60830|IM7B_HUMAN Mitochondrial import
  misc_feature (1)..(138): Homolog of NCBI NO: 34933423 NR Description: similar to mitochondrial inner membrane
  misc_feature (1)..(138): Homolog of NCBI NO: 33468937 NR Description: translocator of inner mitochondrial membrane b; of inner mitochondrial membrane 17 kDa, b [Mus musculus] Mitochondrial import inner membrane translocase subunit TIM17 B
  misc_feature (1)..(132): Homolog of NCBI NO: 30923567 NR Description: CG40451-PA [Drosophila melanogaster]
  misc_feature (1)..(141): Homolog of NCBI NO: 33468943 NR Description: translocator of inner mitochondrial membrane a; of inner mitochondrial membrane 17 kDa, a [Mus musculus] Mitochondrial import inner membrane translocase subunit TIM17 A

SEQ ID NO: 10567 - DNA, 956 bp, Zea mays subsp. mays
  misc_feature (1)..(956): Ceres Seq. ID no. 12372548
  misc_feature: MA Experiment ID: 108544 Result: Down-regulated in Transcription
  misc_feature: MA Experiment ID: 20000535 Result: Up-regulated in Transcription
  misc_feature: MA Experiment 20000535 PARAMETER Experiment Name: Zm_Hybrid_Seed_Dev_P Parameter: DAP Value: 30 vs. 12
  misc_feature: MA Experiment 20000535 PARAMETER Experiment Name: Zm_Hybrid_Seed_Dev_P Parameter: Organism Value: Zea mays
  misc_feature: MA Experiment 20000535 PARAMETER Experiment Name: Zm_Hybrid_Seed_Dev_P Parameter: Plant Line Value: 35A19
  misc_feature: MA Experiment 20000535 PARAMETER Experiment Name: Zm_Hybrid_Seed_Dev_P Parameter: Tissue Value: Embryo vs. Unfert Floret
cttcctcgccgcattgacctattcacttcctccataataactagtgctactaggtcccccacggccgaggaggaattagaaaacaaaattaaatctcaagtctagggcggagatgaatgttgcggaggaggaggtgagcatggagagggaggagaagggcggcaatgttcgcgatggcgaggtgaggacgacggcggcggcggcggcagctgtgagcctggagacgctgcggaagcggatggctgacttcgcgacggagcgggactgggagcagttccactcccccaggaacctccttctcgccctggtaggggaggtgggggagctgtctgagatattccaatggaaaggggaggtgcccaaggggctgccaggctgggacgatgccgagaaggagcacttgggcgaggagctcgccgacgtgctcctctatctggtgcgcctgtcggacatgtgcggcgtcgacctcggcaaggctgccctgcgcaagatggagatcaacgcccgcaaatacccagttggacagtgcaagggttcatccaagaagcacactcactacggctccactaacaatgttggcgacagcgacaaagctaatgccgcgaacaaggagcagcatagctgtggtgtctaaaatgactcggagctccttgaatggtaatttggatggtcgggcatgatctaggttacgtgtgctgatgaaacagggatgctctattttggtgggaaagggacaagttgcgtgggttcaagttcccctatatattagatggctaatgaaccaagtgttaaccacaaagcttcgtaggctgtagctcccctatgtctaatgtgtactggggcattctgattctgctggttcagttatgcagcttcatatgatgcgaaagcaaagctgactattgcagtagtactaatgagtactgacagtactttatgatgcaaaagctttctgt

SEQ ID NO: 10568 - protein, 173 aa, Zea mays subsp. mays
  peptide (1)..(173): Ceres Seq. ID no. 12372549
  misc_feature (34)..(136): Homolog of NCBI NO: 30687841 NR Description: expressed protein [Arabidopsis thaliana] contains similarity to unknown [Arabidopsis thaliana] >gi|28393817|gb|AAO42317.1| unknown
  misc_feature (10)..(135): Homolog of NCBI NO: 32482945 NR Description: OSJNBb0072M01.10 [Oryza sativa (japonica
  misc_feature (35)..(149): Homolog of NCBI NO: 33468615 NR Description: SI:zC150A22.2 (novel protein) [Danio rerio]
  misc_feature (1)..(159): Homolog of NCBI NO: 13129100 NR Description: hypothetical protein MGC5627 [Homo sapiens] unnamed protein product [Homo sapiens] Unknown (protein for MGC:5627) [Homo sapiens]
  misc_feature (35)..(162): Homolog of NCBI NO: 20302079 NR Description: RS21-C6 protein [Rattus norvegicus]
  misc_feature (35)..(147): Homolog of NCBI NO: 12963573 NR Description: RIKEN cDNA 2410015N17 [Mus musculus]
  misc_feature (35)..(162): Homolog of NCBI NO: 34864617 NR Description: similar to RS21-C6 protein [Rattus norvegicus]
  misc_feature (36)..(147): Homolog of NCBI NO: 34877104 NR Description: similar to RS21-C6 protein [Rattus norvegicus]
  misc_feature (31)..(146): Homolog of NCBI NO: 33593049 NR Description: conserved hypothetical protein [Bordetella >gi|33596995|ref|NP_884638.1| conserved hypothetical protein parapertussis] >gi|33600837|ref|NP_888397.1| conserved
  misc_feature (46)..(135): Homolog of NCBI NO: 34495748 NR Description: conserved hypothetical protein [Chromobacterium ATCC 12472] >gi|34101603|gb|AAQ57972.1| conserved hypothetical
MNVAEEEVSMEREEKGGNVRDGEVRTTAAAAAAVSLETLRKRMADFATERDWEQFHSPRNLLLALVGEVGELSEIFQWKGEVPKGLPGWDDAEKEHLGEELADVLLYLVRLSDMCGVDLGKAALRKMEINARKYPVGQCKGSSKKHTHYGSTNNVGDSDKANAANKEQHSCGV

SEQ ID NO: 10569 - protein, 164 aa, Zea mays subsp. mays
  peptide (1)..(164): Ceres Seq. ID no. 12372550
  misc_feature (25)..(127): Homolog of NCBI NO: 30687841 NR Description: expressed protein [Arabidopsis thaliana] contains similarity to unknown [Arabidopsis thaliana] >gi|28393817|gb|AAO42317.1| unknown
  misc_feature (1)..(126): Homolog of NCBI NO: 32482945 NR Description: OSJNBb0072M01.10 [Oryza sativa (japonica
  misc_feature (26)..(140): Homolog of NCBI NO: 33468615 NR Description: SI:zC150A22.2 (novel protein) [Danio rerio]
  misc_feature (1)..(150): Homolog of NCBI NO: 13129100 NR Description: hypothetical protein MGC5627 [Homo sapiens] unnamed protein product [Homo sapiens] Unknown (protein for MGC:5627) [Homo sapiens]
  misc_feature (26)..(153): Homolog of NCBI NO: 20302079 NR Description: RS21-C6 protein [Rattus norvegicus]
  misc_feature (26)..(138): Homolog of NCBI NO: 12963573 NR Description: RIKEN cDNA 2410015N17 [Mus musculus]
  misc_feature (26)..(153): Homolog of NCBI NO: 34864617 NR Description: similar to RS21-C6 protein [Rattus norvegicus]
  misc_feature (27)..(138): Homolog of NCBI NO: 34877104 NR Description: similar to RS21-C6 protein [Rattus norvegicus]
  misc_feature (22)..(137): Homolog of NCBI NO: 33593049 NR Description: conserved hypothetical protein [Bordetella >gi|33596995|ref|NP_884638.1| conserved hypothetical protein parapertussis] >gi|33600837|ref|NP_888397.1| conserved
  misc_feature (37)..(126): Homolog of NCBI NO: 34495748 NR Description: conserved hypothetical protein [Chromobacterium ATCC 12472] >gi|34101603|gb|AAQ57972.1| conserved hypothetical
MEREEKGGNVRDGEVRTTAAAAAAVSLETLRKRMADFATERDWEQFHSPRNLLLALVGEVGELSEIFQWKGEVPKGLPGWDDAEKEHLGEELADVLLYLVRLSDMCGVDLGKAALRKMEINARKYPVGQCKGSSKKHTHYGSTNNVGDSDKANAANKEQHSCGV

SEQ ID NO: 10570 - protein, 131 aa, Zea mays subsp. mays
  peptide (1)..(131): Ceres Seq. ID no. 12372551
  misc_feature (1)..(94): Homolog of NCBI NO: 30687841 NR Description: expressed protein [Arabidopsis thaliana] contains similarity to unknown [Arabidopsis thaliana] >gi|28393817|gb|AAO42317.1| unknown
  misc_feature (1)..(93): Homolog of NCBI NO: 32482945 NR Description: OSJNBb0072M01.10 [Oryza sativa (japonica
  misc_feature (1)..(107): Homolog of NCBI NO: 33468615 NR Description: SI:zC150A22.2 (novel protein) [Danio rerio]
  misc_feature (1)..(117): Homolog of NCBI NO: 13129100 NR Description: hypothetical protein MGC5627 [Homo sapiens] unnamed protein product [Homo sapiens] Unknown (protein for MGC:5627) [Homo sapiens]
  misc_feature (1)..(120): Homolog of NCBI NO: 20302079 NR Description: RS21-C6 protein [Rattus norvegicus]
  misc_feature (1)..(105): Homolog of NCBI NO: 12963573 NR Description: RIKEN cDNA 2410015N17 [Mus musculus]
  misc_feature (1)..(120): Homolog of NCBI NO: 34864617 NR Description: similar to RS21-C6 protein [Rattus norvegicus]
  misc_feature (1)..(105): Homolog of NCBI NO: 34877104 NR Description: similar to RS21-C6 protein [Rattus norvegicus]
  misc_feature (1)..(104): Homolog of NCBI NO: 33593049 NR Description: conserved hypothetical protein [Bordetella >gi|33596995|ref|NP_884638.1| conserved hypothetical protein parapertussis] >gi|33600837|ref|NP_888397.1| conserved
  misc_feature (4)..(93): Homolog of NCBI NO: 34495748 NR Description: conserved hypothetical protein [Chromobacterium ATCC 12472] >gi|34101603|gb|AAQ57972.1| conserved hypothetical
MADFATERDWEQFHSPRNLLLALVGEVGELSEIFQWKGEVPKGLPGWDDAEKEHLGEELADVLLYLVRLSDMCGVDLGKAALRKMEINARKYPVGQCKGSSKKHTHYGSTNNVGDSDKANAANKEQHSCGV

SEQ ID NO: 10571 - DNA, 907 bp, Zea mays subsp. mays
  misc_feature (1)..(907): Ceres Seq. ID no. 12404717
  misc_feature: MA Experiment ID: 20000492 Result: Up-regulated in Transcription
  misc_feature: MA Experiment 20000492 PARAMETER Experiment Name: Zm_Hybrid_Seed_Dev_P Parameter: DAP Value: 12
  misc_feature: MA Experiment 20000492 PARAMETER Experiment Name: Zm_Hybrid_Seed_Dev_P Parameter: Organism Value: Zea mays
  misc_feature: MA Experiment 20000492 PARAMETER Experiment Name: Zm_Hybrid_Seed_Dev_P Parameter: Plant Line Value: 35A19
  misc_feature: MA Experiment 20000492 PARAMETER Experiment Name: Zm_Hybrid_Seed_Dev_P Parameter: Tissue Value: Fert Kernel vs. Unfert Floret
gcacgagaccattacctagaacatcctaatcgaaaaaaactcgtctcccgtctcctccgcgttcccgctttccacccgccgccgccgccgcccaccttaccgtcacctgctccttgcccagcatgtggggtagcaccgacggcggaacgccggaggtcaccctcgagacctccatgggcgctgtctctgttgagatgtactacaggcacgcgcccaagacttgccggaacttcgtcgagctcgcgcgacgtggctactacgacaacgttatcttccaccgcatcatcaaagatttcattgtgcaaggtggggatcctacaggaaccggcagaggtggcgagtccatctatggagcaaagtttgaggatgagataaagactgagttaaagcacactggggctggaattctgtccatggcaaacgctggcccaaacacgaatggaagccagttcttcataactcttgccccttgtcagtcacttgatgggaaacatacaatttttgggagggtatgcagaggaatggaaattgttaagcgccttggaagtgtgcagactgacaaaaatgataggcctatccatgaagtgaaaatcttgcgtgccgttgtcaaagactgaagcattatccagatgtaactccgagtgttggtttaggctttaataatggccatgttcatgtaagtggtacctttgcgaaaaggtgaaaagtgcagctagttccagcctatatgagtatggtctcaagatgtggctgacctgaaaccctacctgatgagtagattggaccttttgatcaagaaggtatttgaaacagtttatatgcgtgtgtggtttgagtttctctgcgaggtatttgaaacaaatagttccagactatgttcgcttcaatcttaaagtcagttgtttgg

SEQ ID NO: 10572 - protein, 164 aa, Zea mays subsp. mays
  peptide (1)..(164): Ceres Seq. ID no. 12404718
  misc_feature (1)..(164): Homolog of NCBI NO: 15076665 NR Description: cyclophilin [Oryza sativa (japonica
  misc_feature (6)..(164): Homolog of NCBI NO: 15227585 NR Description: cyclophilin-like protein; protein id: supported by cDNA: 124189., supported by cDNA: gi_14488064, by cDNA: gi_20857437 [Arabidopsis thaliana]
  misc_feature (6)..(164): Homolog of NCBI NO: 21537220 NR Description: cyclophilin-like protein [Arabidopsis thaliana]
  misc_feature (12)..(163): Homolog of NCBI NO: 17986117 NR Description: Cyclophilin-like CG13892-PA
  misc_feature (11)..(162): Homolog of NCBI NO: 40740912 NR Description: hypothetical protein AN8680.2 [Aspergillus
  misc_feature (10)..(160): Homolog of NCBI NO: 21312784 NR Description: peptidylprolyl isomerase-like 1 [Mus musculus]
  misc_feature (10)..(160): Homolog of NCBI NO: 7706339 NR Description: peptidylprolyl isomerase-like 1;
  misc_feature (10)..(164): Homolog of NCBI NO: 17539496 NR Description: CYcloPhilin family CYP-12 (cyp-12) elegans] >gi|7497005|pir||T29283 peptidylprolyl isomerase (EC
  misc_feature (9)..(164): Homolog of NCBI NO: 39593518 NR Description: Hypothetical protein CBG05777 [Caenorhabditis
  misc_feature (12)..(161): Homolog of NCBI NO: 19114220 NR Description: cyclophilin-1; peptidyl-prolyl cis-trans isomerase
MWGSTDGGTPEVTLETSMGAVSVEMYYRHAPKTCRNFVELARRGYYDNVIFHRIIKDFIVQGGDPTGTGRGGESIYGAKFEDEIKTELKHTGAGILSMANAGPNTNGSQFFITLAPCQSLDGKHTIFGRVCRGMEIVKRLGSVQTDKNDRPIHEVKILRAVVKD

SEQ ID NO: 10573 - protein, 147 aa, Zea mays subsp. mays
  peptide (1)..(147): Ceres Seq. ID no. 12404719
  misc_feature (1)..(147): Homolog of NCBI NO: 15076665 NR Description: cyclophilin [Oryza sativa (japonica
  misc_feature (1)..(147): Homolog of NCBI NO: 15227585 NR Description: cyclophilin-like protein; protein id: supported by cDNA: 124189., supported by cDNA: gi_14488064, by cDNA: gi_20857437 [Arabidopsis thaliana]
  misc_feature (1)..(147): Homolog of NCBI NO: 21537220 NR Description: cyclophilin-like protein [Arabidopsis thaliana]
  misc_feature (1)..(146): Homolog of NCBI NO: 17986117 NR Description: Cyclophilin-like CG13892-PA
  misc_feature (1)..(145): Homolog of NCBI NO: 40740912 NR Description: hypothetical protein AN8680.2 [Aspergillus
  misc_feature (1)..(143): Homolog of NCBI NO: 21312784 NR Description: peptidylprolyl isomerase-like 1 [Mus musculus]
  misc_feature (1)..(143): Homolog of NCBI NO: 7706339 NR Description: peptidylprolyl isomerase-like 1;
  misc_feature (1)..(147): Homolog of NCBI NO: 17539496 NR Description: CYcloPhilin family CYP-12 (cyp-12) elegans] >gi|7497005|pir||T29283 peptidylprolyl isomerase (EC
  misc_feature (1)..(147): Homolog of NCBI NO: 39593518 NR Description: Hypothetical protein CBG05777 [Caenorhabditis
  misc_feature (1)..(144): Homolog of NCBI NO: 19114220 NR Description: cyclophilin-1; peptidyl-prolyl cis-trans isomerase
MGAVSVEMYYRHAPKTCRNFVELARRGYYDNVIFHRIIKDFIVQGGDPTGTGRGGESIYGAKFEDEIKTELKHTGAGILSMANAGPNTNGSQFFITLAPCQSLDGKHTIFGRVCRGMEIVKRLGSVQTDKNDRPIHEVKILRAVVKD

SEQ ID NO: 10574 - protein, 140 aa, Zea mays subsp. mays
  peptide (1)..(140): Ceres Seq. ID no. 12404720
  misc_feature (1)..(140): Homolog of NCBI NO: 15076665 NR Description: cyclophilin [Oryza sativa (japonica
  misc_feature (1)..(140): Homolog of NCBI NO: 15227585 NR Description: cyclophilin-like protein; protein id: supported by cDNA: 124189., supported by cDNA: gi_14488064, by cDNA: gi_20857437 [Arabidopsis thaliana]
  misc_feature (1)..(140): Homolog of NCBI NO: 21537220 NR Description: cyclophilin-like protein [Arabidopsis thaliana]
  misc_feature (1)..(139): Homolog of NCBI NO: 17986117 NR Description: Cyclophilin-like CG13892-PA
  misc_feature (1)..(138): Homolog of NCBI NO: 40740912 NR Description: hypothetical protein AN8680.2 [Aspergillus
  misc_feature (1)..(136): Homolog of NCBI NO: 21312784 NR Description: peptidylprolyl isomerase-like 1 [Mus musculus]
  misc_feature (1)..(136): Homolog of NCBI NO: 7706339 NR Description: peptidylprolyl isomerase-like 1;
  misc_feature (1)..(140): Homolog of NCBI NO: 17539496 NR Description: CYcloPhilin family CYP-12 (cyp-12) elegans] >gi|7497005|pir||T29283 peptidylprolyl isomerase (EC
  misc_feature (1)..(140): Homolog of NCBI NO: 39593518 NR Description: Hypothetical protein CBG05777 [Caenorhabditis
  misc_feature (1)..(137): Homolog of NCBI NO: 19114220 NR Description: cyclophilin-1; peptidyl-prolyl cis-trans isomerase
MYYRHAPKTCRNFVELARRGYYDNVIFHRIIKDFIVQGGDPTGTGRGGESIYGAKFEDEIKTELKHTGAGILSMANAGPNTNGSQFFITLAPCQSLDGKHTIFGRVCRGMEIVKRLGSVQTDKNDRPIHEVKILRAVVKD

SEQ ID NO: 10575 - DNA, 1959 bp, Zea mays subsp. mays
  misc_feature (1)..(1959): Ceres Seq. ID no. 12387609
  misc_feature: MA Experiment ID: 108522 Result: Down-regulated in Transcription
  misc_feature: MA Experiment 108522 PARAMETER Experiment Name: Zm_42deg_Heat_P Parameter: Age (day) Value: 8
  misc_feature: MA Experiment 108522 PARAMETER Experiment Name: Zm_42deg_Heat_P Parameter: Organism Value: Zea mays
  misc_feature: MA Experiment 108522 PARAMETER Experiment Name: Zm_42deg_Heat_P Parameter: Plant Line Value: 35A19
  misc_feature: MA Experiment 108522 PARAMETER Experiment Name: Zm_42deg_Heat_P Parameter: Temperature (deg C) Value: 42 vs. 22
  misc_feature: MA Experiment 108522 PARAMETER Experiment Name: Zm_42deg_Heat_P Parameter: Timepoint (hr) Value: 1
  misc_feature: MA Experiment 108522 PARAMETER Experiment Name: Zm_42deg_Heat_P Parameter: Tissue Value: Aerial
  misc_feature: MA Experiment ID: 108527 Result: Down-regulated in Transcription
  misc_feature: MA Experiment 108527 PARAMETER Experiment Name: Zm_5mM_NO_P Parameter: Age (day) Value: 8
  misc_feature: MA Experiment 108527 PARAMETER Experiment Name: Zm_5mM_NO_P Parameter: Organism Value: Zea mays
  misc_feature: MA Experiment 108527 PARAMETER Experiment Name: Zm_5mM_NO_P Parameter: Plant Line Value: 35A19
  misc_feature: MA Experiment 108527 PARAMETER Experiment Name: Zm_5mM_NO_P Parameter: Timepoint (hr) Value: 6
  misc_feature: MA Experiment 108527 PARAMETER Experiment Name: Zm_5mM_NO_P Parameter: Tissue Value: Aerial
  misc_feature: MA Experiment 108527 PARAMETER Experiment Name: Zm_5mM_NO_P Parameter: Treatment Value: 5mM NO vs. No Treatment
  misc_feature: MA Experiment ID: 108528 Result: Down-regulated in Transcription
  misc_feature: MA Experiment 108528 PARAMETER Experiment Name: Zm_Imbibed_Seeds_P Parameter: Age (day) Value: 5 vs. 2
  misc_feature: MA Experiment 108528 PARAMETER Experiment Name: Zm_Imbibed_Seeds_P Parameter: Organism Value: Zea mays
  misc_feature: MA Experiment 108528 PARAMETER Experiment Name: Zm_Imbibed_Seeds_P Parameter: Plant Line Value: 35A19
  misc_feature: MA Experiment 108528 PARAMETER Experiment Name: Zm_Imbibed_Seeds_P Parameter: Tissue Value: Aerial vs. Embryo
  misc_feature: MA Experiment ID: 108529 Result: Down-regulated in Transcription
  misc_feature: MA Experiment 108529 PARAMETER Experiment Name: Zm_Imbibed_Seeds_P Parameter: Age (day) Value: 5 vs. 2
  misc_feature: MA Experiment 108529 PARAMETER Experiment Name: Zm_Imbibed_Seeds_P Parameter: Organism Value: Zea mays
  misc_feature: MA Experiment 108529 PARAMETER Experiment Name: Zm_Imbibed_Seeds_P Parameter: Plant Line Value: 35A19
  misc_feature: MA Experiment 108529 PARAMETER Experiment Name: Zm_Imbibed_Seeds_P Parameter: Tissue Value: Roots vs. Embryo
  misc_feature: MA Experiment ID: 108530 Result: Down-regulated in Transcription
  misc_feature: MA Experiment 108530 PARAMETER Experiment Name: Zm_Imbibed_Seeds_P Parameter: Age (day) Value: 6 vs. 2
  misc_feature: MA Experiment 108530 PARAMETER Experiment Name: Zm_Imbibed_Seeds_P Parameter: Organism Value: Zea mays
  misc_feature: MA Experiment 108530 PARAMETER Experiment Name: Zm_Imbibed_Seeds_P Parameter: Plant Line Value: 35A19
  misc_feature: MA Experiment 108530 PARAMETER Experiment Name: Zm_Imbibed_Seeds_P Parameter: Tissue Value: Aerial vs. Embryo
  misc_feature: MA Experiment ID: 108543 Result: Up-regulated in Transcription
  misc_feature: MA Experiment ID: 108544 Result: Down-regulated in Transcription
  misc_feature: MA Experiment ID: 108556 Result: Down-regulated in Transcription
  misc_feature: MA Experiment 108556 PARAMETER Experiment Name: Zm_Drought_P Parameter: Age (day) Value: 9
  misc_feature: MA Experiment 108556 PARAMETER Experiment Name: Zm_Drought_P Parameter: Organism Value: Zea mays
  misc_feature: MA Experiment 108556 PARAMETER Experiment Name: Zm_Drought_P Parameter: Plant Line Value: 35A19
  misc_feature: MA Experiment 108556 PARAMETER Experiment Name: Zm_Drought_P Parameter: Timepoint (hr) Value: 24
  misc_feature: MA Experiment 108556 PARAMETER Experiment Name: Zm_Drought_P Parameter: Tissue Value: Aerial
  misc_feature: MA Experiment 108556 PARAMETER Experiment Name: Zm_Drought_P Parameter: Treatment Value: Drought vs. No Drought
  misc_feature: MA Experiment ID: 20000477 Result: Down-regulated in Transcription
  misc_feature: MA Experiment 20000477 PARAMETER Experiment Name: Zm_5mM_SA_P Parameter: Age (day) Value: 10
  misc_feature: MA Experiment 20000477 PARAMETER Experiment Name: Zm_5mM_SA_P Parameter: Organism Value: Zea mays
  misc_feature: MA Experiment 20000477 PARAMETER Experiment Name: Zm_5mM_SA_P Parameter: Plant Line Value: 35A19
  misc_feature: MA Experiment 20000477 PARAMETER Experiment Name: Zm_5mM_SA_P Parameter: Timepoint (hr) Value: 48
  misc_feature: MA Experiment 20000477 PARAMETER Experiment Name: Zm_5mM_SA_P Parameter: Tissue Value: Aerial
  misc_feature: MA Experiment 20000477 PARAMETER Experiment Name: Zm_5mM_SA_P Parameter: Treatment Value: 5mM SA vs. No Treatment
  misc_feature: MA Experiment ID: 20000478 Result: Down-regulated in Transcription
  misc_feature: MA Experiment 20000478 PARAMETER Experiment Name: Zm_5mM_SA_P Parameter: Age (day) Value: 11
  misc_feature: MA Experiment 20000478 PARAMETER Experiment Name: Zm_5mM_SA_P Parameter: Organism Value: Zea mays
  misc_feature: MA Experiment 20000478 PARAMETER Experiment Name: Zm_5mM_SA_P Parameter: Plant Line Value: 35A19
  misc_feature: MA Experiment 20000478 PARAMETER Experiment Name: Zm_5mM_SA_P Parameter: Timepoint (hr) Value: 72
  misc_feature: MA Experiment 20000478 PARAMETER Experiment Name: Zm_5mM_SA_P Parameter: Tissue Value: Aerial
  misc_feature: MA Experiment 20000478 PARAMETER Experiment Name: Zm_5mM_SA_P Parameter: Treatment Value: 5mM SA vs. No Treatment
  misc_feature: MA Experiment ID: 20000479 Result: Down-regulated in Transcription
  misc_feature: MA Experiment 20000479 PARAMETER Experiment Name: Zm_Drought_P Parameter: Age (day) Value: 10
  misc_feature: MA Experiment 20000479 PARAMETER Experiment Name: Zm_Drought_P Parameter: Organism Value: Zea mays
  misc_feature: MA Experiment 20000479 PARAMETER Experiment Name: Zm_Drought_P Parameter: Plant Line Value: 35A19
  misc_feature: MA Experiment 20000479 PARAMETER Experiment Name: Zm_Drought_P Parameter: Timepoint (hr) Value: 48
  misc_feature: MA Experiment 20000479 PARAMETER Experiment Name: Zm_Drought_P Parameter: Tissue Value: Aerial
  misc_feature: MA Experiment 20000479 PARAMETER Experiment Name: Zm_Drought_P Parameter: Treatment Value: Drought vs. No Drought
  misc_feature: MA Experiment ID: 20000480 Result: Down-regulated in Transcription
  misc_feature: MA Experiment 20000480 PARAMETER Experiment Name: Zm_Drought_P Parameter: Age (day) Value: 11
  misc_feature: MA Experiment 20000480 PARAMETER Experiment Name: Zm_Drought_P Parameter: Organism Value: Zea mays
  misc_feature: MA Experiment 20000480 PARAMETER Experiment Name: Zm_Drought_P Parameter: Plant Line Value: 35A19
  misc_feature: MA Experiment 20000480 PARAMETER Experiment Name: Zm_Drought_P Parameter: Timepoint (hr) Value: 72
  misc_feature: MA Experiment 20000480 PARAMETER Experiment Name: Zm_Drought_P Parameter: Tissue Value: Aerial
  misc_feature: MA Experiment 20000480 PARAMETER Experiment Name: Zm_Drought_P Parameter: Treatment Value: Drought vs. No Drought
  misc_feature: MA Experiment ID: 20000534 Result: Down-regulated in Transcription
  misc_feature: MA Experiment 20000534 PARAMETER Experiment Name: Zm_Hybrid_Pollen_P Parameter: Age (day) Value: 8
  misc_feature: MA Experiment 20000534 PARAMETER Experiment Name: Zm_Hybrid_Pollen_P Parameter: Organism Value: Zea mays
  misc_feature: MA Experiment 20000534 PARAMETER Experiment Name: Zm_Hybrid_Pollen_P Parameter: Plant Line Value: 35A19
  misc_feature: MA Experiment 20000534 PARAMETER Experiment Name: Zm_Hybrid_Pollen_P Parameter: Tissue Value: Pollen vs. Aerial
  misc_feature: MA Experiment ID: 20000535 Result: Up-regulated in Transcription
  misc_feature: MA Experiment 20000535 PARAMETER Experiment Name: Zm_Hybrid_Seed_Dev_P Parameter: DAP Value: 30 vs. 12
  misc_feature: MA Experiment 20000535 PARAMETER Experiment Name: Zm_Hybrid_Seed_Dev_P Parameter: Organism Value: Zea mays
  misc_feature: MA Experiment 20000535 PARAMETER Experiment Name: Zm_Hybrid_Seed_Dev_P Parameter: Plant Line Value: 35A19
  misc_feature: MA Experiment 20000535 PARAMETER Experiment Name: Zm_Hybrid_Seed_Dev_P Parameter: Tissue Value: Embryo vs. Unfert Floret
atcctctattcctcttcccctcccactccccagctcctgccgccccgctccacgttccagaacatctgggcggtatcccattcgcatggtcaccccatagccccccgacaaaccaccccaccgacgcaccggcagcaatggcggtgggcagcggcctggccctgtaccacgtcctcggagtggccacctgcgtggcgctgctgtacttcaccttcggcgaggtggacctccgccacatctcgctcccgtccttgcccgtctccggcccgtcccccttccgcgcggctgccgtggcggcgcccttcgtggagcggcgcggcgcgcagctgttcctggccggccggcccttctacgtgaacgggtggaactcctactggctcatggaccaggccgtggagccgaggtcccgggaccgcgtctcccgcatgttccgcaccggcgccggagatgggcctcaccgtgtgccgctcctgggcgttcaatgacggcgcctacaacgccctccaggtctcccccggccacttcgacgagcgcgtcttcaaggcgctggaccgggtggtcgtggaggccgggcggcacggggtgcggctgatcctgagtctggcgaacaacctggaggcgtacggtggcaagacgcagtacgtgcggtgggcgtgggaagagggcgtcggcatgtccgcctccaacgattccttcttctacgatccagccatcctcgactacttcaaagtctacctcaagacgctgctgacgaggaagaaccacttgacaggggtggagtacagggacgaccccaccatcctcgcgtgggagctgatgaacgagccccgctgcaccacggacccctcaggcgacacgctgcagcgctggatggaggagatggcggcgtacgtcaagtccatcgacaagaagcatctgctcaccgtcggcaccgaggggttctacgggccgacgagcccccaggagaagctggacgtcaatccgggcacgtggaaggacaacaactacggttcggacttcatccgcaacgccaagatcccagacatcgacttcgcttccatccacctctaccctgacacctggctgctgcagcagcacgccacggtggacgagaagctcaagttcgtgaagcggtgggtggcgtcccacatcgaggacggggacaaggagctgggcaagccggtcctcgccaccgagttcgggctgtcgcaccgcgccaagggcttccaccactcccaccgcgacgtcttctacaaggccgtctacgacaccgtctaccggtcggccgcccgcggcggcgccggcgccggcgccttcgtgtggcagctcgccgtggaggacatggaggagttccacgacgacttctccgtcgtgcccagcgagcacccctcgctgcacaggctcatcaagtcgcaatcgtgcaggctggccaagcttaggcacggggtcggggaggaggccaagcggacgctgtcggtgtgcgccgccggctcgtcctaggaacgaccgacgagcggtgctgcgcaggcagaagccatttccacgcgtccccctttcagctttgttgcgcccagtccgagggttttgtctttgtttctgtcgtccgaatggagcgagtggtgatggtgaagtgtgtcagaaatagatcggagaaaaatgaaatagaaagcagcaacagcaacaagaaaaaaaaagtgtgttacctcgtgaggctttggtaatgctgctggttagattcgtttgtggccacagcaccgacgcctnacgcagtcacgcctgcctgtggaatggcagatcgacatagataagctacagtttccgtcctttgcaactgtacgttagatgcccttgacctttgatatgtagagtcatcgtcgggtggcatncaatggtaatagtcctccatatatagtgtatttctgcaatctggacattggacctatatttatatatagctgt

SEQ ID NO: 10576 - protein, 350 aa, Zea mays subsp. mays
  peptide (1)..(350): Ceres Seq. ID no. 12387610
  misc_feature (1)..(297): Pfam Name: Cellulase (glycosyl hydrolase family 5) Pfam Description: Cellulase (glycosyl hydrolase family 5)
  misc_feature (1)..(346): Homolog of NCBI NO: 34909462 NR Description: putative (1-4)-beta-mannan endohydrolase [Oryza
  misc_feature (1)..(346): Homolog of NCBI NO: 30681096 NR Description: glycosyl hydrolase family 5/cellulase endohydrolase) [Arabidopsis thaliana] >gi|30793940|gb|AAP40422.1|
  misc_feature (1)..(342): Homolog of NCBI NO: 15235255 NR Description: glycosyl hydrolase family 5/cellulase
  misc_feature (75)..(346): Homolog of NCBI NO: 25354515 NR Description: (1-4)-beta-mannan endohydrolase [imported] -
  misc_feature (1)..(46): Homolog of NCBI NO: 25354515 NR Description: (1-4)-beta-mannan endohydrolase [imported] -
  misc_feature (1)..(332): Homolog of NCBI NO: 10129675 NR Description: (1-4)-beta-mannan endohydrolase [Coffea arabica]
  misc_feature (1)..(327): Homolog of NCBI NO: 34912090 NR Description: putative mannan endo-1,4-beta-mannosidase [Oryza
  misc_feature (1)..(331): Homolog of NCBI NO: 15239973 NR Description: glycosyl hydrolase family 5/cellulase
  misc_feature (1)..(328): Homolog of NCBI NO: 15241093 NR Description: glycosyl hydrolase family 5/cellulase
  misc_feature (3)..(339): Homolog of NCBI NO: 15228393 NR Description: glycosyl hydrolase family 5/cellulase
MGLTVCRSWAFNDGAYNALQVSPGHFDERVFKALDRVVVEAGRHGVRLILSLANNLEAYGGKTQYVRWAWEEGVGMSASNDSFFYDPAILDYFKVYLKTLLTRKNHLTGVEYRDDPTILAWELMNEPRCTTDPSGDTLQRWMEEMAAYVKSIDKKHLLTVGTEGFYGPTSPQEKLDVNPGTWKDNNYGSDFIRNAKIPDIDFASIHLYPDTWLLQQHATVDEKLKFVKRWVASHIEDGDKELGKPVLATEFGLSHRAKGFHHSHRDVFYKAVYDTVYRSAARGGAGAGAFVWQLAVEDMEEFHDDFSVVPSEHPSLHRLIKSQSCRLAKLRHGVGEEAKRTLSVCAAGSS

SEQ ID NO: 10577 - protein, 275 aa, Zea mays subsp. mays
  peptide (1)..(275): Ceres Seq. ID no. 12387611
  misc_feature (1)..(222): Pfam Name: Cellulase (glycosyl hydrolase family 5) Pfam Description: Cellulase (glycosyl hydrolase family 5)
  misc_feature (1)..(271): Homolog of NCBI NO: 34909462 NR Description: putative (1-4)-beta-mannan endohydrolase [Oryza
  misc_feature (1)..(271): Homolog of NCBI NO: 30681096 NR Description: glycosyl hydrolase family 5/cellulase endohydrolase) [Arabidopsis thaliana] >gi|30793940|gb|AAP40422.1|
  misc_feature (1)..(267): Homolog of NCBI NO: 15235255 NR Description: glycosyl hydrolase family 5/cellulase
  misc_feature (1)..(271): Homolog of NCBI NO: 25354515 NR Description: (1-4)-beta-mannan endohydrolase [imported] -
  misc_feature (1)..(257): Homolog of NCBI NO: 10129675 NR Description: (1-4)-beta-mannan endohydrolase [Coffea arabica]
  misc_feature (1)..(252): Homolog of NCBI NO: 34912090 NR Description: putative mannan endo-1,4-beta-mannosidase [Oryza
  misc_feature (1)..(256): Homolog of NCBI NO: 15239973 NR Description: glycosyl hydrolase family 5/cellulase
  misc_feature (1)..(253): Homolog of NCBI NO: 15241093 NR Description: glycosyl hydrolase family 5/cellulase
  misc_feature (1)..(264): Homolog of NCBI NO: 15228393 NR Description: glycosyl hydrolase family 5/cellulase
  misc_feature (1)..(259): Homolog of NCBI NO: 23477717 NR Description: endo-beta-mannanase [Daucus carota]
MSASNDSFFYDPAILDYFKVYLKTLLTRKNHLTGVEYRDDPTILAWELMNEPRCTTDPSGDTLQRWMEEMAAYVKSIDKKHLLTVGTEGFYGPTSPQEKLDVNPGTWKDNNYGSDFIRNAKIPDIDFASIHLYPDTWLLQQHATVDEKLKFVKRWVASHIEDGDKELGKPVLATEFGLSHRAKGFHHSHRDVFYKAVYDTVYRSAARGGAGAGAFVWQLAVEDMEEFHDDFSVVPSEHPSLHRLIKSQSCRLAKLRHGVGEEAKRTLSVCAAGSS

SEQ ID NO: 10578 - protein, 227 aa, Zea mays subsp. mays
  peptide (1)..(227): Ceres Seq. ID no. 12387612
  misc_feature (1)..(174): Pfam Name: Cellulase (glycosyl hydrolase family 5) Pfam Description: Cellulase (glycosyl hydrolase family 5)
  misc_feature (1)..(223): Homolog of NCBI NO: 34909462 NR Description: putative (1-4)-beta-mannan endohydrolase [Oryza
  misc_feature (1)..(223): Homolog of NCBI NO: 30681096 NR Description: glycosyl hydrolase family 5/cellulase endohydrolase) [Arabidopsis thaliana] >gi|30793940|gb|AAP40422.1|
  misc_feature (1)..(219): Homolog of NCBI NO: 15235255 NR Description: glycosyl hydrolase family 5/cellulase
  misc_feature (1)..(223): Homolog of NCBI NO: 25354515 NR Description: (1-4)-beta-mannan endohydrolase [imported] -
  misc_feature (1)..(209): Homolog of NCBI NO: 10129675 NR Description: (1-4)-beta-mannan endohydrolase [Coffea arabica]
  misc_feature (1)..(204): Homolog of NCBI NO: 34912090 NR Description: putative mannan endo-1,4-beta-mannosidase [Oryza
  misc_feature (1)..(208): Homolog of NCBI NO: 15239973 NR Description: glycosyl hydrolase family 5/cellulase
  misc_feature (1)..(205): Homolog of NCBI NO: 15241093 NR Description: glycosyl hydrolase family 5/cellulase
  misc_feature (1)..(216): Homolog of NCBI NO: 15228393 NR Description: glycosyl hydrolase family 5/cellulase
  misc_feature (1)..(211): Homolog of NCBI NO: 23477717 NR Description: endo-beta-mannanase [Daucus carota]
MNEPRCTTDPSGDTLQRWMEEMAAYVKSIDKKHLLTVGTEGFYGPTSPQEKLDVNPGTWKDNNYGSDFIRNAKIPDIDFASIHLYPDTWLLQQHATVDEKLKFVKRWVASHIEDGDKELGKPVLATEFGLSHRAKGFHHSHRDVFYKAVYDTVYRSAARGGAGAGAFVWQLAVEDMEEFHDDFSVVPSEHPSLHRLIKSQSCRLAKLRHGVGEEAKRTLSVCAAGSS

SEQ ID NO: 10579 - DNA, 1102 bp, Zea mays subsp. mays
  misc_feature (1)..(1102): Ceres Seq. ID no. 12402877
  misc_feature: MA Experiment ID: 108504 Result: Up-regulated in Transcription
  misc_feature: MA Experiment 108504 PARAMETER Experiment Name: Zm_Drought_P Parameter: Age (day) Value: 8
  misc_feature: MA Experiment 108504 PARAMETER Experiment Name: Zm_Drought_P Parameter: Organism Value: Zea mays
  misc_feature: MA Experiment 108504 PARAMETER Experiment Name: Zm_Drought_P Parameter: Plant Line Value: 35A19
  misc_feature: MA Experiment 108504 PARAMETER Experiment Name: Zm_Drought_P Parameter: Timepoint (hr) Value: 12
  misc_feature: MA Experiment 108504 PARAMETER Experiment Name: Zm_Drought_P Parameter: Tissue Value: Aerial
  misc_feature: MA Experiment 108504 PARAMETER Experiment Name: Zm_Drought_P Parameter: Treatment Value: Drought vs. No Drought
  misc_feature: MA Experiment ID: 108515 Result: Down-regulated in Transcription
  misc_feature: MA Experiment 108515 PARAMETER Experiment Name: Zm_2mM_SA_P Parameter: Age (day) Value: 8
  misc_feature: MA Experiment 108515 PARAMETER Experiment Name: Zm_2mM_SA_P Parameter: Organism Value: Zea mays
  misc_feature: MA Experiment 108515 PARAMETER Experiment Name: Zm_2mM_SA_P Parameter: Plant Line Value: 35A19
  misc_feature: MA Experiment 108515 PARAMETER Experiment Name: Zm_2mM_SA_P Parameter: Timepoint (hr) Value: 12
  misc_feature: MA Experiment 108515 PARAMETER Experiment Name: Zm_2mM_SA_P Parameter: Tissue Value: Aerial
  misc_feature: MA Experiment 108515 PARAMETER Experiment Name: Zm_2mM_SA_P Parameter: Treatment Value: 2mM SA vs. No Treatment
  misc_feature: MA Experiment ID: 108523 Result: Down-regulated in Transcription
  misc_feature: MA Experiment 108523 PARAMETER Experiment Name: Zm_42deg_Heat_P Parameter: Age (day) Value: 8
  misc_feature: MA Experiment 108523 PARAMETER Experiment Name: Zm_42deg_Heat_P Parameter: Organism Value: Zea mays
  misc_feature: MA Experiment 108523 PARAMETER Experiment Name: Zm_42deg_Heat_P Parameter: Plant Line Value: 35A19
  misc_feature: MA Experiment 108523 PARAMETER Experiment Name: Zm_42deg_Heat_P Parameter: Temperature (deg C) Value: 42 vs. 22
  misc_feature: MA Experiment 108523 PARAMETER Experiment Name: Zm_42deg_Heat_P Parameter: Timepoint (hr) Value: 6
  misc_feature: MA Experiment 108523 PARAMETER Experiment Name: Zm_42deg_Heat_P Parameter: Tissue Value: Aerial
  misc_feature: MA Experiment ID: 108528 Result: Down-regulated in Transcription
  misc_feature: MA Experiment 108528 PARAMETER Experiment Name: Zm_Imbibed_Seeds_P Parameter: Age (day) Value: 5 vs. 2
  misc_feature: MA Experiment 108528 PARAMETER Experiment Name: Zm_Imbibed_Seeds_P Parameter: Organism Value: Zea mays
  misc_feature: MA Experiment 108528 PARAMETER Experiment Name: Zm_Imbibed_Seeds_P Parameter: Plant Line Value: 35A19
  misc_feature: MA Experiment 108528 PARAMETER Experiment Name: Zm_Imbibed_Seeds_P Parameter: Tissue Value: Aerial vs. Embryo
  misc_feature: MA Experiment ID: 108530 Result: Down-regulated in Transcription
  misc_feature: MA Experiment 108530 PARAMETER Experiment Name: Zm_Imbibed_Seeds_P Parameter: Age (day) Value: 6 vs. 2
  misc_feature: MA Experiment 108530 PARAMETER Experiment Name: Zm_Imbibed_Seeds_P Parameter: Organism Value: Zea mays
  misc_feature: MA Experiment 108530 PARAMETER Experiment Name: Zm_Imbibed_Seeds_P Parameter: Plant Line Value: 35A19
  misc_feature: MA Experiment 108530 PARAMETER Experiment Name: Zm_Imbibed_Seeds_P Parameter: Tissue Value: Aerial vs. Embryo
  misc_feature: MA Experiment ID: 108536 Result: Down-regulated in Transcription
  misc_feature: MA Experiment 108536 PARAMETER Experiment Name: Zm_Meristem_P Parameter: Age (day) Value: 8
  misc_feature: MA Experiment 108536 PARAMETER Experiment Name: Zm_Meristem_P Parameter: Organism Value: Zea mays
  misc_feature: MA Experiment 108536 PARAMETER Experiment Name: Zm_Meristem_P Parameter: Plant Line Value: 35A19
  misc_feature: MA Experiment 108536 PARAMETER Experiment Name: Zm_Meristem_P Parameter: Tissue Value: Shoot Meristem vs. Above Shoot Meristem
  misc_feature: MA Experiment ID: 108543 Result: Up-regulated in Transcription
  misc_feature: MA Experiment ID: 108547 Result: Down-regulated in Transcription
  misc_feature: MA Experiment 108547 PARAMETER Experiment Name: Zm_Imbibed_Seeds_P Parameter: Age (day) Value: 4 vs. 2
  misc_feature: MA Experiment 108547 PARAMETER Experiment Name: Zm_Imbibed_Seeds_P Parameter: Organism Value: Zea mays
  misc_feature: MA Experiment 108547 PARAMETER Experiment Name: Zm_Imbibed_Seeds_P Parameter: Plant Line Value: 35A19
  misc_feature: MA Experiment 108547 PARAMETER Experiment Name: Zm_Imbibed_Seeds_P Parameter: Tissue Value: Aerial vs. Embryo
  misc_feature: MA Experiment ID: 108556 Result: Up-regulated in Transcription
  misc_feature: MA Experiment 108556 PARAMETER Experiment Name: Zm_Drought_P Parameter: Age (day) Value: 9
  misc_feature: MA Experiment 108556 PARAMETER Experiment Name: Zm_Drought_P Parameter: Organism Value: Zea mays
  misc_feature: MA Experiment 108556 PARAMETER Experiment Name: Zm_Drought_P Parameter: Plant Line Value: 35A19
  misc_feature: MA Experiment 108556 PARAMETER Experiment Name: Zm_Drought_P Parameter: Timepoint (hr) Value: 24
  misc_feature: MA Experiment 108556 PARAMETER Experiment Name: Zm_Drought_P Parameter: Tissue Value: Aerial
  misc_feature: MA Experiment 108556 PARAMETER Experiment Name: Zm_Drought_P Parameter: Treatment Value: Drought vs. No Drought
  misc_feature: MA Experiment ID: 20000477 Result: Up-regulated in Transcription
  misc_feature: MA Experiment 20000477 PARAMETER Experiment Name: Zm_5mM_SA_P Parameter: Age (day) Value: 10
  misc_feature: MA Experiment 20000477 PARAMETER Experiment Name: Zm_5mM_SA_P Parameter: Organism Value: Zea mays
  misc_feature: MA Experiment 20000477 PARAMETER Experiment Name: Zm_5mM_SA_P Parameter: Plant Line Value: 35A19
  misc_feature: MA Experiment 20000477 PARAMETER Experiment Name: Zm_5mM_SA_P Parameter: Timepoint (hr) Value: 48
  misc_feature: MA Experiment 20000477 PARAMETER Experiment Name: Zm_5mM_SA_P Parameter: Tissue Value: Aerial
  misc_feature: MA Experiment 20000477 PARAMETER Experiment Name: Zm_5mM_SA_P Parameter: Treatment Value: 5mM SA vs. No Treatment
  misc_feature: MA Experiment ID: 20000478 Result: Up-regulated in Transcription
  misc_feature: MA Experiment 20000478 PARAMETER Experiment Name: Zm_5mM_SA_P Parameter: Age (day) Value: 11
  misc_feature: MA Experiment 20000478 PARAMETER Experiment Name: Zm_5mM_SA_P Parameter: Organism Value: Zea mays
  misc_feature: MA Experiment 20000478 PARAMETER Experiment Name: Zm_5mM_SA_P Parameter: Plant Line Value: 35A19
  misc_feature: MA Experiment 20000478 PARAMETER Experiment Name: Zm_5mM_SA_P Parameter: Timepoint (hr) Value: 72
  misc_feature: MA Experiment 20000478 PARAMETER Experiment Name: Zm_5mM_SA_P Parameter: Tissue Value: Aerial
  misc_feature: MA Experiment 20000478 PARAMETER Experiment Name: Zm_5mM_SA_P Parameter: Treatment Value: 5mM SA vs. No Treatment
  misc_feature: MA Experiment ID: 20000479 Result: Up-regulated in Transcription
  misc_feature: MA Experiment 20000479 PARAMETER Experiment Name: Zm_Drought_P Parameter: Age (day) Value: 10
  misc_feature: MA Experiment 20000479 PARAMETER Experiment Name: Zm_Drought_P Parameter: Organism Value: Zea mays
  misc_feature: MA Experiment 20000479 PARAMETER Experiment Name: Zm_Drought_P Parameter: Plant Line Value: 35A19
  misc_feature: MA Experiment 20000479 PARAMETER Experiment Name: Zm_Drought_P Parameter: Timepoint (hr) Value: 48
  misc_feature: MA Experiment 20000479 PARAMETER Experiment Name: Zm_Drought_P Parameter: Tissue Value: Aerial
  misc_feature: MA Experiment 20000479 PARAMETER Experiment Name: Zm_Drought_P Parameter: Treatment Value: Drought vs. No Drought
  misc_feature: MA Experiment ID: 20000480 Result: Up-regulated in Transcription
  misc_feature: MA Experiment 20000480 PARAMETER Experiment Name: Zm_Drought_P Parameter: Age (day) Value: 11
  misc_feature: MA Experiment 20000480 PARAMETER Experiment Name: Zm_Drought_P Parameter: Organism Value: Zea mays
  misc_feature: MA Experiment 20000480 PARAMETER Experiment Name: Zm_Drought_P Parameter: Plant Line Value: 35A19
  misc_feature: MA Experiment 20000480 PARAMETER Experiment Name: Zm_Drought_P Parameter: Timepoint (hr) Value: 72
  misc_feature: MA Experiment 20000480 PARAMETER Experiment Name: Zm_Drought_P Parameter: Tissue Value: Aerial
  misc_feature: MA Experiment 20000480 PARAMETER Experiment Name: Zm_Drought_P Parameter: Treatment Value: Drought vs. No Drought
  misc_feature: MA Experiment ID: 20000488 Result: Down-regulated in Transcription
  misc_feature: MA Experiment 20000488 PARAMETER Experiment Name: Zm_50mM_NH4NO3_L_to_H_P Parameter: Organism Value: Zea mays
  misc_feature: MA Experiment 20000488 PARAMETER Experiment Name: Zm_50mM_NH4NO3_L_to_H_P Parameter: Timepoint (hr) Value: 8
  misc_feature: MA Experiment 20000488 PARAMETER Experiment Name: Zm_50mM_NH4NO3_L_to_H_P Parameter: Tissue Value: Leaves
  misc_feature: MA Experiment 20000488 PARAMETER Experiment Name: Zm_50mM_NH4NO3_L_to_H_P Parameter: Treatment Value: 50mM NH4NO3 vs. 100mM Mannitol
  misc_feature: MA Experiment ID: 20000535 Result: Down-regulated in Transcription
  misc_feature: MA Experiment 20000535 PARAMETER Experiment Name: Zm_Hybrid_Seed_Dev_P Parameter: DAP Value: 30 vs. 12
  misc_feature: MA Experiment 20000535 PARAMETER Experiment Name: Zm_Hybrid_Seed_Dev_P Parameter: Organism Value: Zea mays
  misc_feature: MA Experiment 20000535 PARAMETER Experiment Name: Zm_Hybrid_Seed_Dev_P Parameter: Plant Line Value: 35A19
  misc_feature: MA Experiment 20000535 PARAMETER Experiment Name: Zm_Hybrid_Seed_Dev_P Parameter: Tissue Value: Embryo vs. Unfert Floret
  misc_feature: MA Experiment ID: 20001614 Result: Up-regulated in Transcription
  misc_feature: MA Experiment 20001614 PARAMETER Experiment Name: Zm_50ppm_KNO3_L-to-H_P Parameter: Age (day) Value: 21
  misc_feature: MA Experiment 20001614 PARAMETER Experiment Name: Zm_50ppm_KNO3_L-to-H_P Parameter: Organism Value: Zea mays
  misc_feature: MA Experiment 20001614 PARAMETER Experiment Name: Zm_50ppm_KNO3_L-to-H_P Parameter: Plant Line Value: 35A19
  misc_feature: MA Experiment 20001614 PARAMETER Experiment Name: Zm_50ppm_KNO3_L-to-H_P Parameter: Timepoint (hr) Value: 48
  misc_feature: MA Experiment 20001614 PARAMETER Experiment Name: Zm_50ppm_KNO3_L-to-H_P Parameter: Tissue Value: Roots
  misc_feature: MA Experiment 20001614 PARAMETER Experiment Name: Zm_50ppm_KNO3_L-to-H_P Parameter: Treatment Value: 50ppm KNO3 vs. 50ppm KCl
aagagaccaggctggtggttgaggtgagaagctagaggagctagagcgatagagtcccatcgcaacacacaaagggaagaggaagaggaaggcgaggacgatgggcttgctcctgctgctccacgtcctcctcgtcgcggcggcggcgacagctcctgcagccgacgcatggggcaaggaggggcactacatggtgtgcaagatcgctgagagctttctgacgaaagaggcatcgacggcggtgaaggagctgctgccggggtgggccggcggcgagctcgcggagacgtgctcttgggcggacacgcagaggttccggtaccgctggtccagcccgctgcacttcgccgacacgccaggggactgcgagttcgactacgcccgggactgccacaacaccaaaggggagaagaacatgtgcgtggtcggagccatcaacaactacacggcggcgctgaaagactcatcaagtccatttgatccgacggagagcttgatgttcctggcgcacttcgtcggcgacgtccaccagcctctccactgcggccacaccgacgacctcggcggcaacaccatcgtcgtccactggtaccgaaggaagaccaacctgcaccacgtctgggacgtgaacgtcatcgagacggccatgaaggacttctacggcaacgaccagagcaccatgatacaggccatccagcagaacatcacggaggagtgggctgatgaggagaagaagtgggaggcctgccgtagccggacaaagacctgtgctgacaagtacgctgcagagagcgcgaagctggcctgcacggcgtacgagggtgtcgaccaggactccaccttggaagatgactacttcttcgccgcgctgccggtggttcagaagaggatcgcgcaaggaggcgtcaggctggccgcgatcctcaacaggatatttggtgggaacagcagatcaggcttcagagcagttgattgatcgatccataccagtagtagatatcaaacgattggacatgtggaggagtgggtggggaggggcagacatgatctgccatctgaattagaataataagaggtatcttgttgccgtctggcaatattg

SEQ ID NO: 10580 - protein, 291 aa, Zea mays subsp. mays
  peptide (1)..(291): Ceres Seq. ID no. 12402878
  misc_feature (1)..(282): Homolog of NCBI NO: 38345900 NR Description: OSJNBa0060D06.10 [Oryza sativa (japonica
  misc_feature (1)..(283): Homolog of NCBI NO: 13274190 NR Description: putative nuclease [Hordeum vulgare subsp. vulgare]
  misc_feature (1)..(284): Homolog of NCBI NO: 7489371 NR Description: endonuclease (EC 3.1.30.-) precursor - barley
  misc_feature (1)..(284): Homolog of NCBI NO: 5672692 NR Description: nuclease I [Hordeum vulgare]
  misc_feature (3)..(286): Homolog of NCBI NO: 9558456 NR Description: unnamed protein product [Oryza sativa (japonica
  misc_feature (3)..(286): Homolog of NCBI NO: 34895514 NR Description: putative bifunctional nuclease [Oryza sativa
  misc_feature (1)..(280): Homolog of NCBI NO: 15221343 NR Description: putative bifunctional nuclease; protein id: supported by cDNA: 256130. [Arabidopsis thaliana]
  misc_feature (1)..(280): Homolog of NCBI NO: 21554516 NR Description: putative bifunctional nuclease [Arabidopsis
  misc_feature (19)..(279): Homolog of NCBI NO: 4099835 NR Description: bifunctional nuclease [Zinnia elegans]
  misc_feature (7)..(280): Homolog of NCBI NO: 4099833 NR Description: bifunctional nuclease [Zinnia elegans]
MGLLLLLHVLLVAAAATAPAADAWGKEGHYMVCKIAESFLTKEASTAVKELLPGWAGGELAETCSWADTQRFRYRWSSPLHFADTPGDCEFDYARDCHNTKGEKNMCVVGAINNYTAALKDSSSPFDPTESLMFLAHFVGDVHQPLHCGHTDDLGGNTIVVHWYRRKTNLHHVWDVNVIETAMKDFYGNDQSTMIQAIQQNITEEWADEEKKWEACRSRTKTCADKYAAESAKLACTAYEGVDQDSTLEDDYFFAALPVVQKRIAQGGVRLAAILNRIFGGNSRSGFRAVD

SEQ ID NO: 10581 - protein, 261 aa, Zea mays subsp. mays
  peptide (1)..(261): Ceres Seq. ID no. 12402879
  misc_feature (1)..(252): Homolog of NCBI NO: 38345900 NR Description: OSJNBa0060D06.10 [Oryza sativa (japonica
  misc_feature (1)..(253): Homolog of NCBI NO: 13274190 NR Description: putative nuclease [Hordeum vulgare subsp. vulgare]
  misc_feature (1)..(254): Homolog of NCBI NO: 7489371 NR Description: endonuclease (EC 3.1.30.-) precursor - barley
  misc_feature (1)..(254): Homolog of NCBI NO: 5672692 NR Description: nuclease I [Hordeum vulgare]
  misc_feature (1)..(256): Homolog of NCBI NO: 9558456 NR Description: unnamed protein product [Oryza sativa (japonica
  misc_feature (1)..(256): Homolog of NCBI NO: 34895514 NR Description: putative bifunctional nuclease [Oryza sativa
  misc_feature (1)..(250): Homolog of NCBI NO: 15221343 NR Description: putative bifunctional nuclease; protein id: supported by cDNA: 256130. [Arabidopsis thaliana]
  misc_feature (1)..(250): Homolog of NCBI NO: 21554516 NR Description: putative bifunctional nuclease [Arabidopsis
  misc_feature (1)..(249): Homolog of NCBI NO: 4099835 NR Description: bifunctional nuclease [Zinnia elegans]
  misc_feature (1)..(250): Homolog of NCBI NO: 4099833 NR Description: bifunctional nuclease [Zinnia elegans]
MVCKIAESFLTKEASTAVKELLPGWAGGELAETCSWADTQRFRYRWSSPLHFADTPGDCEFDYARDCHNTKGEKNMCVVGAINNYTAALKDSSSPFDPTESLMFLAHFVGDVHQPLHCGHTDDLGGNTIVVHWYRRKTNLHHVWDVNVIETAMKDFYGNDQSTMIQAIQQNITEEWADEEKKWEACRSRTKTCADKYAAESAKLACTAYEGVDQDSTLEDDYFFAALPVVQKRIAQGGVRLAAILNRIFGGNSRSGFRAVD

SEQ ID NO: 10582 - protein, 186 aa, Zea mays subsp. mays
  peptide (1)..(186): Ceres Seq. ID no. 12402880
  misc_feature (1)..(181): Homolog of NCBI NO: 9558456 NR Description: unnamed protein product [Oryza sativa (japonica
  misc_feature (1)..(181): Homolog of NCBI NO: 34895514 NR Description: putative bifunctional nuclease [Oryza sativa
  misc_feature (1)..(175): Homolog of NCBI NO: 15221343 NR Description: putative bifunctional nuclease; protein id: supported by cDNA: 256130. [Arabidopsis thaliana]
  misc_feature (1)..(175): Homolog of NCBI NO: 21554516 NR Description: putative bifunctional nuclease [Arabidopsis
  misc_feature (1)..(174): Homolog of NCBI NO: 4099835 NR Description: bifunctional nuclease [Zinnia elegans]
  misc_feature (1)..(175): Homolog of NCBI NO: 4099833 NR Description: bifunctional nuclease [Zinnia elegans]
  misc_feature (1)..(177): Homolog of NCBI NO: 38345900 NR Description: OSJNBa0060D06.10 [Oryza sativa (japonica
  misc_feature (1)..(178): Homolog of NCBI NO: 13274190 NR Description: putative nuclease [Hordeum vulgare subsp. vulgare]
  misc_feature (1)..(179): Homolog of NCBI NO: 7489371 NR Description: endonuclease (EC 3.1.30.-) precursor - barley
  misc_feature (1)..(179): Homolog of NCBI NO: 5672692 NR Description: nuclease I [Hordeum vulgare]
MCVVGAINNYTAALKDSSSPFDPTESLMFLAHFVGDVHQPLHCGHTDDLGGNTIVVHWYRRKTNLHHVWDVNVIETAMKDFYGNDQSTMIQAIQQNITEEWADEEKKWEACRSRTKTCADKYAAESAKLACTAYEGVDQDSTLEDDYFFAALPVVQKRIAQGGVRLAAILNRIFGGNSRSGFRAVD

SEQ ID NO: 10583 - DNA, 1552 bp, Zea mays subsp. mays
  misc_feature (1)..(1552): Ceres Seq. ID no. 12368823
  misc_feature: MA Experiment ID: 108527 Result: Up-regulated in Transcription
  misc_feature: MA Experiment 108527 PARAMETER Experiment Name: Zm_5mM_NO_P Parameter: Age (day) Value: 8
  misc_feature: MA Experiment 108527 PARAMETER Experiment Name: Zm_5mM_NO_P Parameter: Organism Value: Zea mays
  misc_feature: MA Experiment 108527 PARAMETER Experiment Name: Zm_5mM_NO_P Parameter: Plant Line Value: 35A19
  misc_feature: MA Experiment 108527 PARAMETER Experiment Name: Zm_5mM_NO_P Parameter: Timepoint (hr) Value: 6
  misc_feature: MA Experiment 108527 PARAMETER Experiment Name: Zm_5mM_NO_P Parameter: Tissue Value: Aerial
  misc_feature: MA Experiment 108527 PARAMETER Experiment Name: Zm_5mM_NO_P Parameter: Treatment Value: 5mM NO vs. No Treatment
  misc_feature: MA Experiment ID: 108528 Result: Down-regulated in Transcription
  misc_feature: MA Experiment 108528 PARAMETER Experiment Name: Zm_Imbibed_Seeds_P Parameter: Age (day) Value: 5 vs. 2
  misc_feature: MA Experiment 108528 PARAMETER Experiment Name: Zm_Imbibed_Seeds_P Parameter: Organism Value: Zea mays
  misc_feature: MA Experiment 108528 PARAMETER Experiment Name: Zm_Imbibed_Seeds_P Parameter: Plant Line Value: 35A19
  misc_feature: MA Experiment 108528 PARAMETER Experiment Name: Zm_Imbibed_Seeds_P Parameter: Tissue Value: Aerial vs. Embryo
  misc_feature: MA Experiment ID: 108545 Result: Down-regulated in Transcription
  misc_feature: MA Experiment 108545 PARAMETER Experiment Name: Zm_Imbibed_Seeds_P Parameter: Age (day) Value: 3 vs. 2
  misc_feature: MA Experiment 108545 PARAMETER Experiment Name: Zm_Imbibed_Seeds_P Parameter: Organism Value: Zea mays
  misc_feature: MA Experiment 108545 PARAMETER Experiment Name: Zm_Imbibed_Seeds_P Parameter: Plant Line Value: 35A19
  misc_feature: MA Experiment 108545 PARAMETER Experiment Name: Zm_Imbibed_Seeds_P Parameter: Tissue Value: Aerial vs. Embryo
  misc_feature: MA Experiment ID: 108547 Result: Down-regulated in Transcription
  misc_feature: MA Experiment 108547 PARAMETER Experiment Name: Zm_Imbibed_Seeds_P Parameter: Age (day) Value: 4 vs. 2
  misc_feature: MA Experiment 108547 PARAMETER Experiment Name: Zm_Imbibed_Seeds_P Parameter: Organism Value: Zea mays
  misc_feature: MA Experiment 108547 PARAMETER Experiment Name: Zm_Imbibed_Seeds_P Parameter: Plant Line Value: 35A19
  misc_feature: MA Experiment 108547 PARAMETER Experiment Name: Zm_Imbibed_Seeds_P Parameter: Tissue Value: Aerial vs. Embryo
  misc_feature: MA Experiment ID: 108556 Result: Up-regulated in Transcription
  misc_feature: MA Experiment 108556 PARAMETER Experiment Name: Zm_Drought_P Parameter: Age (day) Value: 9
  misc_feature: MA Experiment 108556 PARAMETER Experiment Name: Zm_Drought_P Parameter: Organism Value: Zea mays
  misc_feature: MA Experiment 108556 PARAMETER Experiment Name: Zm_Drought_P Parameter: Plant Line Value: 35A19
  misc_feature: MA Experiment 108556 PARAMETER Experiment Name: Zm_Drought_P Parameter: Timepoint (hr) Value: 24
  misc_feature: MA Experiment 108556 PARAMETER Experiment Name: Zm_Drought_P Parameter: Tissue Value: Aerial
  misc_feature: MA Experiment 108556 PARAMETER Experiment Name: Zm_Drought_P Parameter: Treatment Value: Drought vs. No Drought
ttttttttcgcctccgaattccgatcaccaaaaaaaggcctttcttttcttttcgtcgccctctcggtgctctggcttcgctgcgtcgcccgcccgtctctaaaagccttgtgtggatcgtggacgccgacgcggccgcagcagcagccacgggacgggagtagaggcgcagagagagagagagaaagagcgagagaaaggttgtgctcgctgcctgccgccgagagacggatgaagaagtgcccatcggagctggagctggaggccttcctccgcggccgggaggacgccacggcggcggcgggcggcgggcggcggtggccgagcagaagcctgcgcacgacgtcgctgcgctggcgccgttcggcgccggtggcgtgttcccctccagcgatctgtccgccttcagcttcgctgactcgaacaccctcaatggaactggaaacatccataatcacctttggtcccataaccagaacgtcaggcatcccgcagtctccacgacgatcgagtcgcagtcgtcgatctgtgcagctgcagcagcaagtccaacatcggctaccaacctgtacctgaaagagagccaggctctgggcggcacgagtggttccgactccgacagcgattcgctgctggacatcgagggtggcccgtgcgagcagagcacgaacccacaggacgtgaagaggatgcgacggatggtgtcgaaccgtgagtctgctcgacggtccaggaagaggaagcaagcccacctagctgaccttgagacacaggtcgaccagctgcgaggcgagaacgcgtcgctcttcaagcagctgacggacgccaaccagcagttcacgaccgcggtcacggacaacaggatcctcaagtcggacgtggaggccctcagagtcaaggtgaagctggcggaggacatggtggcgcgcggcgcgctgtcgtgcgggctgggcagcctggggctgtcgccagcgctgaacccgcggcaggcgtgccgcggccccgacgtgctgtccgtgtccggcctggacttccccggcgccgacgacgcctgcttcacggggctgtccccggcggagcagctgcagctccagagctcccccctgcagagcatcgccgccagcctcgagagcctggacaaccggatggccagcgaggtcaccagctgcggggggcccggcgtcgacgtctggccgtgggaccaccactccaacggcggcctgtccaagtgaagccggagacgccgggtgggagtggggtgagactcgcgccgctcgccgacggcacctatcctgtcctagtgtatgcgtatatcgatatgcatggcgggcgctagctatgaccatgagccgccgttatttctgtgttcgctggagtggtgaaagtgaacggacttgagtttttcagagtccctcgtctccgtcggtacatttactagttctgtaatagaactgactagcttaagctcgtgctactacatatatatatgtatgctgagagactgaactcgaagcataatcatgctaccatattatgtcatcattacattccg

SEQ ID NO: 10584 - protein, 191 aa, Zea mays subsp. mays
  peptide (1)..(191): Ceres Seq. ID no. 12368824
  misc_feature (94)..(191): Homolog of NCBI NO: 28574039 NR Description: Salivary gland secretion 1 CG3047-PA
FFFASEFRSPKKGLSFLFVALSVLWLRCVARPSLKALCGSWTPTRPQQQPRDGSRGAERERERARERLCSLPAAERRMKKCPSELELEAFLRGREDATAAAGGGRRWPSRSLRTTSLRWRRSAPVACSPPAICPPSASLTRTPSMELETSIITFGPITRTSGIPQSPRRSSRSRRSVQLQQQVQHRLPTCT

SEQ ID NO: 10585 - protein, 180 aa, Zea mays subsp. mays
  peptide (1)..(180): Ceres Seq. ID no. 12368825
  misc_feature (1)..(56): Pfam Name: bZIP transcription factor Pfam Description: bZIP transcription factor
  misc_feature (1)..(134): Homolog of NCBI NO: 13365772 NR Description: RISBZ4 [Oryza sativa]
  misc_feature (161)..(180): Homolog of NCBI NO: 13365772 NR Description: RISBZ4 [Oryza sativa]
  misc_feature (1)..(134): Homolog of NCBI NO: 7489562 NR Description: probable transcription activator - rice
  misc_feature (1)..(139): Homolog of NCBI NO: 7489563 NR Description: probable transcription activator 2 - rice plasmid
  misc_feature (161)..(180): Homolog of NCBI NO: 7489563 NR Description: probable transcription activator 2 - rice plasmid
  misc_feature (1)..(169): Homolog of NCBI NO: 13365774 NR Description: RISBZ5 [Oryza sativa]
  misc_feature (1)..(80): Homolog of NCBI NO: 3287204 NR Description: RITA-1 protein [Oryza sativa]
  misc_feature (1)..(169): Homolog of NCBI NO: 18420842 NR Description: bZIP protein, G/HBF-1-related; protein id: supported by cDNA: gi_10954096 [Arabidopsis thaliana]
  misc_feature (5)..(80): Homolog of NCBI NO: 3287202 NR Description: RITA-2 protein [Oryza sativa]
  misc_feature (1)..(80): Homolog of NCBI NO: 100163 NR Description: light-induced protein CPRF-2 - parsley
MRRMVSNRESARRSRKRKQAHLADLETQVDQLRGENASLFKQLTDANQQFTTAVTDNRILKSDVEALRVKVKLAEDMVARGALSCGLGSLGLSPALNPRQACRGPDVLSVSGLDFPGADDACFTGLSPAEQLQLQSSPLQSIAASLESLDNRMASEVTSCGGPGVDVWPWDHHSNGGLSK

SEQ ID NO: 10586 - protein, 177 aa, Zea mays subsp. mays
  peptide (1)..(177): Ceres Seq. ID no. 12368826
  misc_feature (1)..(53): Pfam Name: bZIP transcription factor Pfam Description: bZIP transcription factor
  misc_feature (1)..(131): Homolog of NCBI NO: 13365772 NR Description: RISBZ4 [Oryza sativa]
  misc_feature (158)..(177): Homolog of NCBI NO: 13365772 NR Description: RISBZ4 [Oryza sativa]
  misc_feature (1)..(131): Homolog of NCBI NO: 7489562 NR Description: probable transcription activator - rice
  misc_feature (1)..(136): Homolog of NCBI NO: 7489563 NR Description: probable transcription activator 2 - rice plasmid
  misc_feature (158)..(177): Homolog of NCBI NO: 7489563 NR Description: probable transcription activator 2 - rice plasmid
  misc_feature (1)..(166): Homolog of NCBI NO: 13365774 NR Description: RISBZ5 [Oryza sativa]
  misc_feature (1)..(77): Homolog of NCBI NO: 3287204 NR Description: RITA-1 protein [Oryza sativa]
  misc_feature (1)..(166): Homolog of NCBI NO: 18420842 NR Description: bZIP protein, G/HBF-1-related; protein id: supported by cDNA: gi_10954096 [Arabidopsis thaliana]
  misc_feature (2)..(77): Homolog of NCBI NO: 3287202 NR Description: RITA-2 protein [Oryza sativa]
  misc_feature (1)..(77): Homolog of NCBI NO: 100163 NR Description: light-induced protein CPRF-2 - parsley
MVSNRESARRSRKRKQAHLADLETQVDQLRGENASLFKQLTDANQQFTTAVTDNRILKSDVEALRVKVKLAEDMVARGALSCGLGSLGLSPALNPRQACRGPDVLSVSGLDFPGADDACFTGLSPAEQLQLQSSPLQSIAASLESLDNRMASEVTSCGGPGVDVWPWDHHSNGGLSK

SEQ ID NO: 10587 - DNA, 714 bp, Zea mays subsp. mays
  misc_feature (1)..(714): Ceres Seq. ID no. 12350906
  misc_feature: MA Experiment ID: 108535 Result: Up-regulated in Transcription
  misc_feature: MA Experiment 108535 PARAMETER Experiment Name: Zm_Meristem_P Parameter: Age (day) Value: 8
  misc_feature: MA Experiment 108535 PARAMETER Experiment Name: Zm_Meristem_P Parameter: Organism Value: Zea mays
  misc_feature: MA Experiment 108535 PARAMETER Experiment Name: Zm_Meristem_P Parameter: Plant Line Value: 35A19
  misc_feature: MA Experiment 108535 PARAMETER Experiment Name: Zm_Meristem_P Parameter: Tissue Value: Root Meristem vs. Above Root Meristem
  misc_feature: MA Experiment ID: 20000534 Result: Down-regulated in Transcription
  misc_feature: MA Experiment 20000534 PARAMETER Experiment Name: Zm_Hybrid_Pollen_P Parameter: Age (day) Value: 8
  misc_feature: MA Experiment 20000534 PARAMETER Experiment Name: Zm_Hybrid_Pollen_P Parameter: Organism Value: Zea mays
  misc_feature: MA Experiment 20000534 PARAMETER Experiment Name: Zm_Hybrid_Pollen_P Parameter: Plant Line Value: 35A19
  misc_feature: MA Experiment 20000534 PARAMETER Experiment Name: Zm_Hybrid_Pollen_P Parameter: Tissue Value: Pollen vs. Aerial
aactgacccagagcgatcggagctgacgacgatggccgggaaggcggcggccgcgacggcggcgaggtgggcggaggggtacccgtggaaggagaagctggcaaagtacaagggtgagctcgggaagggggtgtggggatactgggagctcggcgcgtggaagccgctcggcatcagcgctcgcaagcgcgcccgcctccgcaaggaggtgctcctcgccggcgaggactggagctacgatcctccccgcggggagatgcgtaccaagcgcaagggccacaagtgcgaccgcatctccgccgagaagcgagcaaatactgttgagctgatgaagaagatgccccagatgctgctcgactacaagaaacgtaggtgggagaagaagatgaaagcggaggagagcggcaagaattgataccacgcggctcgtccagggtgcttctcttcctaaataaggtccaaactttatccaggaggtttgcaggacggctagattctgacgcgtcatttccttgtggattccttctctcctgtgatgcgactttggacgcactatcctgattgtgatgctttccaacacttgtgccactggatcgtgatttcagtgagccccaacttctgcagcactagtattttgttgagacaaatcagctataagcatgccatctgcccaataaacttgttcatcatgtaagatcaatgctgttagttttg

SEQ ID NO: 10588 - protein, 137 aa, Zea mays subsp. mays
  peptide (1)..(137): Ceres Seq. ID no. 12350907
  misc_feature (11)..(136): Homolog of NCBI NO: 18415817 NR Description: expressed protein; protein id: At4g22000.1, by cDNA: 21244., supported by cDNA: gi_17064891 [Arabidopsis
TDPERSELTTMAGKAAAATAARWAEGYPWKEKLAKYKGELGKGVWGYWELGAWKPLGISARKRARLRKEVLLAGEDWSYDPPRGEMRTKRKGHKCDRISAEKRANTVELMKKMPQMLLDYKKRRWEKKMKAEESGKN

SEQ ID NO: 10589 - protein, 127 aa, Zea mays subsp. mays
  peptide (1)..(127): Ceres Seq. ID no. 12350908
  misc_feature (1)..(126): Homolog of NCBI NO: 18415817 NR Description: expressed protein; protein id: At4g22000.1, by cDNA: 21244., supported by cDNA: gi_17064891 [Arabidopsis
MAGKAAAATAARWAEGYPWKEKLAKYKGELGKGVWGYWELGAWKPLGISARKRARLRKEVLLAGEDWSYDPPRGEMRTKRKGHKCDRISAEKRANTVELMKKMPQMLLDYKKRRWEKKMKAEESGKN

SEQ ID NO: 10590 - DNA, 1486 bp, Zea mays subsp. mays
  misc_feature (1)..(1486): Ceres Seq. ID no. 12434994
  misc_feature: MA Experiment ID: 108515 Result: Up-regulated in Transcription
  misc_feature: MA Experiment 108515 PARAMETER Experiment Name: Zm_2mM_SA_P Parameter: Age (day) Value: 8
  misc_feature: MA Experiment 108515 PARAMETER Experiment Name: Zm_2mM_SA_P Parameter: Organism Value: Zea mays
  misc_feature: MA Experiment 108515 PARAMETER Experiment Name: Zm_2mM_SA_P Parameter: Plant Line Value: 35A19
  misc_feature: MA Experiment 108515 PARAMETER Experiment Name: Zm_2mM_SA_P Parameter: Timepoint (hr) Value: 12
  misc_feature: MA Experiment 108515 PARAMETER Experiment Name: Zm_2mM_SA_P Parameter: Tissue Value: Aerial
  misc_feature: MA Experiment 108515 PARAMETER Experiment Name: Zm_2mM_SA_P Parameter: Treatment Value: 2mM SA vs. No Treatment
  misc_feature: MA Experiment ID: 108526 Result: Up-regulated in Transcription
  misc_feature: MA Experiment 108526 PARAMETER Experiment Name: Zm_5mM_NO_P Parameter: Age (day) Value: 8
  misc_feature: MA Experiment 108526 PARAMETER Experiment Name: Zm_5mM_NO_P Parameter: Organism Value: Zea mays
  misc_feature: MA Experiment 108526 PARAMETER Experiment Name: Zm_5mM_NO_P Parameter: Plant Line Value: 35A19
  misc_feature: MA Experiment 108526 PARAMETER Experiment Name: Zm_5mM_NO_P Parameter: Timepoint (hr) Value: 1
  misc_feature: MA Experiment 108526 PARAMETER Experiment Name: Zm_5mM_NO_P Parameter: Tissue Value: Aerial
  misc_feature: MA Experiment 108526 PARAMETER Experiment Name: Zm_5mM_NO_P Parameter: Treatment Value: 5mM NO vs. No Treatment
  misc_feature: MA Experiment ID: 108527 Result: Up-regulated in Transcription
  misc_feature: MA Experiment 108527 PARAMETER Experiment Name: Zm_5mM_NO_P Parameter: Age (day) Value: 8
  misc_feature: MA Experiment 108527 PARAMETER Experiment Name: Zm_5mM_NO_P Parameter: Organism Value: Zea mays
  misc_feature: MA Experiment 108527 PARAMETER Experiment Name: Zm_5mM_NO_P Parameter: Plant Line Value: 35A19
  misc_feature: MA Experiment 108527 PARAMETER Experiment Name: Zm_5mM_NO_P Parameter: Timepoint (hr) Value: 6
  misc_feature: MA Experiment 108527 PARAMETER Experiment Name: Zm_5mM_NO_P Parameter: Tissue Value: Aerial
  misc_feature: MA Experiment 108527 PARAMETER Experiment Name: Zm_5mM_NO_P Parameter: Treatment Value: 5mM NO vs. No Treatment
  misc_feature: MA Experiment ID: 108535 Result: Down-regulated in Transcription
  misc_feature: MA Experiment 108535 PARAMETER Experiment Name: Zm_Meristem_P Parameter: Age (day) Value: 8
  misc_feature: MA Experiment 108535 PARAMETER Experiment Name: Zm_Meristem_P Parameter: Organism Value: Zea mays
  misc_feature: MA Experiment 108535 PARAMETER Experiment Name: Zm_Meristem_P Parameter: Plant Line Value: 35A19
  misc_feature: MA Experiment 108535 PARAMETER Experiment Name: Zm_Meristem_P Parameter: Tissue Value: Root Meristem vs. Above Root Meristem
  misc_feature: MA Experiment ID: 108540 Result: Down-regulated in Transcription
  misc_feature: MA Experiment 108540 PARAMETER Experiment Name: Zm_20percent_PEG_P Parameter: Age (day) Value: 8
  misc_feature: MA Experiment 108540 PARAMETER Experiment Name: Zm_20percent_PEG_P Parameter: Organism Value: Zea mays
  misc_feature: MA Experiment 108540 PARAMETER Experiment Name: Zm_20percent_PEG_P Parameter: Plant Line Value: 35A19
  misc_feature: MA Experiment 108540 PARAMETER Experiment Name: Zm_20percent_PEG_P Parameter: Timepoint (hr) Value: 6
  misc_feature: MA Experiment 108540 PARAMETER Experiment Name: Zm_20percent_PEG_P Parameter: Tissue Value: Aerial
  misc_feature: MA Experiment 108540 PARAMETER Experiment Name: Zm_20percent_PEG_P Parameter: Treatment Value: 20percent PEG vs. No Treatment
  misc_feature: MA Experiment ID: 108556 Result: Down-regulated in Transcription
  misc_feature: MA Experiment 108556 PARAMETER Experiment Name: Zm_Drought_P Parameter: Age (day) Value: 9
  misc_feature: MA Experiment 108556 PARAMETER Experiment Name: Zm_Drought_P Parameter: Organism Value: Zea mays
  misc_feature: MA Experiment 108556 PARAMETER Experiment Name: Zm_Drought_P Parameter: Plant Line Value: 35A19
  misc_feature: MA Experiment 108556 PARAMETER Experiment Name: Zm_Drought_P Parameter: Timepoint (hr) Value: 24
  misc_feature: MA Experiment 108556 PARAMETER Experiment Name: Zm_Drought_P Parameter: Tissue Value: Aerial
  misc_feature: MA Experiment 108556 PARAMETER Experiment Name: Zm_Drought_P Parameter: Treatment Value: Drought vs. No Drought
  misc_feature: MA Experiment ID: 108687 Result: Down-regulated in Transcription
  misc_feature: MA Experiment 108687 PARAMETER Experiment Name: Zm_Embryos-Flowers__P Parameter: Tissue Value: Embryo vs. Aerial+
  misc_feature: MA Experiment ID: 20000480 Result: Down-regulated in Transcription
  misc_feature: MA Experiment 20000480 PARAMETER Experiment Name: Zm_Drought_P Parameter: Age (day) Value: 11
  misc_feature: MA Experiment 20000480 PARAMETER Experiment Name: Zm_Drought_P Parameter: Organism Value: Zea mays
  misc_feature: MA Experiment 20000480 PARAMETER Experiment Name: Zm_Drought_P Parameter: Plant Line Value: 35A19
  misc_feature: MA Experiment 20000480 PARAMETER Experiment Name: Zm_Drought_P Parameter: Timepoint (hr) Value: 72
  misc_feature: MA Experiment 20000480 PARAMETER Experiment Name: Zm_Drought_P Parameter: Tissue Value: Aerial
  misc_feature: MA Experiment 20000480 PARAMETER Experiment Name: Zm_Drought_P Parameter: Treatment Value: Drought vs. No Drought
  misc_feature: MA Experiment ID: 20000487 Result: Down-regulated in Transcription
  misc_feature: MA Experiment 20000487 PARAMETER Experiment Name: Zm_50mM_NH4NO3_L_to_H_P Parameter: Organism Value: Zea mays
  misc_feature: MA Experiment 20000487 PARAMETER Experiment Name: Zm_50mM_NH4NO3_L_to_H_P Parameter: Timepoint (hr) Value: 4
  misc_feature: MA Experiment 20000487 PARAMETER Experiment Name: Zm_50mM_NH4NO3_L_to_H_P Parameter: Tissue Value: Leaves
  misc_feature: MA Experiment 20000487 PARAMETER Experiment Name: Zm_50mM_NH4NO3_L_to_H_P Parameter: Treatment Value: 50mM NH4NO3 vs. 100mM Mannitol
  misc_feature: MA Experiment ID: 20000488 Result: Down-regulated in Transcription
  misc_feature: MA Experiment 20000488 PARAMETER Experiment Name: Zm_50mM_NH4NO3_L_to_H_P Parameter: Organism Value: Zea mays
  misc_feature: MA Experiment 20000488 PARAMETER Experiment Name: Zm_50mM_NH4NO3_L_to_H_P Parameter: Timepoint (hr) Value: 8
  misc_feature: MA Experiment 20000488 PARAMETER Experiment Name: Zm_50mM_NH4NO3_L_to_H_P Parameter: Tissue Value: Leaves
  misc_feature: MA Experiment 20000488 PARAMETER Experiment Name: Zm_50mM_NH4NO3_L_to_H_P Parameter: Treatment Value: 50mM NH4NO3 vs. 100mM Mannitol
  misc_feature: MA Experiment ID: 20000535 Result: Down-regulated in Transcription
  misc_feature: MA Experiment 20000535 PARAMETER Experiment Name: Zm_Hybrid_Seed_Dev_P Parameter: DAP Value: 30 vs. 12
  misc_feature: MA Experiment 20000535 PARAMETER Experiment Name: Zm_Hybrid_Seed_Dev_P Parameter: Organism Value: Zea mays
  misc_feature: MA Experiment 20000535 PARAMETER Experiment Name: Zm_Hybrid_Seed_Dev_P Parameter: Plant Line Value: 35A19
  misc_feature: MA Experiment 20000535 PARAMETER Experiment Name: Zm_Hybrid_Seed_Dev_P Parameter: Tissue Value: Embryo vs. Unfert Floret
  misc_feature: MA Experiment ID: 20001608 Result: Down-regulated in Transcription
  misc_feature: MA Experiment 20001608 PARAMETER Experiment Name: Zm_50ppm_KNO3_L-to-H_P Parameter: Age (day) Value: 21
  misc_feature: MA Experiment 20001608 PARAMETER Experiment Name: Zm_50ppm_KNO3_L-to-H_P Parameter: Organism Value: Zea mays
  misc_feature: MA Experiment 20001608 PARAMETER Experiment Name: Zm_50ppm_KNO3_L-to-H_P Parameter: Plant Line Value: 35A19
  misc_feature: MA Experiment 20001608 PARAMETER Experiment Name: Zm_50ppm_KNO3_L-to-H_P Parameter: Timepoint (hr) Value: 48
  misc_feature: MA Experiment 20001608 PARAMETER Experiment Name: Zm_50ppm_KNO3_L-to-H_P Parameter: Tissue Value: Shoots
  misc_feature: MA Experiment 20001608 PARAMETER Experiment Name: Zm_50ppm_KNO3_L-to-H_P Parameter: Treatment Value: 50ppm KNO3 vs. 50ppm KCl
  misc_feature: MA Experiment ID: 20001613 Result: Down-regulated in Transcription
  misc_feature: MA Experiment 20001613 PARAMETER Experiment Name: Zm_50ppm_KNO3_L-to-H_P Parameter: Age (day) Value: 20
  misc_feature: MA Experiment 20001613 PARAMETER Experiment Name: Zm_50ppm_KNO3_L-to-H_P Parameter: Organism Value: Zea mays
  misc_feature: MA Experiment 20001613 PARAMETER Experiment Name: Zm_50ppm_KNO3_L-to-H_P Parameter: Plant Line Value: 35A19
  misc_feature: MA Experiment 20001613 PARAMETER Experiment Name: Zm_50ppm_KNO3_L-to-H_P Parameter: Timepoint (hr) Value: 24
  misc_feature: MA Experiment 20001613 PARAMETER Experiment Name: Zm_50ppm_KNO3_L-to-H_P Parameter: Tissue Value: Roots
  misc_feature: MA Experiment 20001613 PARAMETER Experiment Name: Zm_50ppm_KNO3_L-to-H_P Parameter: Treatment Value: 50ppm KNO3 vs. 50ppm KCl
  misc_feature: MA Experiment ID: 20001614 Result: Down-regulated in Transcription
  misc_feature: MA Experiment 20001614 PARAMETER Experiment Name: Zm_50ppm_KNO3_L-to-H_P Parameter: Age (day) Value: 21
  misc_feature: MA Experiment 20001614 PARAMETER Experiment Name: Zm_50ppm_KNO3_L-to-H_P Parameter: Organism Value: Zea mays
  misc_feature: MA Experiment 20001614 PARAMETER Experiment Name: Zm_50ppm_KNO3_L-to-H_P Parameter: Plant Line Value: 35A19
  misc_feature: MA Experiment 20001614 PARAMETER Experiment Name: Zm_50ppm_KNO3_L-to-H_P Parameter: Timepoint (hr) Value: 48
  misc_feature: MA Experiment 20001614 PARAMETER Experiment Name: Zm_50ppm_KNO3_L-to-H_P Parameter: Tissue Value: Roots
  misc_feature: MA Experiment 20001614 PARAMETER Experiment Name: Zm_50ppm_KNO3_L-to-H_P Parameter: Treatment Value: 50ppm KNO3 vs. 50ppm KCl
gttcccgctgcccttccagggccacatcgacccgatgctgcacctggcgggcgtgctccacgcgcggggcctcggcggtgaccgtgctccacacgcgcttcaacgcgttggaccccgcgcggcacccggagttccagttcgtggccgtccccgacggcacgcccgccgacgtcgccgccacggggaggatcatcgacatcatcctggccatgaacgccgccatggaggcgtcgccggccgtcggggaggcgctgccgggcgtccgcggtcgcggggcaggaggggcggccccgcgcctcgtgcctcttcgtcgacgccaacctcctcgccgtgcacagggcggccagggcgctcggactgcccacgctggtgctgcgcaccgggagcgccgcctgcctcggctgcttcctggcctaccccatgctccacgaaaagggctatctgcctccgcaagagtcgcagctgtgcacgccggtgccggagctgccaccactccgagtgaaggacctgatctactcgaagcacagcgaccacgagctgatgcgcaaagtcctcgcccggggcagcgaaacagtgagagattgctccggcgtcgtcatcaacacagccgaggcactggaggcagccgagctagggaggctccgcgacgagctggtccacctcccggtggtgctcgcggccggcccactccacaagctctcctcctccaggggcgccgggagcagcttgctcgccccggaccacagctgcatcgagtggctggacgcgcagcagcccgggtcggtgctgtacgtgagcttcgggagcctggcggccatggacacgagcgagctccgggaggtggcatggggtctggcggagtgcggccaccccttcctatgggtcgtccggcccaacatggtacgaggctgcgacgtcgacagcgcgcggcagctgccggatggcttcgaggacgccgtcaagggcagaggcgcgtggtccgctgggccccgcagcaggaggtgctggcccaccgcgcagtgggtgggttctggagccactgcgggtggaactcgactctggaggcggtcagcgagggggtcccgatgatctgtaggccggacgccgtggaccagatgatgaacacgaggtacttgcaggacgtctggggcgtcggcttcgagctccaaggggagctggagagggggaagatcaaggacgcggttaggaagttgatgggtgagcgggagggtgctgagatgagaagagcagcgcaagagctttgcgcgaaactagcaggctgcttggagagcgctgggtcttctcaggttgccattgacaagttggttagctacatactgtctctgtgaatcttctgttctatggcgtatgtgtgttccgctggtttagcattggcagcagcttaacagctggtattctgatggacaattattcctgtcaattatatgtagtgttctctttctctaggtatttttttaatttctcc

SEQ ID NO: 10591 - protein, 448 aa, Zea mays subsp. mays
  peptide (1)..(448): Ceres Seq. ID no. 12434995
  misc_feature (320)..(448): Homolog of NCBI NO: 33146633 NR Description: putative UDP-glucosyltransferase [Oryza sativa
  misc_feature (22)..(98): Homolog of NCBI NO: 33146633 NR Description: putative UDP-glucosyltransferase [Oryza sativa
  misc_feature (320)..(439): Homolog of NCBI NO: 34900678 NR Description: glucuronosyl transferase-like protein [Oryza
  misc_feature (22)..(98): Homolog of NCBI NO: 34900678 NR Description: glucuronosyl transferase-like protein [Oryza
  misc_feature (320)..(448): Homolog of NCBI NO: 34900682 NR Description: glucuronosyl transferase-like protein [Oryza
  misc_feature (303)..(448): Homolog of NCBI NO: 34900680 NR Description: contains ESTs
  misc_feature (21)..(85): Homolog of NCBI NO: 34900680 NR Description: contains ESTs
  misc_feature (320)..(447): Homolog of NCBI NO: 34395172 NR Description: putative UDP-glucosyltransferase [Oryza sativa
  misc_feature (324)..(448): Homolog of NCBI NO: 33146634 NR Description: putative UDP-glucosyltransferase [Oryza sativa
  misc_feature (21)..(101): Homolog of NCBI NO: 33146634 NR Description: putative UDP-glucosyltransferase [Oryza sativa
SRCPSRATSTRCCTWRACSTRGASAVTVLHTRFNALDPARHPEFQFVAVPDGTPADVAATGRIIDIILAMNAAMEASPAVGEALPGVRGRGAGGAAPRLVPLRRRQPPRRAQGGQGARTAHAGAAHRERRLPRLLPGLPHAPRKGLSASARVAAVHAGAGAATTPSEGPDLLEAQRPRADAQSPRPGQRNSERLLRRRHQHSRGTGGSRAREAPRRAGPPPGGARGRPTPQALLLQGRREQLARPGPQLHRVAGRAAARVGAVRELREPGGHGHERAPGGGMGSGGVRPPLPMGRPAQHGTRLRRRQRAAAAGWLRGRRQGQRRVVRWAPQQEVLAHRAVGGFWSHCGWNSTLEAVSEGVPMICRPDAVDQMMNTRYLQDVWGVGFELQGELERGKIKDAVRKLMGEREGAEMRRAAQELCAKLAGCLESAGSSQVAIDKLVSYILSL

SEQ ID NO: 10592 - protein, 379 aa, Zea mays subsp. mays
  peptide (1)..(379): Ceres Seq. ID no. 12434996
  misc_feature (251)..(379): Homolog of NCBI NO: 33146633 NR Description: putative UDP-glucosyltransferase [Oryza sativa
  misc_feature (1)..(29): Homolog of NCBI NO: 33146633 NR Description: putative UDP-glucosyltransferase [Oryza sativa
  misc_feature (251)..(370): Homolog of NCBI NO: 34900678 NR Description: glucuronosyl transferase-like protein [Oryza
  misc_feature (1)..(29): Homolog of NCBI NO: 34900678 NR Description: glucuronosyl transferase-like protein [Oryza
  misc_feature (251)..(379): Homolog of NCBI NO: 34900682 NR Description: glucuronosyl transferase-like protein [Oryza
  misc_feature (234)..(379): Homolog of NCBI NO: 34900680 NR Description: contains ESTs
  misc_feature (1)..(16): Homolog of NCBI NO: 34900680 NR Description: contains ESTs
  misc_feature (251)..(378): Homolog of NCBI NO: 34395172 NR Description: putative UDP-glucosyltransferase [Oryza sativa
  misc_feature (255)..(379): Homolog of NCBI NO: 33146634 NR Description: putative UDP-glucosyltransferase [Oryza sativa
  misc_feature (1)..(32): Homolog of NCBI NO: 33146634 NR Description: putative UDP-glucosyltransferase [Oryza sativa
MNAAMEASPAVGEALPGVRGRGAGGAAPRLVPLRRRQPPRRAQGGQGARTAHAGAAHRERRLPRLLPGLPHAPRKGLSASARVAAVHAGAGAATTPSEGPDLLEAQRPRADAQSPRPGQRNSERLLRRRHQHSRGTGGSRAREAPRRAGPPPGGARGRPTPQALLLQGRREQLARPGPQLHRVAGRAAARVGAVRELREPGGHGHERAPGGGMGSGGVRPPLPMGRPAQHGTRLRRRQRAAAAGWLRGRRQGQRRVVRWAPQQEVLAHRAVGGFWSHCGWNSTLEAVSEGVPMICRPDAVDQMMNTRYLQDVWGVGFELQGELERGKIKDAVRKLMGEREGAEMRRAAQELCAKLAGCLESAGSSQVAIDKLVSYILSL

SEQ ID NO: 10593 - protein, 375 aa, Zea mays subsp. mays
  peptide (1)..(375): Ceres Seq. ID no. 12434997
  misc_feature (247)..(375): Homolog of NCBI NO: 33146633 NR Description: putative UDP-glucosyltransferase [Oryza sativa
  misc_feature (1)..(25): Homolog of NCBI NO: 33146633 NR Description: putative UDP-glucosyltransferase [Oryza sativa
  misc_feature (247)..(366): Homolog of NCBI NO: 34900678 NR Description: glucuronosyl transferase-like protein [Oryza
  misc_feature (1)..(25): Homolog of NCBI NO: 34900678 NR Description: glucuronosyl transferase-like protein [Oryza
  misc_feature (247)..(375): Homolog of NCBI NO: 34900682 NR Description: glucuronosyl transferase-like protein [Oryza
  misc_feature (230)..(375): Homolog of NCBI NO: 34900680 NR Description: contains ESTs
  misc_feature (1)..(12): Homolog of NCBI NO: 34900680 NR Description: contains ESTs
  misc_feature (247)..(374): Homolog of NCBI NO: 34395172 NR Description: putative UDP-glucosyltransferase [Oryza sativa
  misc_feature (251)..(375): Homolog of NCBI NO: 33146634 NR Description: putative UDP-glucosyltransferase [Oryza sativa
  misc_feature (1)..(28): Homolog of NCBI NO: 33146634 NR Description: putative UDP-glucosyltransferase [Oryza sativa
MEASPAVGEALPGVRGRGAGGAAPRLVPLRRRQPPRRAQGGQGARTAHAGAAHRERRLPRLLPGLPHAPRKGLSASARVAAVHAGAGAATTPSEGPDLLEAQRPRADAQSPRPGQRNSERLLRRRHQHSRGTGGSRAREAPRRAGPPPGGARGRPTPQALLLQGRREQLARPGPQLHRVAGRAAARVGAVRELREPGGHGHERAPGGGMGSGGVRPPLPMGRPAQHGTRLRRRQRAAAAGWLRGRRQGQRRVVRWAPQQEVLAHRAVGGFWSHCGWNSTLEAVSEGVPMICRPDAVDQMMNTRYLQDVWGVGFELQGELERGKIKDAVRKLMGEREGAEMRRAAQELCAKLAGCLESAGSSQVAIDKLVSYILSL

SEQ ID NO: 10594 - DNA, 1446 bp, Zea mays subsp. mays
  misc_feature (1)..(1446): Ceres Seq. ID no. 12368983
  misc_feature: MA Experiment ID: 108528 Result: Down-regulated in Transcription
  misc_feature: MA Experiment 108528 PARAMETER Experiment Name: Zm_Imbibed_Seeds_P Parameter: Age (day) Value: 5 vs. 2
  misc_feature: MA Experiment 108528 PARAMETER Experiment Name: Zm_Imbibed_Seeds_P Parameter: Organism Value: Zea mays
  misc_feature: MA Experiment 108528 PARAMETER Experiment Name: Zm_Imbibed_Seeds_P Parameter: Plant Line Value: 35A19
  misc_feature: MA Experiment 108528 PARAMETER Experiment Name: Zm_Imbibed_Seeds_P Parameter: Tissue Value: Aerial vs. Embryo
  misc_feature: MA Experiment ID: 108530 Result: Down-regulated in Transcription
  misc_feature: MA Experiment 108530 PARAMETER Experiment Name: Zm_Imbibed_Seeds_P Parameter: Age (day) Value: 6 vs. 2
  misc_feature: MA Experiment 108530 PARAMETER Experiment Name: Zm_Imbibed_Seeds_P Parameter: Organism Value: Zea mays
  misc_feature: MA Experiment 108530 PARAMETER Experiment Name: Zm_Imbibed_Seeds_P Parameter: Plant Line Value: 35A19
  misc_feature: MA Experiment 108530 PARAMETER Experiment Name: Zm_Imbibed_Seeds_P Parameter: Tissue Value: Aerial vs. Embryo
  misc_feature: MA Experiment ID: 108545 Result: Down-regulated in Transcription
  misc_feature: MA Experiment 108545 PARAMETER Experiment Name: Zm_Imbibed_Seeds_P Parameter: Age (day) Value: 3 vs. 2
  misc_feature: MA Experiment 108545 PARAMETER Experiment Name: Zm_Imbibed_Seeds_P Parameter: Organism Value: Zea mays
  misc_feature: MA Experiment 108545 PARAMETER Experiment Name: Zm_Imbibed_Seeds_P Parameter: Plant Line Value: 35A19
  misc_feature: MA Experiment 108545 PARAMETER Experiment Name: Zm_Imbibed_Seeds_P Parameter: Tissue Value: Aerial vs. Embryo
  misc_feature: MA Experiment ID: 108547 Result: Down-regulated in Transcription
  misc_feature: MA Experiment 108547 PARAMETER Experiment Name: Zm_Imbibed_Seeds_P Parameter: Age (day) Value: 4 vs. 2
  misc_feature: MA Experiment 108547 PARAMETER Experiment Name: Zm_Imbibed_Seeds_P Parameter: Organism Value: Zea mays
  misc_feature: MA Experiment 108547 PARAMETER Experiment Name: Zm_Imbibed_Seeds_P Parameter: Plant Line Value: 35A19
  misc_feature: MA Experiment 108547 PARAMETER Experiment Name: Zm_Imbibed_Seeds_P Parameter: Tissue Value: Aerial vs. Embryo
  misc_feature: MA Experiment ID: 20000492 Result: Down-regulated in Transcription
  misc_feature: MA Experiment 20000492 PARAMETER Experiment Name: Zm_Hybrid_Seed_Dev_P Parameter: DAP Value: 12
  misc_feature: MA Experiment 20000492 PARAMETER Experiment Name: Zm_Hybrid_Seed_Dev_P Parameter: Organism Value: Zea mays
  misc_feature: MA Experiment 20000492 PARAMETER Experiment Name: Zm_Hybrid_Seed_Dev_P Parameter: Plant Line Value: 35A19
  misc_feature: MA Experiment 20000492 PARAMETER Experiment Name: Zm_Hybrid_Seed_Dev_P Parameter: Tissue Value: Fert Kernel vs. Unfert Floret
  misc_feature: MA Experiment ID: 20000535 Result: Down-regulated in Transcription
  misc_feature: MA Experiment 20000535 PARAMETER Experiment Name: Zm_Hybrid_Seed_Dev_P Parameter: DAP Value: 30 vs. 12
  misc_feature: MA Experiment 20000535 PARAMETER Experiment Name: Zm_Hybrid_Seed_Dev_P Parameter: Organism Value: Zea mays
  misc_feature: MA Experiment 20000535 PARAMETER Experiment Name: Zm_Hybrid_Seed_Dev_P Parameter: Plant Line Value: 35A19
  misc_feature: MA Experiment 20000535 PARAMETER Experiment Name: Zm_Hybrid_Seed_Dev_P Parameter: Tissue Value: Embryo vs. Unfert Floret
accttgtgttcttgcgctttctagctaggaagctctccttccttccgcgtagcctagacgaccactgtgcctgatcctgtcagctcagaacgtccgctctgccctccacgagtaagcgtggcgtcgccgtcgccgtcggggcggcgcttcccgtcggacaccacggcgatcgcgagctggcttccgtcgcccgccggcgccggccggggggacgacctctcgctgggtttcaatgccggcgccgcctccgcctcgtctggcgcctcgctggcggcagggctctggggctccgcggcgtcgcgccaggccgcggctgctgccgctgccgccgccgccgccgcggcgctcggctacggggcgataggccccaccggcgacgtcgggatgctcgtcgtcgcgcctccgggctcgttccaccaccagcgggcagccgacgacgacgactccgtgctcccgctcgtcaccgcggcgcagcgcaccctcgtcaacgcagacgccgcctccggcggccacggcaatccgcccgtgtcgtccgctggtgccatccagttttggcaccaggagccggccccggatgggcatgggtcccacggcgagaaggccgtcgccatgctggatcacgccagcggcgggcccgggtccggcggggcgacgtgccaggactgcggcaaccaggcgaagaaaggctgcgcgcacagccgctgccgcacgtgctgcaacagccgtggcttcgagtgtgacacccatgtcaggagcacctgggtgcccgccgcgcgccgccgagagcgcctgcagctcgcgggtggcggtggcgccggcgccggagcctcccctcctccccccacgcccgccacgaccaagaaaccccgcctggcgtgcccgatccccacgacgacggcggccaactctcgcgcctccacctccaacgccaccacgcctcgcagcttcgacgcctcctccggccaccaagacgcgtctttcaaggacagcctgccgcggcatgtgcgcgggccggcggtgttccggtgcgtgcgggtgacgtccgtggacgacggcggcggcggcggcggcaccaacggcgaggtcgcgtaccaggcggcggtgaccatcaacgggcacctgttcaggggcctcctctacgaccacggcgccgaagccgtgatgcccaccgcgtccgacctcaacctcggcagcgccgcccccaacctgtacagcggcgccagcgccccgctcatcctgggtggcctgggcagctgggctacggtaacacacacaccgtgaagttctgatcggtgagaagcaacaccgatcgagcaagggtggagtggagtagttccgttgtttgtccgctcgctttctttgtttcagctcattgtgactgctagcagcagtatagcagtgcagtggctcagcttcatgttactgaaagtgttgccatgtcgtgtc

SEQ ID NO: 10595 - protein, 298 aa, Zea mays subsp. mays
  peptide (1)..(298): Ceres Seq. ID no. 12368984
  misc_feature (82)..(257): Pfam Name: Domain of unknown function (DUF702) Pfam Description: Domain of unknown function (DUF702)
  misc_feature (15)..(275): Homolog of NCBI NO: 34906658 NR Description: putative LRP(lateral root primordia) 1 [Oryza
  misc_feature (81)..(284): Homolog of NCBI NO: 18416839 NR Description: lateral root primordia (LRP1); protein id: [Arabidopsis thaliana] >gi|14586363|emb|CAC42894.1| lateral root
  misc_feature (81)..(281): Homolog of NCBI NO: 882341 NR Description: LRP1
  misc_feature (90)..(258): Homolog of NCBI NO: 15234365 NR Description: putative protein; protein id: At4g36260.1
  misc_feature (78)..(257): Homolog of NCBI NO: 15222285 NR Description: unknown protein; protein id: At1g75520.1
  misc_feature (159)..(257): Homolog of NCBI NO: 15224110 NR Description: unknown protein; protein id: At2g18120.1
  misc_feature (43)..(137): Homolog of NCBI NO: 15224110 NR Description: unknown protein; protein id: At2g18120.1
  misc_feature (204)..(282): Homolog of NCBI NO: 33945875 NR Description: hypothetical protein [Lotus corniculatus var.
  misc_feature (88)..(136): Homolog of NCBI NO: 33945875 NR Description: hypothetical protein [Lotus corniculatus var.
  misc_feature (87)..(255): Homolog of NCBI NO: 15223669 NR Description: hypothetical protein; protein id: At1g19790.1
MLVVAPPGSFHHQRAADDDDSVLPLVTAAQRTLVNADAASGGHGNPPVSSAGAIQFWHQEPAPDGHGSHGEKAVAMLDHASGGPGSGGATCQDCGNQAKKGCAHSRCRTCCNSRGFECDTHVRSTWVPAARRRERLQLAGGGGAGAGASPPPPTPATTKKPRLACPIPTTTAANSRASTSNATTPRSFDASSGHQDASFKDSLPRHVRGPAVFRCVRVTSVDDGGGGGGTNGEVAYQAAVTINGHLFRGLLYDHGAEAVMPTASDLNLGSAAPNLYSGASAPLILGGLGSWATVTHTP

SEQ ID NO: 10596 - protein, 223 aa, Zea mays subsp. mays
  peptide (1)..(223): Ceres Seq. ID no. 12368985
  misc_feature (7)..(182): Pfam Name: Domain of unknown function (DUF702) Pfam Description: Domain of unknown function (DUF702)
  misc_feature (1)..(200): Homolog of NCBI NO: 34906658 NR Description: putative LRP(lateral root primordia) 1 [Oryza
  misc_feature (6)..(209): Homolog of NCBI NO: 18416839 NR Description: lateral root primordia (LRP1); protein id: [Arabidopsis thaliana] >gi|14586363|emb|CAC42894.1| lateral root
  misc_feature (6)..(206): Homolog of NCBI NO: 882341 NR Description: LRP1
  misc_feature (15)..(183): Homolog of NCBI NO: 15234365 NR Description: putative protein; protein id: At4g36260.1
  misc_feature (3)..(182): Homolog of NCBI NO: 15222285 NR Description: unknown protein; protein id: At1g75520.1
  misc_feature (84)..(182): Homolog of NCBI NO: 15224110 NR Description: unknown protein; protein id: At2g18120.1
  misc_feature (1)..(62): Homolog of NCBI NO: 15224110 NR Description: unknown protein; protein id: At2g18120.1
  misc_feature (129)..(207): Homolog of NCBI NO: 33945875 NR Description: hypothetical protein [Lotus corniculatus var.
  misc_feature (13)..(61): Homolog of NCBI NO: 33945875 NR Description: hypothetical protein [Lotus corniculatus var.
  misc_feature (12)..(180): Homolog of NCBI NO: 15223669 NR Description: hypothetical protein; protein id: At1g19790.1
MLDHASGGPGSGGATCQDCGNQAKKGCAHSRCRTCCNSRGFECDTHVRSTWVPAARRRERLQLAGGGGAGAGASPPPPTPATTKKPRLACPIPTTTAANSRASTSNATTPRSFDASSGHQDASFKDSLPRHVRGPAVFRCVRVTSVDDGGGGGGTNGEVAYQAAVTINGHLFRGLLYDHGAEAVMPTASDLNLGSAAPNLYSGASAPLILGGLGSWATVTHTP

SEQ ID NO: 10597 - protein, 154 aa, Zea mays subsp. mays
  peptide (1)..(154): Ceres Seq. ID no. 12368986
  misc_feature (1)..(154): Pfam Name: Formin Homology 2 Domain Pfam Description: Formin Homology 2 Domain
  misc_feature (1)..(154): Homolog of NCBI NO: 11360494 NR Description: antifreeze glycopeptide AFGP polyprotein precursor
  misc_feature (1)..(154): Homolog of NCBI NO: 27375632 NR Description: blr0521 [Bradyrhizobium japonicum]
  misc_feature (1)..(154): Homolog of NCBI NO: 18025526 NR Description: LF3 [cercopithicine herpesvirus 15]
  misc_feature (1)..(154): Homolog of NCBI NO: 18025526 NR Description: LF3 [cercopithicine herpesvirus 15]
  misc_feature (1)..(154): Homolog of NCBI NO: 11360494 NR Description: antifreeze glycopeptide AFGP polyprotein precursor
  misc_feature (1)..(154): Homolog of NCBI NO: 11360494 NR Description: antifreeze glycopeptide AFGP polyprotein precursor
  misc_feature (1)..(154): Homolog of NCBI NO: 11360318 NR Description: probable mucin DKFZp434C196.1 - human (fragment)
  misc_feature (1)..(154): Homolog of NCBI NO: 18025526 NR Description: LF3 [cercopithicine herpesvirus 15]
  misc_feature (1)..(154): Homolog of NCBI NO: 186396 NR Description: mucin
  misc_feature (1)..(154): Homolog of NCBI NO: 188864 NR Description: mucin
MGMGPTARRPSPCWITPAAGPGPAGRRARTAATRRRKAARTAAAARAATAVASSVTPMSGAPGCPPRAAESACSSRVAVAPAPEPPLLPPRPPRPRNPAWRARSPRRRRPTLAPPPPTPPRLAASTPPPATKTRLSRTACRGMCAGRRCSGACG

SEQ ID NO: 10598 - DNA, 1424 bp, Zea mays subsp. mays
  misc_feature (1)..(1424): Ceres Seq. ID no. 12340535
  misc_feature: MA Experiment ID: 108529 Result: Up-regulated in Transcription
  misc_feature: MA Experiment 108529 PARAMETER Experiment Name: Zm_Imbibed_Seeds_P Parameter: Age (day) Value: 5 vs. 2
  misc_feature: MA Experiment 108529 PARAMETER Experiment Name: Zm_Imbibed_Seeds_P Parameter: Organism Value: Zea mays
  misc_feature: MA Experiment 108529 PARAMETER Experiment Name: Zm_Imbibed_Seeds_P Parameter: Plant Line Value: 35A19
  misc_feature: MA Experiment 108529 PARAMETER Experiment Name: Zm_Imbibed_Seeds_P Parameter: Tissue Value: Roots vs. Embryo
  misc_feature: MA Experiment ID: 108535 Result: Down-regulated in Transcription
  misc_feature: MA Experiment 108535 PARAMETER Experiment Name: Zm_Meristem_P Parameter: Age (day) Value: 8
  misc_feature: MA Experiment 108535 PARAMETER Experiment Name: Zm_Meristem_P Parameter: Organism Value: Zea mays
  misc_feature: MA Experiment 108535 PARAMETER Experiment Name: Zm_Meristem_P Parameter: Plant Line Value: 35A19
  misc_feature: MA Experiment 108535 PARAMETER Experiment Name: Zm_Meristem_P Parameter: Tissue Value: Root Meristem vs. Above Root Meristem
  misc_feature: MA Experiment ID: 108543 Result: Down-regulated in Transcription
  misc_feature: MA Experiment ID: 108546 Result: Up-regulated in Transcription
  misc_feature: MA Experiment 108546 PARAMETER Experiment Name: Zm_Imbibed_Seeds_P Parameter: Age (day) Value: 3 vs. 2
  misc_feature: MA Experiment 108546 PARAMETER Experiment Name: Zm_Imbibed_Seeds_P Parameter: Organism Value: Zea mays
  misc_feature: MA Experiment 108546 PARAMETER Experiment Name: Zm_Imbibed_Seeds_P Parameter: Plant Line Value: 35A19
  misc_feature: MA Experiment 108546 PARAMETER Experiment Name: Zm_Imbibed_Seeds_P Parameter: Tissue Value: Roots vs. Embryo
  misc_feature: MA Experiment ID: 108597 Result: Down-regulated in Transcription
  misc_feature: MA Experiment 108597 PARAMETER Experiment Name: Zm_100uM_ABA_P Parameter: Age (day) Value: 9
  misc_feature: MA Experiment 108597 PARAMETER Experiment Name: Zm_100uM_ABA_P Parameter: Organism Value: Zea mays
  misc_feature: MA Experiment 108597 PARAMETER Experiment Name: Zm_100uM_ABA_P Parameter: Plant Line Value: 35A19
  misc_feature: MA Experiment 108597 PARAMETER Experiment Name: Zm_100uM_ABA_P Parameter: Timepoint (hr) Value: 24
  misc_feature: MA Experiment 108597 PARAMETER Experiment Name: Zm_100uM_ABA_P Parameter: Tissue Value: Aerial
  misc_feature: MA Experiment 108597 PARAMETER Experiment Name: Zm_100uM_ABA_P Parameter: Treatment Value: 100uM ABA vs. No Treatment
  misc_feature: MA Experiment ID: 20000477 Result: Down-regulated in Transcription
  misc_feature: MA Experiment 20000477 PARAMETER Experiment Name: Zm_5mM_SA_P Parameter: Age (day) Value: 10
  misc_feature: MA Experiment 20000477 PARAMETER Experiment Name: Zm_5mM_SA_P Parameter: Organism Value: Zea mays
  misc_feature: MA Experiment 20000477 PARAMETER Experiment Name: Zm_5mM_SA_P Parameter: Plant Line Value: 35A19
  misc_feature: MA Experiment 20000477 PARAMETER Experiment Name: Zm_5mM_SA_P Parameter: Timepoint (hr) Value: 48
  misc_feature: MA Experiment 20000477 PARAMETER Experiment Name: Zm_5mM_SA_P Parameter: Tissue Value: Aerial
  misc_feature: MA Experiment 20000477 PARAMETER Experiment Name: Zm_5mM_SA_P Parameter: Treatment Value: 5mM SA vs. No Treatment
  misc_feature: MA Experiment ID: 20000478 Result: Down-regulated in Transcription
  misc_feature: MA Experiment 20000478 PARAMETER Experiment Name: Zm_5mM_SA_P Parameter: Age (day) Value: 11
  misc_feature: MA Experiment 20000478 PARAMETER Experiment Name: Zm_5mM_SA_P Parameter: Organism Value: Zea mays
  misc_feature: MA Experiment 20000478 PARAMETER Experiment Name: Zm_5mM_SA_P Parameter: Plant Line Value: 35A19
  misc_feature: MA Experiment 20000478 PARAMETER Experiment Name: Zm_5mM_SA_P Parameter: Timepoint (hr) Value: 72
  misc_feature: MA Experiment 20000478 PARAMETER Experiment Name: Zm_5mM_SA_P Parameter: Tissue Value: Aerial
  misc_feature: MA Experiment 20000478 PARAMETER Experiment Name: Zm_5mM_SA_P Parameter: Treatment Value: 5mM SA vs. No Treatment
  misc_feature: MA Experiment ID: 20000480 Result: Down-regulated in Transcription
  misc_feature: MA Experiment 20000480 PARAMETER Experiment Name: Zm_Drought_P Parameter: Age (day) Value: 11
  misc_feature: MA Experiment 20000480 PARAMETER Experiment Name: Zm_Drought_P Parameter: Organism Value: Zea mays
  misc_feature: MA Experiment 20000480 PARAMETER Experiment Name: Zm_Drought_P Parameter: Plant Line Value: 35A19
  misc_feature: MA Experiment 20000480 PARAMETER Experiment Name: Zm_Drought_P Parameter: Timepoint (hr) Value: 72
  misc_feature: MA Experiment 20000480 PARAMETER Experiment Name: Zm_Drought_P Parameter: Tissue Value: Aerial
  misc_feature: MA Experiment 20000480 PARAMETER Experiment Name: Zm_Drought_P Parameter: Treatment Value: Drought vs. No Drought
  misc_feature: MA Experiment ID: 20001612 Result: Down-regulated in Transcription
  misc_feature: MA Experiment 20001612 PARAMETER Experiment Name: Zm_50ppm_KNO3_L-to-H_P Parameter: Age (day) Value: 19
  misc_feature: MA Experiment 20001612 PARAMETER Experiment Name: Zm_50ppm_KNO3_L-to-H_P Parameter: Organism Value: Zea mays
  misc_feature: MA Experiment 20001612 PARAMETER Experiment Name: Zm_50ppm_KNO3_L-to-H_P Parameter: Plant Line Value: 35A19
  misc_feature: MA Experiment 20001612 PARAMETER Experiment Name: Zm_50ppm_KNO3_L-to-H_P Parameter: Timepoint (hr) Value: 8
  misc_feature: MA Experiment 20001612 PARAMETER Experiment Name: Zm_50ppm_KNO3_L-to-H_P Parameter: Tissue Value: Roots
  misc_feature: MA Experiment 20001612 PARAMETER Experiment Name: Zm_50ppm_KNO3_L-to-H_P Parameter: Treatment Value: 50ppm KNO3 vs. 50ppm KCl
aaaaagagacctgggcaggacgacacaggcagagccgccggccctcgcttcttggtggggtctagtttctttctcgcctctgcctgtgcctgctggtggtaagtaataacagcgacacggtacccacgcacngcggcggcggcggcgacgacgaagacgacatgaccgtcggcgacgacgcggcggcgccggggcgggggcagacggtgtgcgtnaccggcgccggcggctacgtcgggtcgtggatcgtcaagctcctgctcnnncngggctacgccgtccgcggcaccgtgcgcaaccctgacgacgcgaagaacgcgcacctgctggcgctccccggcgcggcggagcggctggcgctgtgcaaggccgacctgctcgactacggcgcgctaagggcggccgtcgccggctgccacaagcgtcttccacgccgcgtcgccggtcaccgacgacccggaggagatggtggagccggcggtgcgggggacgcggtacgtcatcgacgcggcggccgaggccggcacggtccgccgcgtcgtcctgacgtcgtcgatcggcgcggtggccatggacccccgccgcgagccggacgccgtcgtcgacgagtcgtgctggagcgacctcgacttctgcaagaagaccaagaactggtactgctacggcaaggcggcggcggagcgggcggcgtgggagncggcggcggcgcgcggggtggacctggtggtggtggtgccggtgctggtgcagggcccggcgctgcagccgtcggtgaacgccagcctgatgcacgtgctcaagtacctgaacgggtccgccaagacgtacgccaacgcggtgcaggcgtacgtgcacgtccgcgacgccgccgacgcgcacgtccgcgtcttcgaggcgccccgcgccgccggccgctacatctgcgccgacgccgtgctccaccgcgaggacgtcgtccgcaccctccgcaagtccttcccgggctacccngtcccggagaggtgctctgacgaggtgaacccgaggaagcagccgtacaagatctccaaccagcggctgagggagctgggcctggagttcaccccggcggcgcaggcgctgtacgacaccgtcgtgtgcttccaggagaagggcatcctccctctccctgtccccgccccaacgccggcgtcaccggacgcctgagctagctgatgagctggcccagaaccaacgaagaaacatgtttggcacgcaaacngctattataacagtcgctgcttcgatcattctgccgctagagatagaatgtggagtgtgtgctactcgttgtgggcgtaagagtgtcagaagagtgcagcagtaactatatcgatgcgactttttatatgttgctatatcatgtgtgacaatctcctaataataaatatatggagtatcgtcct

SEQ ID NO: 10599 - protein, 282 aa, Zea mays subsp. mays
  peptide (1)..(282): Ceres Seq. ID no. 12340536
  misc_feature (16)..(83): Pfam Name: NAD dependent epimerase/dehydratase family Pfam Description: NAD dependent epimerase/dehydratase family
  misc_feature (1)..(86): Homolog of NCBI NO: 25140432 NR Description: cinnamoyl CoA reductase [Hordeum vulgare]
  misc_feature (10)..(86): Homolog of NCBI NO: 3341511 NR Description: cinnamoyl-CoA reductase [Saccharum officinarum]
  misc_feature (7)..(85): Homolog of NCBI NO: 3242328 NR Description: cinnamoyl-CoA reductase [Zea mays]
  misc_feature (1)..(86): Homolog of NCBI NO: 9964087 NR Description: cinnamoyl CoA reductase [Lolium perenne]
  misc_feature (8)..(85): Homolog of NCBI NO: 7431410 NR Description: cinnamoyl CoA reductase - maize
  misc_feature (1)..(86): Homolog of NCBI NO: 17978549 NR Description: cinnamoyl-CoA reductase [Lolium perenne]
  misc_feature (5)..(85): Homolog of NCBI NO: 9998901 NR Description: cinnamoyl-CoA reductase [Populus balsamifera
  misc_feature (5)..(85): Homolog of NCBI NO: 40233135 NR Description: cinnamoyl CoA reductase [Populus tomentosa]
  misc_feature (5)..(85): Homolog of NCBI NO: 2960364 NR Description: cinnamoyl CoA reductase [Populus balsamifera
  misc_feature (8)..(85): Homolog of NCBI NO: 7431407 NR Description: cinnamoyl-CoA reductase (EC 1.2.1.44) CCR - cider
  misc_feature (18)..(18): Xaa is any aa, unknown or other
  misc_feature (35)..(35): Xaa is any aa, unknown or other
  misc_feature (36)..(36): Xaa is any aa, unknown or other
  misc_feature (179)..(179): Xaa is any aa, unknown or other
  misc_feature (277)..(277): Xaa is any aa, unknown or other
MTVGDDAAAPGRGQTVCXTGAGGYVGSWIVKLLLXXGYAVRGTVRNPDDAKNAHLLALPGAAERLALCKADLLDYGALRAAVAGCHKRLPRRVAGHRRPGGDGGAGGAGDAVRHRRGGRGRHGPPRRPDVVDRRGGHGPPPRAGRRRRRVVLERPRLLQEDQELVLLRQGGGGAGGVGXGGGARGGPGGGGAGAGAGPGAAAVGERQPDARAQVPERVRQDVRQRGAGVRARPRRRRRARPRLRGAPRRRPLHLRRRRAPPRGRRPHPPQVLPGLPXPGEVL

SEQ ID NO: 10600 - protein, 239 aa, Zea mays subsp. mays
  peptide (1)..(239): Ceres Seq. ID no. 12340537
  misc_feature (1)..(202): Pfam Name: NAD dependent epimerase/dehydratase family Pfam Description: NAD dependent epimerase/dehydratase family
  misc_feature (1)..(228): Homolog of NCBI NO: 25140432 NR Description: cinnamoyl CoA reductase [Hordeum vulgare]
  misc_feature (1)..(227): Homolog of NCBI NO: 3341511 NR Description: cinnamoyl-CoA reductase [Saccharum officinarum]
  misc_feature (1)..(227): Homolog of NCBI NO: 3242328 NR Description: cinnamoyl-CoA reductase [Zea mays]
  misc_feature (1)..(228): Homolog of NCBI NO: 9964087 NR Description: cinnamoyl CoA reductase [Lolium perenne]
  misc_feature (1)..(227): Homolog of NCBI NO: 7431410 NR Description: cinnamoyl CoA reductase - maize
  misc_feature (1)..(227): Homolog of NCBI NO: 17978549 NR Description: cinnamoyl-CoA reductase [Lolium perenne]
  misc_feature (1)..(231): Homolog of NCBI NO: 9998901 NR Description: cinnamoyl-CoA reductase [Populus balsamifera
  misc_feature (1)..(231): Homolog of NCBI NO: 40233135 NR Description: cinnamoyl CoA reductase [Populus tomentosa]
  misc_feature (1)..(231): Homolog of NCBI NO: 2960364 NR Description: cinnamoyl CoA reductase [Populus balsamifera
  misc_feature (1)..(230): Homolog of NCBI NO: 7431407 NR Description: cinnamoyl-CoA reductase (EC 1.2.1.44) CCR - cider
  misc_feature (78)..(78): Xaa is any aa, unknown or other
  misc_feature (175)..(175): Xaa is any aa, unknown or other
MVEPAVRGTRYVIDAAAEAGTVRRVVLTSSIGAVAMDPRREPDAVVDESCWSDLDFCKKTKNWYCYGKAAAERAAWEXAAARGVDLVVVVPVLVQGPALQPSVNASLMHVLKYLNGSAKTYANAVQAYVHVRDAADAHVRVFEAPRAAGRYICADAVLHREDVVRTLRKSFPGYXVPERCSDEVNPRKQPYKISNQRLRELGLEFTPAAQALYDTVVCFQEKGILPLPVPAPTPASPDA

SEQ ID NO: 10601 - protein, 204 aa, Zea mays subsp. mays
  peptide (1)..(204): Ceres Seq. ID no. 12340538
  misc_feature (1)..(167): Pfam Name: NAD dependent epimerase/dehydratase family Pfam Description: NAD dependent epimerase/dehydratase family
  misc_feature (1)..(193): Homolog of NCBI NO: 25140432 NR Description: cinnamoyl CoA reductase [Hordeum vulgare]
  misc_feature (1)..(192): Homolog of NCBI NO: 3341511 NR Description: cinnamoyl-CoA reductase [Saccharum officinarum]
  misc_feature (1)..(192): Homolog of NCBI NO: 3242328 NR Description: cinnamoyl-CoA reductase [Zea mays]
  misc_feature (1)..(193): Homolog of NCBI NO: 9964087 NR Description: cinnamoyl CoA reductase [Lolium perenne]
  misc_feature (1)..(192): Homolog of NCBI NO: 7431410 NR Description: cinnamoyl CoA reductase - maize
  misc_feature (1)..(192): Homolog of NCBI NO: 17978549 NR Description: cinnamoyl-CoA reductase [Lolium perenne]
  misc_feature (1)..(196): Homolog of NCBI NO: 9998901 NR Description: cinnamoyl-CoA reductase [Populus balsamifera
  misc_feature (1)..(196): Homolog of NCBI NO: 40233135 NR Description: cinnamoyl CoA reductase [Populus tomentosa]
  misc_feature (1)..(196): Homolog of NCBI NO: 2960364 NR Description: cinnamoyl CoA reductase [Populus balsamifera
  misc_feature (1)..(195): Homolog of NCBI NO: 7431407 NR Description: cinnamoyl-CoA reductase (EC 1.2.1.44) CCR - cider
  misc_feature (43)..(43): Xaa is any aa, unknown or other
  misc_feature (140)..(140): Xaa is any aa, unknown or other
MDPRREPDAVVDESCWSDLDFCKKTKNWYCYGKAAAERAAWEXAAARGVDLVVVVPVLVQGPALQPSVNASLMHVLKYLNGSAKTYANAVQAYVHVRDAADAHVRVFEAPRAAGRYICADAVLHREDVVRTLRKSFPGYXVPERCSDEVNPRKQPYKISNQRLRELGLEFTPAAQALYDTVVCFQEKGILPLPVPAPTPASPDA

SEQ ID NO: 10602 - DNA, 1906 bp, Zea mays subsp. mays
  misc_feature (1)..(1906): Ceres Seq. ID no. 12355602
  misc_feature: MA Experiment ID: 108535 Result: Up-regulated in Transcription
  misc_feature: MA Experiment 108535 PARAMETER Experiment Name: Zm_Meristem_P Parameter: Age (day) Value: 8
  misc_feature: MA Experiment 108535 PARAMETER Experiment Name: Zm_Meristem_P Parameter: Organism Value: Zea mays
  misc_feature: MA Experiment 108535 PARAMETER Experiment Name: Zm_Meristem_P Parameter: Plant Line Value: 35A19
  misc_feature: MA Experiment 108535 PARAMETER Experiment Name: Zm_Meristem_P Parameter: Tissue Value: Root Meristem vs. Above Root Meristem
  misc_feature: MA Experiment ID: 108544 Result: Down-regulated in Transcription
  misc_feature: MA Experiment ID: 20000477 Result: Down-regulated in Transcription
  misc_feature: MA Experiment 20000477 PARAMETER Experiment Name: Zm_5mM_SA_P Parameter: Age (day) Value: 10
  misc_feature: MA Experiment 20000477 PARAMETER Experiment Name: Zm_5mM_SA_P Parameter: Organism Value: Zea mays
  misc_feature: MA Experiment 20000477 PARAMETER Experiment Name: Zm_5mM_SA_P Parameter: Plant Line Value: 35A19
  misc_feature: MA Experiment 20000477 PARAMETER Experiment Name: Zm_5mM_SA_P Parameter: Timepoint (hr) Value: 48
  misc_feature: MA Experiment 20000477 PARAMETER Experiment Name: Zm_5mM_SA_P Parameter: Tissue Value: Aerial
  misc_feature: MA Experiment 20000477 PARAMETER Experiment Name: Zm_5mM_SA_P Parameter: Treatment Value: 5mM SA vs. No Treatment
  misc_feature: MA Experiment ID: 20000478 Result: Down-regulated in Transcription
  misc_feature: MA Experiment 20000478 PARAMETER Experiment Name: Zm_5mM_SA_P Parameter: Age (day) Value: 11
  misc_feature: MA Experiment 20000478 PARAMETER Experiment Name: Zm_5mM_SA_P Parameter: Organism Value: Zea mays
  misc_feature: MA Experiment 20000478 PARAMETER Experiment Name: Zm_5mM_SA_P Parameter: Plant Line Value: 35A19
  misc_feature: MA Experiment 20000478 PARAMETER Experiment Name: Zm_5mM_SA_P Parameter: Timepoint (hr) Value: 72
  misc_feature: MA Experiment 20000478 PARAMETER Experiment Name: Zm_5mM_SA_P Parameter: Tissue Value: Aerial
  misc_feature: MA Experiment 20000478 PARAMETER Experiment Name: Zm_5mM_SA_P Parameter: Treatment Value: 5mM SA vs. No Treatment
  misc_feature: MA Experiment ID: 20000479 Result: Down-regulated in Transcription
  misc_feature: MA Experiment 20000479 PARAMETER Experiment Name: Zm_Drought_P Parameter: Age (day) Value: 10
  misc_feature: MA Experiment 20000479 PARAMETER Experiment Name: Zm_Drought_P Parameter: Organism Value: Zea mays
  misc_feature: MA Experiment 20000479 PARAMETER Experiment Name: Zm_Drought_P Parameter: Plant Line Value: 35A19
  misc_feature: MA Experiment 20000479 PARAMETER Experiment Name: Zm_Drought_P Parameter: Timepoint (hr) Value: 48
  misc_feature: MA Experiment 20000479 PARAMETER Experiment Name: Zm_Drought_P Parameter: Tissue Value: Aerial
  misc_feature: MA Experiment 20000479 PARAMETER Experiment Name: Zm_Drought_P Parameter: Treatment Value: Drought vs. No Drought
accgctagtgctctagtcttacctagccttgctgagccccttgcagtgctgggaggagaaggacaaggtctctgatcagctcagcttgtctggtcaaagctgagagcctcgttgtgctgtgagtgcaagctcgaccgacaggacccctgccactgtgaagcacagcgtcagcggcgacaagacgaaggggcggaagctgccaagccgatagatctacgcaaatggagaccaaggacgtgtcgccgctcgccgccgccaccaccaccaccgcgggcgcccgtgcctgcaccgacctctcaaccgcctccgccggccccttcttctatggcgccgccgcagcaccagcaccagcaccatccgccgccgccgttcgcgcagcaggcggccccggttccgtcgcctgccgcgtccatgcccggcggcatgcggctctcgttcgaccagatgtccgggaaggcgcccggggagcagcaccaccactccgcgcccatgctgtacacggtgccaccaccgcagtccgccgcgggcgcgggcgcaccgggggccaatgtgctgggcatgggcgagctgatgcgcaagaagcgcggccggccgcgcaagtacgcgcccgacgggagcatggctctggcgctggcccccatctcctccgcctcagccggcggcgccgcagcccccggacagcagcagcacggcggcgggttctccatcagcagccccccgtccgaccccaacgccaagcgccgcggccggcctcccggctctggcaagaagaagcagttcgaagccttgggctcctggggcatcgccttcacccctcacatcctcaccgtcaaggccggcgaggatgttgcttcaaaaataatgacattctcacagcaaggccctcgcacagtctgcatcctttccgcgaatggtgcaattagtaatgttacacttcggcagccagccacatctggtggactagttacttatgaggggcgctttgagataatctcgctatctggttctttcctgcttgcggaggatggtgatactcgcagcaggactggtggcttgagtgtcgcacttgcaggatctgatggccgagttcttggagggtgtgttgctggaatgcttatggctgcaactcctgttcaggttgtggtggctagctttatcgcagagggaaagaaatcaaagccagcggaagcacggaaggttgaaccgatggctgctcctccaccgcagatggctacctttgttccacctccgctggccaccagccctccatcggagggaacatccagcgcatcatctgatgactctggcagcccaatccaccacagtgcgatgccgttcagcaactccagccagcatcaacaccctcaccagcaccagcaccagcacatgccgcctgcctacgcatccgggggttggtccctctcagtgcaccagcagaataggcatgattctgacatgaagatgatgtcgaactaacagtgctcaacctaggcgtcccatttgttggttgggctggagaggaaggaagctgctgatggttggtactgccgctatgaaatggtcttcttgcgccgtctgtcctgatcagtgaccccgtgttgctctggtcaatgacggtgtgtctgctatagctaagatagctaggaaggattagagtttatgggctcacttgctgttgttcccctgggtaagattaatttaatttgaattagccgctgttgtaatgctgtagccagtgtcctgaagtcgcttatcagtcagtccctgacgcgagctgtgatggttgcctgatgagatcttcacctcctagtcctaggctagttaaaatatcatttctctagtactatgaatcatgaatttacttggatgcttcggtttgattcaggaatttgatcgtattatgttt

SEQ ID NO: 10603 - protein, 383 aa, Zea mays subsp. mays
  peptide (1)..(383): Ceres Seq. ID no. 12355603
  misc_feature (1)..(63): Pfam Name: Extensin-like region Pfam Description: Extensin-like region
  misc_feature (1)..(383): Homolog of NCBI NO: 37537056 NR Description: putative AT-Hook DNA-binding protein [Oryza
  misc_feature (1)..(383): Homolog of NCBI NO: 38346715 NR Description: OSJNBa0086O06.13 [Oryza sativa (japonica
  misc_feature (6)..(341): Homolog of NCBI NO: 14326504 NR Description: At2g33620/F4P9.39 [Arabidopsis thaliana]
  misc_feature (6)..(341): Homolog of NCBI NO: 2598227 NR Description: AT-hook protein 1 [Arabidopsis thaliana]
  misc_feature (6)..(341): Homolog of NCBI NO: 18403332 NR Description: AT-hook DNA-binding protein (AHP1); protein id: supported by cDNA: gi_14326503, supported by cDNA: gi_19548036 thaliana] >gi|19548037|gb|AAL87382.1| At2g33620/F4P9.39
  misc_feature (70)..(341): Homolog of NCBI NO: 25408293 NR Description: AT-hook DNA-binding protein (AHP1) [imported] -
  misc_feature (1)..(355): Homolog of NCBI NO: 15237481 NR Description: putative protein; protein id: At5g46640.1
  misc_feature (83)..(344): Homolog of NCBI NO: 18414996 NR Description: putative protein; protein id: At4g17950.1, by cDNA: gi_15451059, supported by cDNA: gi_20148332 [Arabidopsis >gi|15451060|gb|AAK96801.1| putative protein [Arabidopsis
  misc_feature (83)..(344): Homolog of NCBI NO: 25456045 NR Description: probable DNA-binding protein AT-hook 2 [imported]
  misc_feature (1)..(327): Homolog of NCBI NO: 7487767 NR Description: hypothetical protein T6K21.130 - Arabidopsis >gi|2894604|emb|CAA17138.1| putative protein [Arabidopsis >gi|7268547|emb|CAB78797.1| putative protein [Arabidopsis
MAPPQHQHQHHPPPPFAQQAAPVPSPAASMPGGMRLSFDQMSGKAPGEQHHHSAPMLYTVPPPQSAAGAGAPGANVLGMGELMRKKRGRPRKYAPDGSMALALAPISSASAGGAAAPGQQQHGGGFSISSPPSDPNAKRRGRPPGSGKKKQFEALGSWGIAFTPHILTVKAGEDVASKIMTFSQQGPRTVCILSANGAISNVTLRQPATSGGLVTYEGRFEIISLSGSFLLAEDGDTRSRTGGLSVALAGSDGRVLGGCVAGMLMAATPVQVVVASFIAEGKKSKPAEARKVEPMAAPPPQMATFVPPPLATSPPSEGTSSASSDDSGSPIHHSAMPFSNSSQHQHPHQHQHQHMPPAYASGGWSLSVHQQNRHDSDMKMMSN

SEQ ID NO: 10604 - protein, 354 aa, Zea mays subsp. mays
  peptide (1)..(354): Ceres Seq. ID no. 12355604
  misc_feature (257)..(334): Pfam Name: Atrophin-1 family Pfam Description: Atrophin-1 family
  misc_feature (54)..(315): Homolog of NCBI NO: 25456045 NR Description: probable DNA-binding protein AT-hook 2 [imported]
  misc_feature (1)..(354): Homolog of NCBI NO: 37537056 NR Description: putative AT-Hook DNA-binding protein [Oryza
  misc_feature (1)..(312): Homolog of NCBI NO: 14326504 NR Description: At2g33620/F4P9.39 [Arabidopsis thaliana]
  misc_feature (1)..(312): Homolog of NCBI NO: 18403332 NR Description: AT-hook DNA-binding protein (AHP1); protein id: supported by cDNA: gi_14326503, supported by cDNA: gi_19548036 thaliana] >gi|19548037|gb|AAL87382.1| At2g33620/F4P9.39
  misc_feature (1)..(326): Homolog of NCBI NO: 15237481 NR Description: putative protein; protein id: At5g46640.1
  misc_feature (54)..(315): Homolog of NCBI NO: 18414996 NR Description: putative protein; protein id: At4g17950.1, by cDNA: gi_15451059, supported by cDNA: gi_20148332 [Arabidopsis >gi|15451060|gb|AAK96801.1| putative protein [Arabidopsis
  misc_feature (41)..(312): Homolog of NCBI NO: 25408293 NR Description: AT-hook DNA-binding protein (AHP1) [imported] -
  misc_feature (1)..(312): Homolog of NCBI NO: 2598227 NR Description: AT-hook protein 1 [Arabidopsis thaliana]
  misc_feature (1)..(354): Homolog of NCBI NO: 38346715 NR Description: OSJNBa0086O06.13 [Oryza sativa (japonica
  misc_feature (1)..(298): Homolog of NCBI NO: 7487767 NR Description: hypothetical protein T6K21.130 - Arabidopsis >gi|2894604|emb|CAA17138.1| putative protein [Arabidopsis >gi|7268547|emb|CAB78797.1| putative protein [Arabidopsis
MPGGMRLSFDQMSGKAPGEQHHHSAPMLYTVPPPQSAAGAGAPGANVLGMGELMRKKRGRPRKYAPDGSMALALAPISSASAGGAAAPGQQQHGGGFSISSPPSDPNAKRRGRPPGSGKKKQFEALGSWGIAFTPHILTVKAGEDVASKIMTFSQQGPRTVCILSANGAISNVTLRQPATSGGLVTYEGRFEIISLSGSFLLAEDGDTRSRTGGLSVALAGSDGRVLGGCVAGMLMAATPVQVVVASFIAEGKKSKPAEARKVEPMAAPPPQMATFVPPPLATSPPSEGTSSASSDDSGSPIHHSAMPFSNSSQHQHPHQHQHQHMPPAYASGGWSLSVHQQNRHDSDMKMMSN

SEQ ID NO: 10605 - protein, 350 aa, Zea mays subsp. mays
  peptide (1)..(350): Ceres Seq. ID no. 12355605
  misc_feature (253)..(330): Pfam Name: Atrophin-1 family Pfam Description: Atrophin-1 family
  misc_feature (1)..(350): Homolog of NCBI NO: 37537056 NR Description: putative AT-Hook DNA-binding protein [Oryza
  misc_feature (1)..(350): Homolog of NCBI NO: 38346715 NR Description: OSJNBa0086O06.13 [Oryza sativa (japonica
  misc_feature (1)..(308): Homolog of NCBI NO: 14326504 NR Description: At2g33620/F4P9.39 [Arabidopsis thaliana]
  misc_feature (1)..(308): Homolog of NCBI NO: 2598227 NR Description: AT-hook protein 1 [Arabidopsis thaliana]
  misc_feature (1)..(308): Homolog of NCBI NO: 18403332 NR Description: AT-hook DNA-binding protein (AHP1); protein id: supported by cDNA: gi_14326503, supported by cDNA: gi_19548036 thaliana] >gi|19548037|gb|AAL87382.1| At2g33620/F4P9.39
  misc_feature (37)..(308): Homolog of NCBI NO: 25408293 NR Description: AT-hook DNA-binding protein (AHP1) [imported] -
  misc_feature (1)..(322): Homolog of NCBI NO: 15237481 NR Description: putative protein; protein id: At5g46640.1
  misc_feature (50)..(311): Homolog of NCBI NO: 18414996 NR Description: putative protein; protein id: At4g17950.1, by cDNA: gi_15451059, supported by cDNA: gi_20148332 [Arabidopsis >gi|15451060|gb|AAK96801.1| putative protein [Arabidopsis
  misc_feature (50)..(311): Homolog of NCBI NO: 25456045 NR Description: probable DNA-binding protein AT-hook 2 [imported]
  misc_feature (1)..(294): Homolog of NCBI NO: 7487767 NR Description: hypothetical protein T6K21.130 - Arabidopsis >gi|2894604|emb|CAA17138.1| putative protein [Arabidopsis >gi|7268547|emb|CAB78797.1| putative protein [Arabidopsis
MRLSFDQMSGKAPGEQHHHSAPMLYTVPPPQSAAGAGAPGANVLGMGELMRKKRGRPRKYAPDGSMALALAPISSASAGGAAAPGQQQHGGGFSISSPPSDPNAKRRGRPPGSGKKKQFEALGSWGIAFTPHILTVKAGEDVASKIMTFSQQGPRTVCILSANGAISNVTLRQPATSGGLVTYEGRFEIISLSGSFLLAEDGDTRSRTGGLSVALAGSDGRVLGGCVAGMLMAATPVQVVVASFIAEGKKSKPAEARKVEPMAAPPPQMATFVPPPLATSPPSEGTSSASSDDSGSPIHHSAMPFSNSSQHQHPHQHQHQHMPPAYASGGWSLSVHQQNRHDSDMKMMSN

SEQ ID NO: 10606 - DNA, 1423 bp, Zea mays subsp. mays
  misc_feature (1)..(1423): Ceres Seq. ID no. 12347695
  misc_feature: MA Experiment ID: 108522 Result: Down-regulated in Transcription
  misc_feature: MA Experiment 108522 PARAMETER Experiment Name: Zm_42deg_Heat_P Parameter: Age (day) Value: 8
  misc_feature: MA Experiment 108522 PARAMETER Experiment Name: Zm_42deg_Heat_P Parameter: Organism Value: Zea mays
  misc_feature: MA Experiment 108522 PARAMETER Experiment Name: Zm_42deg_Heat_P Parameter: Plant Line Value: 35A19
  misc_feature: MA Experiment 108522 PARAMETER Experiment Name: Zm_42deg_Heat_P Parameter: Temperature (deg C) Value: 42 vs. 22
  misc_feature: MA Experiment 108522 PARAMETER Experiment Name: Zm_42deg_Heat_P Parameter: Timepoint (hr) Value: 1
  misc_feature: MA Experiment 108522 PARAMETER Experiment Name: Zm_42deg_Heat_P Parameter: Tissue Value: Aerial
  misc_feature: MA Experiment ID: 108523 Result: Down-regulated in Transcription
  misc_feature: MA Experiment 108523 PARAMETER Experiment Name: Zm_42deg_Heat_P Parameter: Age (day) Value: 8
  misc_feature: MA Experiment 108523 PARAMETER Experiment Name: Zm_42deg_Heat_P Parameter: Organism Value: Zea mays
  misc_feature: MA Experiment 108523 PARAMETER Experiment Name: Zm_42deg_Heat_P Parameter: Plant Line Value: 35A19
  misc_feature: MA Experiment 108523 PARAMETER Experiment Name: Zm_42deg_Heat_P Parameter: Temperature (deg C) Value: 42 vs. 22
  misc_feature: MA Experiment 108523 PARAMETER Experiment Name: Zm_42deg_Heat_P Parameter: Timepoint (hr) Value: 6
  misc_feature: MA Experiment 108523 PARAMETER Experiment Name: Zm_42deg_Heat_P Parameter: Tissue Value: Aerial
  misc_feature: MA Experiment ID: 20000480 Result: Down-regulated in Transcription
  misc_feature: MA Experiment 20000480 PARAMETER Experiment Name: Zm_Drought_P Parameter: Age (day) Value: 11
  misc_feature: MA Experiment 20000480 PARAMETER Experiment Name: Zm_Drought_P Parameter: Organism Value: Zea mays
  misc_feature: MA Experiment 20000480 PARAMETER Experiment Name: Zm_Drought_P Parameter: Plant Line Value: 35A19
  misc_feature: MA Experiment 20000480 PARAMETER Experiment Name: Zm_Drought_P Parameter: Timepoint (hr) Value: 72
  misc_feature: MA Experiment 20000480 PARAMETER Experiment Name: Zm_Drought_P Parameter: Tissue Value: Aerial
  misc_feature: MA Experiment 20000480 PARAMETER Experiment Name: Zm_Drought_P Parameter: Treatment Value: Drought vs. No Drought
gttatctctgtcctctcctcgtgtttgttcttcctaccagcggagcgccagctacgcgctgtgcctcgtgcctagacgaacggcataggcaccggacggtggcgtcatgtgcgtggaggagccggaggacgccgaacggtttggttttggagacccaggggtcgaggagcccgctaagtttcccttggctcagatggagagagtttgtgaaaatacaacttctgctgatttaaggcagaagttaagcaattttgtcccagtaatccgatcgggggattggtctgatattggaggtcgccaatacatggaagacacccacgtgtgcattccggaccttgctaagaactttggtttcccatcattagataatgaagttgtttcattctatggggtctttgatggtcacggtggaaaagatgctgcccatttcgtttgtgataatttaccaaggatgattgtggaagattcagatttccctcttcagcttgaaaaagttgtgagaaggtcctttatgcagattgattgccagtttgctgagacatgctctctccatagagcatcgtcctccggtacaactgcacttacagcaatggtttttggatgtctcttctggtcgctaatgccggtgactgtagggcggttctttcccggtgtggcaccgcagtcgaaatgtccatggaccacaggccttgcagtctcagcgaaaaactgcgcgtagaatcgcttggtggctacgtggacgatggctatctgaacggtctgctaggagtcaccagagcgcttggtgactggcatctcgagggcatgaaaggagctggtgagacaggtggtcccctgagtgctgacccagagctcaagatgaccacgctgacgaaggacgacgagttcttgataattggcagcgacgggatctgggacgtcttctcgaaccagaactcggtggacttcgcccggaagcgcctccaggagcacaacgatgtgaagttgtgctgcagggaaatcgtcgaggaggcgatcaggcggggggctactgataacttgactgcagtgctggtctcgttccacctggaggccccgcctcggatcagagtggaccgtcctggtagggtggagaggagcatatctgctgaagggctcaatagcctcaggatactcctgggaaggcagtagctgcgttcttgtcgcgattttaggtgctgtgccgcattgccgagttgtaattgtatgtagtcatctcggctcctcattattgttagctgttaccctttgctgcgactgcgacacgtgttacgattcttgttggtgattgaaccaacaaacctgatattattcttgttggtgattgaaccaacaaacctgatactattcttgttcgtgactgaaccaacagatttgagctccgtcctgtgagagattttaagcc

SEQ ID NO: 10607 - protein, 203 aa, Zea mays subsp. mays
  peptide (1)..(203): Ceres Seq. ID no. 12347696
  misc_feature (53)..(165): Pfam Name: Protein phosphatase 2C Pfam Description: Protein phosphatase 2C
  misc_feature (23)..(165): Homolog of NCBI NO: 24413992 NR Description: putative DNA-binding protein phosphatase 2C
  misc_feature (30)..(165): Homolog of NCBI NO: 21693562 NR Description: DNA-binding protein phosphatase 2C [Nicotiana
  misc_feature (47)..(177): Homolog of NCBI NO: 20146108 NR Description: protein phosphatase 2C [Mesembryanthemum
  misc_feature (42)..(165): Homolog of NCBI NO: 15224766 NR Description: protein phosphatase 2C (PP2C); protein id: supported by cDNA: gi_12642917, supported by cDNA: gi_14517519, by cDNA: gi_16323271 [Arabidopsis thaliana]
  misc_feature (33)..(165): Homolog of NCBI NO: 15226152 NR Description: protein phosphatase 2C (PP2C); protein id: supported by cDNA: gi_17979441, supported by cDNA: gi_20259092
  misc_feature (49)..(165): Homolog of NCBI NO: 10140768 NR Description: putative protein phosphatase-2C [Oryza sativa]
  misc_feature (49)..(165): Homolog of NCBI NO: 37536524 NR Description: putative protein phosphatase-2C [Oryza sativa
  misc_feature (47)..(163): Homolog of NCBI NO: 15230495 NR Description: protein phosphatase 2C (PP2C); protein id:
  misc_feature (31)..(167): Homolog of NCBI NO: 25352221 NR Description: phosphoprotein phosphatase (EC 3.1.3.16) 2C
  misc_feature (17)..(165): Homolog of NCBI NO: 34894410 NR Description: putative protein phosphatase [Oryza sativa
MCVEEPEDAERFGFGDPGVEEPAKFPLAQMERVCENTTSADLRQKLSNFVPVIRSGDWSDIGGRQYMEDTHVCIPDLAKNFGFPSLDNEVVSFYGVFDGHGGKDAAHFVCDNLPRMIVEDSDFPLQLEKVVRRSFMQIDCQFAETCSLHRASSSGTTALTAMVFGCLFWSLMPVTVGRFFPGVAPQSKCPWTTGLAVSAKNCA

SEQ ID NO: 10608 - protein, 189 aa, Zea mays subsp. mays
  peptide (1)..(189): Ceres Seq. ID no. 12347697
  misc_feature (1)..(147): Pfam Name: Protein phosphatase 2C Pfam Description: Protein phosphatase 2C
  misc_feature (1)..(189): Homolog of NCBI NO: 24413992 NR Description: putative DNA-binding protein phosphatase 2C
  misc_feature (1)..(186): Homolog of NCBI NO: 21693562 NR Description: DNA-binding protein phosphatase 2C [Nicotiana
  misc_feature (2)..(186): Homolog of NCBI NO: 20146108 NR Description: protein phosphatase 2C [Mesembryanthemum
  misc_feature (1)..(186): Homolog of NCBI NO: 15224766 NR Description: protein phosphatase 2C (PP2C); protein id: supported by cDNA: gi_12642917, supported by cDNA: gi_14517519, by cDNA: gi_16323271 [Arabidopsis thaliana]
  misc_feature (1)..(186): Homolog of NCBI NO: 15226152 NR Description: protein phosphatase 2C (PP2C); protein id: supported by cDNA: gi_17979441, supported by cDNA: gi_20259092
  misc_feature (1)..(183): Homolog of NCBI NO: 10140768 NR Description: putative protein phosphatase-2C [Oryza sativa]
  misc_feature (1)..(183): Homolog of NCBI NO: 37536524 NR Description: putative protein phosphatase-2C [Oryza sativa
  misc_feature (2)..(186): Homolog of NCBI NO: 15230495 NR Description: protein phosphatase 2C (PP2C); protein id:
  misc_feature (3)..(186): Homolog of NCBI NO: 25352221 NR Description: phosphoprotein phosphatase (EC 3.1.3.16) 2C
  misc_feature (1)..(183): Homolog of NCBI NO: 34894410 NR Description: putative protein phosphatase [Oryza sativa
MSLLVANAGDCRAVLSRCGTAVEMSMDHRPCSLSEKLRVESLGGYVDDGYLNGLLGVTRALGDWHLEGMKGAGETGGPLSADPELKMTTLTKDDEFLIIGSDGIWDVFSNQNSVDFARKRLQEHNDVKLCCREIVEEAIRRGATDNLTAVLVSFHLEAPPRIRVDRPGRVERSISAEGLNSLRILLGRQ

SEQ ID NO: 10609 - protein, 174 aa, Zea mays subsp. mays
  peptide (1)..(174): Ceres Seq. ID no. 12347698
  misc_feature (24)..(136): Pfam Name: Protein phosphatase 2C Pfam Description: Protein phosphatase 2C
  misc_feature (1)..(136): Homolog of NCBI NO: 24413992 NR Description: putative DNA-binding protein phosphatase 2C
  misc_feature (1)..(136): Homolog of NCBI NO: 21693562 NR Description: DNA-binding protein phosphatase 2C [Nicotiana
  misc_feature (18)..(148): Homolog of NCBI NO: 20146108 NR Description: protein phosphatase 2C [Mesembryanthemum
  misc_feature (13)..(136): Homolog of NCBI NO: 15224766 NR Description: protein phosphatase 2C (PP2C); protein id: supported by cDNA: gi_12642917, supported by cDNA: gi_14517519, by cDNA: gi_16323271 [Arabidopsis thaliana]
  misc_feature (4)..(136): Homolog of NCBI NO: 15226152 NR Description: protein phosphatase 2C (PP2C); protein id: supported by cDNA: gi_17979441, supported by cDNA: gi_20259092
  misc_feature (20)..(136): Homolog of NCBI NO: 10140768 NR Description: putative protein phosphatase-2C [Oryza sativa]
  misc_feature (20)..(136): Homolog of NCBI NO: 37536524 NR Description: putative protein phosphatase-2C [Oryza sativa
  misc_feature (18)..(134): Homolog of NCBI NO: 15230495 NR Description: protein phosphatase 2C (PP2C); protein id:
  misc_feature (2)..(138): Homolog of NCBI NO: 25352221 NR Description: phosphoprotein phosphatase (EC 3.1.3.16) 2C
  misc_feature (1)..(136): Homolog of NCBI NO: 34894410 NR Description: putative protein phosphatase [Oryza sativa
MERVCENTTSADLRQKLSNFVPVIRSGDWSDIGGRQYMEDTHVCIPDLAKNFGFPSLDNEVVSFYGVFDGHGGKDAAHFVCDNLPRMIVEDSDFPLQLEKVVRRSFMQIDCQFAETCSLHRASSSGTTALTAMVFGCLFWSLMPVTVGRFFPGVAPQSKCPWTTGLAVSAKNCA

SEQ ID NO: 10610 - DNA, 975 bp, Zea mays subsp. mays
  misc_feature (1)..(975): Ceres Seq. ID no. 12340580
  misc_feature: MA Experiment ID: 108527 Result: Down-regulated in Transcription
  misc_feature: MA Experiment 108527 PARAMETER Experiment Name: Zm_5mM_NO_P Parameter: Age (day) Value: 8
  misc_feature: MA Experiment 108527 PARAMETER Experiment Name: Zm_5mM_NO_P Parameter: Organism Value: Zea mays
  misc_feature: MA Experiment 108527 PARAMETER Experiment Name: Zm_5mM_NO_P Parameter: Plant Line Value: 35A19
  misc_feature: MA Experiment 108527 PARAMETER Experiment Name: Zm_5mM_NO_P Parameter: Timepoint (hr) Value: 6
  misc_feature: MA Experiment 108527 PARAMETER Experiment Name: Zm_5mM_NO_P Parameter: Tissue Value: Aerial
  misc_feature: MA Experiment 108527 PARAMETER Experiment Name: Zm_5mM_NO_P Parameter: Treatment Value: 5mM NO vs. No Treatment
  misc_feature: MA Experiment ID: 108543 Result: Up-regulated in Transcription
  misc_feature: MA Experiment ID: 108556 Result: Down-regulated in Transcription
  misc_feature: MA Experiment 108556 PARAMETER Experiment Name: Zm_Drought_P Parameter: Age (day) Value: 9
  misc_feature: MA Experiment 108556 PARAMETER Experiment Name: Zm_Drought_P Parameter: Organism Value: Zea mays
  misc_feature: MA Experiment 108556 PARAMETER Experiment Name: Zm_Drought_P Parameter: Plant Line Value: 35A19
  misc_feature: MA Experiment 108556 PARAMETER Experiment Name: Zm_Drought_P Parameter: Timepoint (hr) Value: 24
  misc_feature: MA Experiment 108556 PARAMETER Experiment Name: Zm_Drought_P Parameter: Tissue Value: Aerial
  misc_feature: MA Experiment 108556 PARAMETER Experiment Name: Zm_Drought_P Parameter: Treatment Value: Drought vs. No Drought
  misc_feature: MA Experiment ID: 20000478 Result: Down-regulated in Transcription
  misc_feature: MA Experiment 20000478 PARAMETER Experiment Name: Zm_5mM_SA_P Parameter: Age (day) Value: 11
  misc_feature: MA Experiment 20000478 PARAMETER Experiment Name: Zm_5mM_SA_P Parameter: Organism Value: Zea mays
  misc_feature: MA Experiment 20000478 PARAMETER Experiment Name: Zm_5mM_SA_P Parameter: Plant Line Value: 35A19
  misc_feature: MA Experiment 20000478 PARAMETER Experiment Name: Zm_5mM_SA_P Parameter: Timepoint (hr) Value: 72
  misc_feature: MA Experiment 20000478 PARAMETER Experiment Name: Zm_5mM_SA_P Parameter: Tissue Value: Aerial
  misc_feature: MA Experiment 20000478 PARAMETER Experiment Name: Zm_5mM_SA_P Parameter: Treatment Value: 5mM SA vs. No Treatment
  misc_feature: MA Experiment ID: 20000480 Result: Down-regulated in Transcription
  misc_feature: MA Experiment 20000480 PARAMETER Experiment Name: Zm_Drought_P Parameter: Age (day) Value: 11
  misc_feature: MA Experiment 20000480 PARAMETER Experiment Name: Zm_Drought_P Parameter: Organism Value: Zea mays
  misc_feature: MA Experiment 20000480 PARAMETER Experiment Name: Zm_Drought_P Parameter: Plant Line Value: 35A19
  misc_feature: MA Experiment 20000480 PARAMETER Experiment Name: Zm_Drought_P Parameter: Timepoint (hr) Value: 72
  misc_feature: MA Experiment 20000480 PARAMETER Experiment Name: Zm_Drought_P Parameter: Tissue Value: Aerial
  misc_feature: MA Experiment 20000480 PARAMETER Experiment Name: Zm_Drought_P Parameter: Treatment Value: Drought vs. No Drought
  misc_feature: MA Experiment ID: 20000535 Result: Down-regulated in Transcription
  misc_feature: MA Experiment 20000535 PARAMETER Experiment Name: Zm_Hybrid_Seed_Dev_P Parameter: DAP Value: 30 vs. 12
  misc_feature: MA Experiment 20000535 PARAMETER Experiment Name: Zm_Hybrid_Seed_Dev_P Parameter: Organism Value: Zea mays
  misc_feature: MA Experiment 20000535 PARAMETER Experiment Name: Zm_Hybrid_Seed_Dev_P Parameter: Plant Line Value: 35A19
  misc_feature: MA Experiment 20000535 PARAMETER Experiment Name: Zm_Hybrid_Seed_Dev_P Parameter: Tissue Value: Embryo vs. Unfert Floret
actcaagtacctccccggactactagctcacaccagcggtacccagcccacaccggcagatcagctgcgagctagtagacatcgaccggaccgaccaacaggagcagcaagccgggctagctcgctcgctcgctcgcaatggcttccatcatcgtgcaggcggtggtcatcctcctggacgtcatcgccttcggcctgggcgtcgcccgccgagcagcgccgcagccgggccaccgtcaccccggacgccgccaaggagtacgactactgcgtctacgactccgacatcgccacgggctacggcgtcggcgcgctgctcctcctcgccgccgcgcaggtcgtgctcatgctcgccagccgctgcttctgctgcggccgcgggctcaagccgggaggctcccgcgcctgcgccctcatcctcttcctcttcacatgggtgaccttcctcatcgcggaggcgtgcctgctggcgggatcagtacgcaacgcgtaccacacccggtacaggggcgtattctacggcgagtccctctcatgcgagacggtgcggaagggcgtcttcgctgctggcgcggcatttaccttcttcacggccatcctgggcgaggtatactacctcagctactccaaatcccgagatgccgctggtggtgctggctccagcattggcatgggcccttacaactaaaggagcttgatcgaggcaggcaggcagcccccgtgttttcaactctgcttcgtggtggatgaatgcagtgttctttttaacattaccttagtagggacggtgtaattggttgttggatccgcggttttttcctctctctttaggttcttgtatgaggttactcggttgggccgtatactgtttggattattgggctggattctggacatggtatacacgtattcgtagtatgctatgctgtttatatgtatgtgaaagaaataatagaagcgttgcatcgtctatcc

SEQ ID NO: 10611 - protein, 228 aa, Zea mays subsp. mays
  peptide (1)..(228): Ceres Seq. ID no. 12340581
  misc_feature (67)..(228): Homolog of NCBI NO: 34394069 NR Description: unknown protein [Oryza sativa (japonica
  misc_feature (67)..(227): Homolog of NCBI NO: 38016521 NR Description: fiber protein Fb34 [Gossypium barbadense]
  misc_feature (67)..(214): Homolog of NCBI NO: 18400781 NR Description: expressed protein; protein id: At3g15480.1, by cDNA: 22328., supported by cDNA: gi_15982922, supported by gi_19699225 [Arabidopsis thaliana] >gi|7021733|gb|AAF35414.1|
  misc_feature (67)..(213): Homolog of NCBI NO: 18404242 NR Description: expressed protein; protein id: At1g52910.1, by cDNA: 21921. [Arabidopsis thaliana] >gi|25405613|pir||D96570
  misc_feature (67)..(215): Homolog of NCBI NO: 18416991 NR Description: Expressed protein; protein id: At4g27435.1, by cDNA: gi_15809977, supported by cDNA: gi_17981656 [Arabidopsis >gi|15809978|gb|AAL06916.1| At4g27438 [Arabidopsis thaliana]
  misc_feature (67)..(228): Homolog of NCBI NO: 22748411 NR Description: hypothetical protein [Oryza sativa (japonica
  misc_feature (67)..(213): Homolog of NCBI NO: 18407003 NR Description: Expressed protein; protein id: At1g61065.1, by cDNA: 25888., supported by cDNA: gi_16930460, supported by gi_19310518 [Arabidopsis thaliana]
  misc_feature (67)..(213): Homolog of NCBI NO: 21554630 NR Description: unknown [Arabidopsis thaliana]
  misc_feature (70)..(215): Homolog of NCBI NO: 38344206 NR Description: OSJNBa0064G10.22 [Oryza sativa (japonica
  misc_feature (70)..(227): Homolog of NCBI NO: 18391509 NR Description: expressed protein; protein id: At1g13380.1, by cDNA: 5232. [Arabidopsis thaliana] Unknown Protein [Arabidopsis thaliana]
LKYLPGLLAHTSGTQPTPADQLRASRHRPDRPTGAASRASSLARSQWLPSSCRRWSSSWTSSPSAWASPAEQRRSRATVTPDAAKEYDYCVYDSDIATGYGVGALLLLAAAQVVLMLASRCFCCGRGLKPGGSRACALILFLFTWVTFLIAEACLLAGSVRNAYHTRYRGVFYGESLSCETVRKGVFAAGAAFTFFTAILGEVYYLSYSKSRDAAGGAGSSIGMGPYN

SEQ ID NO: 10612 - protein, 203 aa, Zea mays subsp. mays
  peptide (1)..(203): Ceres Seq. ID no. 12340582
  misc_feature (1)..(23): Homolog of NCBI NO: 34394069 NR Description: unknown protein [Oryza sativa (japonica
MASIIVQAVVILLDVIAFGLGVARRAAPQPGHRHPGRRQGVRLLRLRLRHRHGLRRRRAAPPRRRAGRAHARQPLLLLRPRAQAGRLPRLRPHPLPLHMGDLPHRGGVPAGGISTQRVPHPVQGRILRRVPLMRDGAEGRLRCWRGIYLLHGHPGRGILPQLLQIPRCRWWCWLQHWHGPLQLKELDRGRQAAPVFSTLLRGG

SEQ ID NO: 10613 - DNA, 806 bp, Zea mays subsp. mays
  misc_feature (1)..(806): Ceres Seq. ID no. 12336810
  misc_feature: MA Experiment ID: 108527 Result: Up-regulated in Transcription
  misc_feature: MA Experiment 108527 PARAMETER Experiment Name: Zm_5mM_NO_P Parameter: Age (day) Value: 8
  misc_feature: MA Experiment 108527 PARAMETER Experiment Name: Zm_5mM_NO_P Parameter: Organism Value: Zea mays
  misc_feature: MA Experiment 108527 PARAMETER Experiment Name: Zm_5mM_NO_P Parameter: Plant Line Value: 35A19
  misc_feature: MA Experiment 108527 PARAMETER Experiment Name: Zm_5mM_NO_P Parameter: Timepoint (hr) Value: 6
  misc_feature: MA Experiment 108527 PARAMETER Experiment Name: Zm_5mM_NO_P Parameter: Tissue Value: Aerial
  misc_feature: MA Experiment 108527 PARAMETER Experiment Name: Zm_5mM_NO_P Parameter: Treatment Value: 5mM NO vs. No Treatment
  misc_feature: MA Experiment ID: 20000480 Result: Up-regulated in Transcription
  misc_feature: MA Experiment 20000480 PARAMETER Experiment Name: Zm_Drought_P Parameter: Age (day) Value: 11
  misc_feature: MA Experiment 20000480 PARAMETER Experiment Name: Zm_Drought_P Parameter: Organism Value: Zea mays
  misc_feature: MA Experiment 20000480 PARAMETER Experiment Name: Zm_Drought_P Parameter: Plant Line Value: 35A19
  misc_feature: MA Experiment 20000480 PARAMETER Experiment Name: Zm_Drought_P Parameter: Timepoint (hr) Value: 72
  misc_feature: MA Experiment 20000480 PARAMETER Experiment Name: Zm_Drought_P Parameter: Tissue Value: Aerial
  misc_feature: MA Experiment 20000480 PARAMETER Experiment Name: Zm_Drought_P Parameter: Treatment Value: Drought vs. No Drought
agcaaccaaaaccccgaggaaaacgaaaaagctgctccctctcccggacttcagangccgaggacgctggagcacgcgtcggtccggcgcccccatggacccggcctgcgaggagctcgagcgccgcagccgttacctcagcgcgctcgtgcgccgcaccaagctcgccgacccgccccagccccagccggaggcaaggcggacgtggagcctcctcagctgaaggngccgccgcacgtcggcggtgagggtaaggnagggaaggatgangccaaggcggaggagangacggcgatgaagaaacngaanagggaagcagcggcggaggggaggaaggtggcggtgtgcgtgcgggcggcggacatgccgctgccgctgcagcggcgcgcggtgaggatcgccctcgaggccgtcgccgccatgccgcggctcgagagcaagcgcctcgcgcncgctctcaagaaggatttcgatacaacatacgggcccgcatggcactgcattgtcggcacaagctttggctcctacgtcactcactcgttggggggtttcctgtacttctccgtcgacaaagcctttctcctcttcagaactgccgtccagccacttgtccagctacaatgagacctgaaacatgttttactcgaactggtgtagatgcagcgcaaatgtaattttgaacagaatagacgacgctcagcacaccgtgtcttgccgcgtttgagtagcagaggtaatttgatctgtacacaatactgtagaacagccgtgcctctaacgttgtactgcccgaagtcctgctttgt

SEQ ID NO: 10614 - protein, 207 aa, Zea mays subsp. mays
  peptide (1)..(207): Ceres Seq. ID no. 12336811
  misc_feature (115)..(199): Pfam Name: Dynein light chain type 1 Pfam Description: Dynein light chain type 1
  misc_feature (58)..(203): Homolog of NCBI NO: 38567715 NR Description: B1358B12.13 [Oryza sativa (japonica
  misc_feature (100)..(205): Homolog of NCBI NO: 15220678 NR Description: dynein light subunit lc6, flagellar outer arm; id: At1g23220.1, supported by cDNA: gi_17380801, supported by gi_20465366 [Arabidopsis thaliana]
  misc_feature (81)..(202): Homolog of NCBI NO: 15241269 NR Description: dynein light chain - like protein; protein id:
  misc_feature (113)..(204): Homolog of NCBI NO: 34913978 NR Description: dynein light chain - like protein [Oryza sativa
  misc_feature (106)..(198): Homolog of NCBI NO: 34902908 NR Description: unnamed protein product [Oryza sativa (japonica group)] >gi|6016872|dbj|BAA85215.1| unnamed protein product
  misc_feature (105)..(198): Homolog of NCBI NO: 15234756 NR Description: dynein light chain like protein; protein id: supported by cDNA: gi_18034122 [Arabidopsis thaliana]
  misc_feature (105)..(198): Homolog of NCBI NO: 18034123 NR Description: neuronal nitric oxide synthase protein inhibitor
  misc_feature (105)..(198): Homolog of NCBI NO: 28466885 NR Description: At4g15930 [Arabidopsis thaliana]
  misc_feature (117)..(198): Homolog of NCBI NO: 2842737 NR Description: DYNEIN LIGHT CHAIN >gi|1620592|gb|AAC47307.1|
  misc_feature (117)..(198): Homolog of NCBI NO: 5305389 NR Description: dynein light chain 2 [Schistosoma japonicum]
  misc_feature (19)..(19): Xaa is any aa, unknown or other
  misc_feature (76)..(76): Xaa is any aa, unknown or other
  misc_feature (86)..(86): Xaa is any aa, unknown or other
  misc_feature (90)..(90): Xaa is any aa, unknown or other
  misc_feature (96)..(96): Xaa is any aa, unknown or other
  misc_feature (102)..(102): Xaa is any aa, unknown or other
  misc_feature (103)..(103): Xaa is any aa, unknown or other
  misc_feature (151)..(151): Xaa is any aa, unknown or other
SNQNPEENEKAAPSPGLQXPRTLEHASVRRPHGPGLRGARAPQPLPQRARAPHQARRPAPAPAGGKADVEPPQLKXPPHVGGEGKXGKDXAKAEEXTAMKKXXREAAAEGRKVAVCVRAADMPLPLQRRAVRIALEAVAAMPRLESKRLAXALKKDFDTTYGPAWHCIVGTSFGSYVTHSLGGFLYFSVDKAFLLFRTAVQPLVQLQ

SEQ ID NO: 10615 - protein, 109 aa, Zea mays subsp. mays
  peptide (1)..(109): Ceres Seq. ID no. 12336812
  misc_feature (17)..(101): Pfam Name: Dynein light chain type 1 Pfam Description: Dynein light chain type 1
  misc_feature (1)..(105): Homolog of NCBI NO: 38567715 NR Description: B1358B12.13 [Oryza sativa (japonica
  misc_feature (2)..(107): Homolog of NCBI NO: 15220678 NR Description: dynein light subunit lc6, flagellar outer arm; id: At1g23220.1, supported by cDNA: gi_17380801, supported by gi_20465366 [Arabidopsis thaliana]
  misc_feature (1)..(104): Homolog of NCBI NO: 15241269 NR Description: dynein light chain - like protein; protein id:
  misc_feature (15)..(106): Homolog of NCBI NO: 34913978 NR Description: dynein light chain - like protein [Oryza sativa
  misc_feature (8)..(100): Homolog of NCBI NO: 34902908 NR Description: unnamed protein product [Oryza sativa (japonica group)] >gi|6016872|dbj|BAA85215.1| unnamed protein product
  misc_feature (7)..(100): Homolog of NCBI NO: 15234756 NR Description: dynein light chain like protein; protein id: supported by cDNA: gi_18034122 [Arabidopsis thaliana]
  misc_feature (7)..(100): Homolog of NCBI NO: 28466885 NR Description: At4g15930 [Arabidopsis thaliana]
  misc_feature (7)..(100): Homolog of NCBI NO: 18034123 NR Description: neuronal nitric oxide synthase protein inhibitor
  misc_feature (19)..(100): Homolog of NCBI NO: 2842737 NR Description: DYNEIN LIGHT CHAIN >gi|1620592|gb|AAC47307.1|
  misc_feature (19)..(100): Homolog of NCBI NO: 5305389 NR Description: dynein light chain 2 [Schistosoma japonicum]
  misc_feature (4)..(4): Xaa is any aa, unknown or other
  misc_feature (5)..(5): Xaa is any aa, unknown or other
  misc_feature (53)..(53): Xaa is any aa, unknown or other
MKKXXREAAAEGRKVAVCVRAADMPLPLQRRAVRIALEAVAAMPRLESKRLAXALKKDFDTTYGPAWHCIVGTSFGSYVTHSLGGFLYFSVDKAFLLFRTAVQPLVQLQ

SEQ ID NO: 10616 - DNA, 1209 bp, Zea mays subsp. mays
  misc_feature (1)..(1209): Ceres Seq. ID no. 12364936
  misc_feature: MA Experiment ID: 108522 Result: Up-regulated in Transcription
  misc_feature: MA Experiment 108522 PARAMETER Experiment Name: Zm_42deg_Heat_P Parameter: Age (day) Value: 8
  misc_feature: MA Experiment 108522 PARAMETER Experiment Name: Zm_42deg_Heat_P Parameter: Organism Value: Zea mays
  misc_feature: MA Experiment 108522 PARAMETER Experiment Name: Zm_42deg_Heat_P Parameter: Plant Line Value: 35A19
  misc_feature: MA Experiment 108522 PARAMETER Experiment Name: Zm_42deg_Heat_P Parameter: Temperature (deg C) Value: 42 vs. 22
  misc_feature: MA Experiment 108522 PARAMETER Experiment Name: Zm_42deg_Heat_P Parameter: Timepoint (hr) Value: 1
  misc_feature: MA Experiment 108522 PARAMETER Experiment Name: Zm_42deg_Heat_P Parameter: Tissue Value: Aerial
  misc_feature: MA Experiment ID: 108523 Result: Up-regulated in Transcription
  misc_feature: MA Experiment 108523 PARAMETER Experiment Name: Zm_42deg_Heat_P Parameter: Age (day) Value: 8
  misc_feature: MA Experiment 108523 PARAMETER Experiment Name: Zm_42deg_Heat_P Parameter: Organism Value: Zea mays
  misc_feature: MA Experiment 108523 PARAMETER Experiment Name: Zm_42deg_Heat_P Parameter: Plant Line Value: 35A19
  misc_feature: MA Experiment 108523 PARAMETER Experiment Name: Zm_42deg_Heat_P Parameter: Temperature (deg C) Value: 42 vs. 22
  misc_feature: MA Experiment 108523 PARAMETER Experiment Name: Zm_42deg_Heat_P Parameter: Timepoint (hr) Value: 6
  misc_feature: MA Experiment 108523 PARAMETER Experiment Name: Zm_42deg_Heat_P Parameter: Tissue Value: Aerial
  misc_feature: MA Experiment ID: 108527 Result: Up-regulated in Transcription
  misc_feature: MA Experiment 108527 PARAMETER Experiment Name: Zm_5mM_NO_P Parameter: Age (day) Value: 8
  misc_feature: MA Experiment 108527 PARAMETER Experiment Name: Zm_5mM_NO_P Parameter: Organism Value: Zea mays
  misc_feature: MA Experiment 108527 PARAMETER Experiment Name: Zm_5mM_NO_P Parameter: Plant Line Value: 35A19
  misc_feature: MA Experiment 108527 PARAMETER Experiment Name: Zm_5mM_NO_P Parameter: Timepoint (hr) Value: 6
  misc_feature: MA Experiment 108527 PARAMETER Experiment Name: Zm_5mM_NO_P Parameter: Tissue Value: Aerial
  misc_feature: MA Experiment 108527 PARAMETER Experiment Name: Zm_5mM_NO_P Parameter: Treatment Value: 5mM NO vs. No Treatment
  misc_feature: MA Experiment ID: 108542 Result: Up-regulated in Transcription
  misc_feature: MA Experiment 108542 PARAMETER Experiment Name: Zm_150mM_NaCl_P Parameter: Age (day) Value: 8
  misc_feature: MA Experiment 108542 PARAMETER Experiment Name: Zm_150mM_NaCl_P Parameter: Organism Value: Zea mays
  misc_feature: MA Experiment 108542 PARAMETER Experiment Name: Zm_150mM_NaCl_P Parameter: Plant Line Value: 35A19
  misc_feature: MA Experiment 108542 PARAMETER Experiment Name: Zm_150mM_NaCl_P Parameter: Timepoint (hr) Value: 6
  misc_feature: MA Experiment 108542 PARAMETER Experiment Name: Zm_150mM_NaCl_P Parameter: Tissue Value: Aerial
  misc_feature: MA Experiment 108542 PARAMETER Experiment Name: Zm_150mM_NaCl_P Parameter: Treatment Value: 150mM NaCl vs. No Treatment
  misc_feature: MA Experiment ID: 108543 Result: Down-regulated in Transcription
  misc_feature: MA Experiment ID: 108556 Result: Up-regulated in Transcription
  misc_feature: MA Experiment 108556 PARAMETER Experiment Name: Zm_Drought_P Parameter: Age (day) Value: 9
  misc_feature: MA Experiment 108556 PARAMETER Experiment Name: Zm_Drought_P Parameter: Organism Value: Zea mays
  misc_feature: MA Experiment 108556 PARAMETER Experiment Name: Zm_Drought_P Parameter: Plant Line Value: 35A19
  misc_feature: MA Experiment 108556 PARAMETER Experiment Name: Zm_Drought_P Parameter: Timepoint (hr) Value: 24
  misc_feature: MA Experiment 108556 PARAMETER Experiment Name: Zm_Drought_P Parameter: Tissue Value: Aerial
  misc_feature: MA Experiment 108556 PARAMETER Experiment Name: Zm_Drought_P Parameter: Treatment Value: Drought vs. No Drought
  misc_feature: MA Experiment ID: 108559 Result: Up-regulated in Transcription
  misc_feature: MA Experiment 108559 PARAMETER Experiment Name: Zm_5mM_NO_P Parameter: Age (day) Value: 8
  misc_feature: MA Experiment 108559 PARAMETER Experiment Name: Zm_5mM_NO_P Parameter: Organism Value: Zea mays
  misc_feature: MA Experiment 108559 PARAMETER Experiment Name: Zm_5mM_NO_P Parameter: Plant Line Value: 35A19
  misc_feature: MA Experiment 108559 PARAMETER Experiment Name: Zm_5mM_NO_P Parameter: Timepoint (hr) Value: 12
  misc_feature: MA Experiment 108559 PARAMETER Experiment Name: Zm_5mM_NO_P Parameter: Tissue Value: Aerial
  misc_feature: MA Experiment 108559 PARAMETER Experiment Name: Zm_5mM_NO_P Parameter: Treatment Value: 5mM NO vs. No Treatment
  misc_feature: MA Experiment ID: 20000477 Result: Up-regulated in Transcription
  misc_feature: MA Experiment 20000477 PARAMETER Experiment Name: Zm_5mM_SA_P Parameter: Age (day) Value: 10
  misc_feature: MA Experiment 20000477 PARAMETER Experiment Name: Zm_5mM_SA_P Parameter: Organism Value: Zea mays
  misc_feature: MA Experiment 20000477 PARAMETER Experiment Name: Zm_5mM_SA_P Parameter: Plant Line Value: 35A19
  misc_feature: MA Experiment 20000477 PARAMETER Experiment Name: Zm_5mM_SA_P Parameter: Timepoint (hr) Value: 48
  misc_feature: MA Experiment 20000477 PARAMETER Experiment Name: Zm_5mM_SA_P Parameter: Tissue Value: Aerial
  misc_feature: MA Experiment 20000477 PARAMETER Experiment Name: Zm_5mM_SA_P Parameter: Treatment Value: 5mM SA vs. No Treatment
  misc_feature: MA Experiment ID: 20000478 Result: Up-regulated in Transcription
  misc_feature: MA Experiment 20000478 PARAMETER Experiment Name: Zm_5mM_SA_P Parameter: Age (day) Value: 11
  misc_feature: MA Experiment 20000478 PARAMETER Experiment Name: Zm_5mM_SA_P Parameter: Organism Value: Zea mays
  misc_feature: MA Experiment 20000478 PARAMETER Experiment Name: Zm_5mM_SA_P Parameter: Plant Line Value: 35A19
  misc_feature: MA Experiment 20000478 PARAMETER Experiment Name: Zm_5mM_SA_P Parameter: Timepoint (hr) Value: 72
  misc_feature: MA Experiment 20000478 PARAMETER Experiment Name: Zm_5mM_SA_P Parameter: Tissue Value: Aerial
  misc_feature: MA Experiment 20000478 PARAMETER Experiment Name: Zm_5mM_SA_P Parameter: Treatment Value: 5mM SA vs. No Treatment
  misc_feature: MA Experiment ID: 20000479 Result: Up-regulated in Transcription
  misc_feature: MA Experiment 20000479 PARAMETER Experiment Name: Zm_Drought_P Parameter: Age (day) Value: 10
  misc_feature: MA Experiment 20000479 PARAMETER Experiment Name: Zm_Drought_P Parameter: Organism Value: Zea mays
  misc_feature: MA Experiment 20000479 PARAMETER Experiment Name: Zm_Drought_P Parameter: Plant Line Value: 35A19
  misc_feature: MA Experiment 20000479 PARAMETER Experiment Name: Zm_Drought_P Parameter: Timepoint (hr) Value: 48
  misc_feature: MA Experiment 20000479 PARAMETER Experiment Name: Zm_Drought_P Parameter: Tissue Value: Aerial
  misc_feature: MA Experiment 20000479 PARAMETER Experiment Name: Zm_Drought_P Parameter: Treatment Value: Drought vs. No Drought
  misc_feature: MA Experiment ID: 20000480 Result: Up-regulated in Transcription
  misc_feature: MA Experiment 20000480 PARAMETER Experiment Name: Zm_Drought_P Parameter: Age (day) Value: 11
  misc_feature: MA Experiment 20000480 PARAMETER Experiment Name: Zm_Drought_P Parameter: Organism Value: Zea mays
  misc_feature: MA Experiment 20000480 PARAMETER Experiment Name: Zm_Drought_P Parameter: Plant Line Value: 35A19
  misc_feature: MA Experiment 20000480 PARAMETER Experiment Name: Zm_Drought_P Parameter: Timepoint (hr) Value: 72
  misc_feature: MA Experiment 20000480 PARAMETER Experiment Name: Zm_Drought_P Parameter: Tissue Value: Aerial
  misc_feature: MA Experiment 20000480 PARAMETER Experiment Name: Zm_Drought_P Parameter: Treatment Value: Drought vs. No Drought
  misc_feature: MA Experiment ID: 20000626 Result: Up-regulated in Transcription
  misc_feature: MA Experiment 20000626 PARAMETER Experiment Name: Zm_Herbicide-Treatments_P Parameter: Timepoint (hr) Value: 12
  misc_feature: MA Experiment 20000626 PARAMETER Experiment Name: Zm_Herbicide-Treatments_P Parameter: Tissue Value: Aerial
  misc_feature: MA Experiment 20000626 PARAMETER Experiment Name: Zm_Herbicide-Treatments_P Parameter: Treatment Value: Roundup vs. No Treatment
  misc_feature: MA Experiment ID: 20000627 Result: Up-regulated in Transcription
  misc_feature: MA Experiment 20000627 PARAMETER Experiment Name: Zm_Herbicide-Treatments_P Parameter: Timepoint (hr) Value: 12
  misc_feature: MA Experiment 20000627 PARAMETER Experiment Name: Zm_Herbicide-Treatments_P Parameter: Tissue Value: Aerial
  misc_feature: MA Experiment 20000627 PARAMETER Experiment Name: Zm_Herbicide-Treatments_P Parameter: Treatment Value: Finale vs. No Treatment
  misc_feature: MA Experiment ID: 20000630 Result: Up-regulated in Transcription
  misc_feature: MA Experiment 20000630 PARAMETER Experiment Name: Zm_Herbicide-Treatments_P Parameter: Timepoint (hr) Value: 4
  misc_feature: MA Experiment 20000630 PARAMETER Experiment Name: Zm_Herbicide-Treatments_P Parameter: Tissue Value: Aerial
  misc_feature: MA Experiment 20000630 PARAMETER Experiment Name: Zm_Herbicide-Treatments_P Parameter: Treatment Value: Roundup vs. No Treatment
  misc_feature: MA Experiment ID: 20001612 Result: Up-regulated in Transcription
  misc_feature: MA Experiment 20001612 PARAMETER Experiment Name: Zm_50ppm_KNO3_L-to-H_P Parameter: Age (day) Value: 19
  misc_feature: MA Experiment 20001612 PARAMETER Experiment Name: Zm_50ppm_KNO3_L-to-H_P Parameter: Organism Value: Zea mays
  misc_feature: MA Experiment 20001612 PARAMETER Experiment Name: Zm_50ppm_KNO3_L-to-H_P Parameter: Plant Line Value: 35A19
  misc_feature: MA Experiment 20001612 PARAMETER Experiment Name: Zm_50ppm_KNO3_L-to-H_P Parameter: Timepoint (hr) Value: 8
  misc_feature: MA Experiment 20001612 PARAMETER Experiment Name: Zm_50ppm_KNO3_L-to-H_P Parameter: Tissue Value: Roots
  misc_feature: MA Experiment 20001612 PARAMETER Experiment Name: Zm_50ppm_KNO3_L-to-H_P Parameter: Treatment Value: 50ppm KNO3 vs. 50ppm KCl
gaaaccgcctcccatctcatccgtctctctcgaatcccaccgtgcgctcactgcgatggacggctcatccaagcggatcggcggtggcggcgacgacatgcccagccccgaccacgaccagaacgccagccccaacgtcccgccgtccgccgctggtgacggcggcgcatcagccactgcggcggcagcgcccgccgccgggaggcggccgttcaccagcctcagccaagaggaggccgacctcgcccttgcccgcgtcctccaggagcaggagcgggcgtacatgatgctgaccggcggcgagtacgcgatctcggacgccgagagctacgactacgacgaggaggaagacggcgatgggagcgactacgaggaggaaggcgaggcgctcgacgaggacgagcaggttggggacgcggaagcggagggggctgagggggacctggacctggacccttctcagtacgaggacgacggggagggcgacgtctccgacaggctcatggcgctcgtcgggatcggtgattggcgagcaatggagcaggatgatgctggggacgaggaggacgacgaagatgctgaggttcatacacagggtgcatgggaagatgttgacccagacgaatactcttacgaggagctaattgcgctgggtgaagttgtcggtacggaaagcaaaggccttgctgctgacactattgcctcattaccttgggtgacttaccaggcacaagacaagcaagatggcaacatggaacagtgtgttatttgtcgtgtggagtttgacgagggcgagtcattagttgcactcccttgcaaacatccataccattctgagtgcataaaccagtggctgcagctaaacaaggtatgcccgatgtgcagtgctgaagttcccacttctgtgaacaagcaggcatgacttactcaaacggaagaagatagcggtggcttggtatttatctgccattgatggaatgaaagaagcgccaactgttaaattgttcagggaagcaagggaattggctgggttctgattccctgttttcttcagttcgacaggcttagtcccccccggcctgtacgcatgctaatttgtatggccataccgctggttatttatgcattccatcagacgccgatgattcattgcttgtagatgtaaatcaacaatcataccaccatagtcaatagcagttgttttaatgc

SEQ ID NO: 10617 - protein, 306 aa, Zea mays subsp. mays
  peptide (1)..(306): Ceres Seq. ID no. 12364937
  misc_feature (254)..(294): Pfam Name: Zinc finger, C3HC4 type (RING finger) Pfam Description: Zinc finger, C3HC4 type (RING finger)
  misc_feature (101)..(306): Homolog of NCBI NO: 18402411 NR Description: expressed protein; protein id: At3g19910.1, by cDNA: 108568., supported by cDNA: gi_15010577, supported by gi_15028362, supported by cDNA: gi_19310706 [Arabidopsis
  misc_feature (99)..(301): Homolog of NCBI NO: 10334499 NR Description: hypothetical protein [Cicer arietinum]
  misc_feature (101)..(306): Homolog of NCBI NO: 21536693 NR Description: unknown [Arabidopsis thaliana]
  misc_feature (157)..(298): Homolog of NCBI NO: 22331928 NR Description: putative protein; protein id: At3g63530.1 thaliana] >gi|21104275|emb|CAD32249.1| putative protein
  misc_feature (78)..(298): Homolog of NCBI NO: 38567912 NR Description: OSJNBa0088I22.8 [Oryza sativa (japonica
  misc_feature (138)..(301): Homolog of NCBI NO: 15232746 NR Description: zinc-finger protein-like protein; protein id:
  misc_feature (66)..(298): Homolog of NCBI NO: 34898016 NR Description: ESTs C26000(C11448),AU082130(C11448) correspond
  misc_feature (185)..(296): Homolog of NCBI NO: 40253261 NR Description: DNA binding zinc finger protein-like [Oryza
  misc_feature (204)..(294): Homolog of NCBI NO: 11358785 NR Description: RING-H2 finger protein RHG1a [imported] -
  misc_feature (46)..(165): Homolog of NCBI NO: 18402411 NR Description: expressed protein; protein id: At3g19910.1, by cDNA: 108568., supported by cDNA: gi_15010577, supported by gi_15028362, supported by cDNA: gi_19310706 [Arabidopsis
KPPPISSVSLESHRALTAMDGSSKRIGGGGDDMPSPDHDQNASPNVPPSAAGDGGASATAAAAPAAGRRPFTSLSQEEADLALARVLQEQERAYMMLTGGEYAISDAESYDYDEEEDGDGSDYEEEGEALDEDEQVGDAEAEGAEGDLDLDPSQYEDDGEGDVSDRLMALVGIGDWRAMEQDDAGDEEDDEDAEVHTQGAWEDVDPDEYSYEELIALGEVVGTESKGLAADTIASLPWVTYQAQDKQDGNMEQCVICRVEFDEGESLVALPCKHPYHSECINQWLQLNKVCPMCSAEVPTSVNKQA

SEQ ID NO: 10618 - protein, 288 aa, Zea mays subsp. mays
  peptide (1)..(288): Ceres Seq. ID no. 12364938
  misc_feature (236)..(276): Pfam Name: Zinc finger, C3HC4 type (RING finger) Pfam Description: Zinc finger, C3HC4 type (RING finger)
  misc_feature (83)..(288): Homolog of NCBI NO: 18402411 NR Description: expressed protein; protein id: At3g19910.1, by cDNA: 108568., supported by cDNA: gi_15010577, supported by gi_15028362, supported by cDNA: gi_19310706 [Arabidopsis
  misc_feature (81)..(283): Homolog of NCBI NO: 10334499 NR Description: hypothetical protein [Cicer arietinum]
  misc_feature (83)..(288): Homolog of NCBI NO: 21536693 NR Description: unknown [Arabidopsis thaliana]
  misc_feature (139)..(280): Homolog of NCBI NO: 22331928 NR Description: putative protein; protein id: At3g63530.1 thaliana] >gi|21104275|emb|CAD32249.1| putative protein
  misc_feature (60)..(280): Homolog of NCBI NO: 38567912 NR Description: OSJNBa0088I22.8 [Oryza sativa (japonica
  misc_feature (120)..(283): Homolog of NCBI NO: 15232746 NR Description: zinc-finger protein-like protein; protein id:
  misc_feature (48)..(280): Homolog of NCBI NO: 34898016 NR Description: ESTs C26000(C11448),AU082130(C11448) correspond
  misc_feature (167)..(278): Homolog of NCBI NO: 40253261 NR Description: DNA binding zinc finger protein-like [Oryza
  misc_feature (186)..(276): Homolog of NCBI NO: 11358785 NR Description: RING-H2 finger protein RHG1a [imported] -
  misc_feature (28)..(147): Homolog of NCBI NO: 18402411 NR Description: expressed protein; protein id: At3g19910.1, by cDNA: 108568., supported by cDNA: gi_15010577, supported by gi_15028362, supported by cDNA: gi_19310706 [Arabidopsis
MDGSSKRIGGGGDDMPSPDHDQNASPNVPPSAAGDGGASATAAAAPAAGRRPFTSLSQEEADLALARVLQEQERAYMMLTGGEYAISDAESYDYDEEEDGDGSDYEEEGEALDEDEQVGDAEAEGAEGDLDLDPSQYEDDGEGDVSDRLMALVGIGDWRAMEQDDAGDEEDDEDAEVHTQGAWEDVDPDEYSYEELIALGEVVGTESKGLAADTIASLPWVTYQAQDKQDGNMEQCVICRVEFDEGESLVALPCKHPYHSECINQWLQLNKVCPMCSAEVPTSVNKQA

SEQ ID NO: 10619 - protein, 274 aa, Zea mays subsp. mays
  peptide (1)..(274): Ceres Seq. ID no. 12364939
  misc_feature (222)..(262): Pfam Name: Zinc finger, C3HC4 type (RING finger) Pfam Description: Zinc finger, C3HC4 type (RING finger)
  misc_feature (69)..(274): Homolog of NCBI NO: 18402411 NR Description: expressed protein; protein id: At3g19910.1, by cDNA: 108568., supported by cDNA: gi_15010577, supported by gi_15028362, supported by cDNA: gi_19310706 [Arabidopsis
  misc_feature (67)..(269): Homolog of NCBI NO: 10334499 NR Description: hypothetical protein [Cicer arietinum]
  misc_feature (69)..(274): Homolog of NCBI NO: 21536693 NR Description: unknown [Arabidopsis thaliana]
  misc_feature (125)..(266): Homolog of NCBI NO: 22331928 NR Description: putative protein; protein id: At3g63530.1 thaliana] >gi|21104275|emb|CAD32249.1| putative protein
  misc_feature (46)..(266): Homolog of NCBI NO: 38567912 NR Description: OSJNBa0088I22.8 [Oryza sativa (japonica
  misc_feature (106)..(269): Homolog of NCBI NO: 15232746 NR Description: zinc-finger protein-like protein; protein id:
  misc_feature (34)..(266): Homolog of NCBI NO: 34898016 NR Description: ESTs C26000(C11448),AU082130(C11448) correspond
  misc_feature (153)..(264): Homolog of NCBI NO: 40253261 NR Description: DNA binding zinc finger protein-like [Oryza
  misc_feature (172)..(262): Homolog of NCBI NO: 11358785 NR Description: RING-H2 finger protein RHG1a [imported] -
  misc_feature (14)..(133): Homolog of NCBI NO: 18402411 NR Description: expressed protein; protein id: At3g19910.1, by cDNA: 108568., supported by cDNA: gi_15010577, supported by gi_15028362, supported by cDNA: gi_19310706 [Arabidopsis
MPSPDHDQNASPNVPPSAAGDGGASATAAAAPAAGRRPFTSLSQEEADLALARVLQEQERAYMMLTGGEYAISDAESYDYDEEEDGDGSDYEEEGEALDEDEQVGDAEAEGAEGDLDLDPSQYEDDGEGDVSDRLMALVGIGDWRAMEQDDAGDEEDDEDAEVHTQGAWEDVDPDEYSYEELIALGEVVGTESKGLAADTIASLPWVTYQAQDKQDGNMEQCVICRVEFDEGESLVALPCKHPYHSECINQWLQLNKVCPMCSAEVPTSVNKQA

SEQ ID NO: 10620 - DNA, 1547 bp, Zea mays subsp. mays
  misc_feature (1)..(1547): Ceres Seq. ID no. 12364898
  misc_feature: MA Experiment ID: 108504 Result: Up-regulated in Transcription
  misc_feature: MA Experiment 108504 PARAMETER Experiment Name: Zm_Drought_P Parameter: Age (day) Value: 8
  misc_feature: MA Experiment 108504 PARAMETER Experiment Name: Zm_Drought_P Parameter: Organism Value: Zea mays
  misc_feature: MA Experiment 108504 PARAMETER Experiment Name: Zm_Drought_P Parameter: Plant Line Value: 35A19
  misc_feature: MA Experiment 108504 PARAMETER Experiment Name: Zm_Drought_P Parameter: Timepoint (hr) Value: 12
  misc_feature: MA Experiment 108504 PARAMETER Experiment Name: Zm_Drought_P Parameter: Tissue Value: Aerial
  misc_feature: MA Experiment 108504 PARAMETER Experiment Name: Zm_Drought_P Parameter: Treatment Value: Drought vs. No Drought
  misc_feature: MA Experiment ID: 108529 Result: Up-regulated in Transcription
  misc_feature: MA Experiment 108529 PARAMETER Experiment Name: Zm_Imbibed_Seeds_P Parameter: Age (day) Value: 5 vs. 2
  misc_feature: MA Experiment 108529 PARAMETER Experiment Name: Zm_Imbibed_Seeds_P Parameter: Organism Value: Zea mays
  misc_feature: MA Experiment 108529 PARAMETER Experiment Name: Zm_Imbibed_Seeds_P Parameter: Plant Line Value: 35A19
  misc_feature: MA Experiment 108529 PARAMETER Experiment Name: Zm_Imbibed_Seeds_P Parameter: Tissue Value: Roots vs. Embryo
  misc_feature: MA Experiment ID: 108533 Result: Down-regulated in Transcription
  misc_feature: MA Experiment 108533 PARAMETER Experiment Name: Zm_4deg_Cold_P Parameter: Age (hr) Value: 8
  misc_feature: MA Experiment 108533 PARAMETER Experiment Name: Zm_4deg_Cold_P Parameter: Organism Value: Zea mays
  misc_feature: MA Experiment 108533 PARAMETER Experiment Name: Zm_4deg_Cold_P Parameter: Plant Line Value: 35A19
  misc_feature: MA Experiment 108533 PARAMETER Experiment Name: Zm_4deg_Cold_P Parameter: Temperature (deg C) Value: 4 vs. 22
  misc_feature: MA Experiment 108533 PARAMETER Experiment Name: Zm_4deg_Cold_P Parameter: Timepoint (hr) Value: 1
  misc_feature: MA Experiment 108533 PARAMETER Experiment Name: Zm_4deg_Cold_P Parameter: Tissue Value: Aerial
  misc_feature: MA Experiment ID: 108535 Result: Down-regulated in Transcription
  misc_feature: MA Experiment 108535 PARAMETER Experiment Name: Zm_Meristem_P Parameter: Age (day) Value: 8
  misc_feature: MA Experiment 108535 PARAMETER Experiment Name: Zm_Meristem_P Parameter: Organism Value: Zea mays
  misc_feature: MA Experiment 108535 PARAMETER Experiment Name: Zm_Meristem_P Parameter: Plant Line Value: 35A19
  misc_feature: MA Experiment 108535 PARAMETER Experiment Name: Zm_Meristem_P Parameter: Tissue Value: Root Meristem vs. Above Root Meristem
  misc_feature: MA Experiment ID: 108539 Result: Up-regulated in Transcription
  misc_feature: MA Experiment 108539 PARAMETER Experiment Name: Zm_20percent_PEG_P Parameter: Age (day) Value: 8
  misc_feature: MA Experiment 108539 PARAMETER Experiment Name: Zm_20percent_PEG_P Parameter: Organism Value: Zea mays
  misc_feature: MA Experiment 108539 PARAMETER Experiment Name: Zm_20percent_PEG_P Parameter: Plant Line Value: 35A19
  misc_feature: MA Experiment 108539 PARAMETER Experiment Name: Zm_20percent_PEG_P Parameter: Timepoint (hr) Value: 1
  misc_feature: MA Experiment 108539 PARAMETER Experiment Name: Zm_20percent_PEG_P Parameter: Tissue Value: Aerial
  misc_feature: MA Experiment 108539 PARAMETER Experiment Name: Zm_20percent_PEG_P Parameter: Treatment Value: 20percent PEG vs. No Treatment
  misc_feature: MA Experiment ID: 108543 Result: Up-regulated in Transcription
  misc_feature: MA Experiment ID: 108544 Result: Up-regulated in Transcription
  misc_feature: MA Experiment ID: 108545 Result: Down-regulated in Transcription
  misc_feature: MA Experiment 108545 PARAMETER Experiment Name: Zm_Imbibed_Seeds_P Parameter: Age (day) Value: 3 vs. 2
  misc_feature: MA Experiment 108545 PARAMETER Experiment Name: Zm_Imbibed_Seeds_P Parameter: Organism Value: Zea mays
  misc_feature: MA Experiment 108545 PARAMETER Experiment Name: Zm_Imbibed_Seeds_P Parameter: Plant Line Value: 35A19
  misc_feature: MA Experiment 108545 PARAMETER Experiment Name: Zm_Imbibed_Seeds_P Parameter: Tissue Value: Aerial vs. Embryo
  misc_feature: MA Experiment ID: 108546 Result: Up-regulated in Transcription
  misc_feature: MA Experiment 108546 PARAMETER Experiment Name: Zm_Imbibed_Seeds_P Parameter: Age (day) Value: 3 vs. 2
  misc_feature: MA Experiment 108546 PARAMETER Experiment Name: Zm_Imbibed_Seeds_P Parameter: Organism Value: Zea mays
  misc_feature: MA Experiment 108546 PARAMETER Experiment Name: Zm_Imbibed_Seeds_P Parameter: Plant Line Value: 35A19
  misc_feature: MA Experiment 108546 PARAMETER Experiment Name: Zm_Imbibed_Seeds_P Parameter: Tissue Value: Roots vs. Embryo
  misc_feature: MA Experiment ID: 108556 Result: Up-regulated in Transcription
  misc_feature: MA Experiment 108556 PARAMETER Experiment Name: Zm_Drought_P Parameter: Age (day) Value: 9
  misc_feature: MA Experiment 108556 PARAMETER Experiment Name: Zm_Drought_P Parameter: Organism Value: Zea mays
  misc_feature: MA Experiment 108556 PARAMETER Experiment Name: Zm_Drought_P Parameter: Plant Line Value: 35A19
  misc_feature: MA Experiment 108556 PARAMETER Experiment Name: Zm_Drought_P Parameter: Timepoint (hr) Value: 24
  misc_feature: MA Experiment 108556 PARAMETER Experiment Name: Zm_Drought_P Parameter: Tissue Value: Aerial
  misc_feature: MA Experiment 108556 PARAMETER Experiment Name: Zm_Drought_P Parameter: Treatment Value: Drought vs. No Drought
  misc_feature: MA Experiment ID: 108599 Result: Up-regulated in Transcription
  misc_feature: MA Experiment 108599 PARAMETER Experiment Name: Zm_RT1_P Parameter: Age (day) Value: 11
  misc_feature: MA Experiment 108599 PARAMETER Experiment Name: Zm_RT1_P Parameter: Organism Value: Zea mays
  misc_feature: MA Experiment 108599 PARAMETER Experiment Name: Zm_RT1_P Parameter: Plant Line Value: rt1 mut vs. rt1 wt
  misc_feature: MA Experiment 108599 PARAMETER Experiment Name: Zm_RT1_P Parameter: Tissue Value: Roots
  misc_feature: MA Experiment ID: 108689 Result: Up-regulated in Transcription
  misc_feature: MA Experiment 108689 PARAMETER Experiment Name: Zm_Drought_Roots_P Parameter: Age (day) Value: 9
  misc_feature: MA Experiment 108689 PARAMETER Experiment Name: Zm_Drought_Roots_P Parameter: Organism Value: Zea mays
  misc_feature: MA Experiment 108689 PARAMETER Experiment Name: Zm_Drought_Roots_P Parameter: Plant Line Value: 35A19
  misc_feature: MA Experiment 108689 PARAMETER Experiment Name: Zm_Drought_Roots_P Parameter: Timepoint (hr) Value: 24
  misc_feature: MA Experiment 108689 PARAMETER Experiment Name: Zm_Drought_Roots_P Parameter: Tissue Value: Roots
  misc_feature: MA Experiment 108689 PARAMETER Experiment Name: Zm_Drought_Roots_P Parameter: Treatment Value: Drought vs. No Drought
  misc_feature: MA Experiment ID: 20000108 Result: Down-regulated in Transcription
  misc_feature: MA Experiment 20000108 PARAMETER Experiment Name: Zm_Root-Tips_P Parameter: Age (day) Value: 12
  misc_feature: MA Experiment 20000108 PARAMETER Experiment Name: Zm_Root-Tips_P Parameter: Organism Value: Zea mays
  misc_feature: MA Experiment 20000108 PARAMETER Experiment Name: Zm_Root-Tips_P Parameter: Tissue Value: Root tips vs. Root mid region    35
  misc_feature: MA Experiment 20000108 PARAMETER Experiment Name: Zm_Root-Tips_P Parameter: Tissue Value: Root tips vs. Root mid region   Sequence Listing-Misc Features (4)
  misc_feature: MA Experiment ID: 20000477 Result: Up-regulated in Transcription
  misc_feature: MA Experiment 20000477 PARAMETER Experiment Name: Zm_5mM_SA_P Parameter: Age (day) Value: 10
  misc_feature: MA Experiment 20000477 PARAMETER Experiment Name: Zm_5mM_SA_P Parameter: Organism Value: Zea mays
  misc_feature: MA Experiment 20000477 PARAMETER Experiment Name: Zm_5mM_SA_P Parameter: Plant Line Value: 35A19
  misc_feature: MA Experiment 20000477 PARAMETER Experiment Name: Zm_5mM_SA_P Parameter: Timepoint (hr) Value: 48
  misc_feature: MA Experiment 20000477 PARAMETER Experiment Name: Zm_5mM_SA_P Parameter: Tissue Value: Aerial
  misc_feature: MA Experiment 20000477 PARAMETER Experiment Name: Zm_5mM_SA_P Parameter: Treatment Value: 5mM SA vs. No Treatment
  misc_feature: MA Experiment ID: 20000478 Result: Up-regulated in Transcription
  misc_feature: MA Experiment 20000478 PARAMETER Experiment Name: Zm_5mM_SA_P Parameter: Age (day) Value: 11
  misc_feature: MA Experiment 20000478 PARAMETER Experiment Name: Zm_5mM_SA_P Parameter: Organism Value: Zea mays
  misc_feature: MA Experiment 20000478 PARAMETER Experiment Name: Zm_5mM_SA_P Parameter: Plant Line Value: 35A19
  misc_feature: MA Experiment 20000478 PARAMETER Experiment Name: Zm_5mM_SA_P Parameter: Timepoint (hr) Value: 72
  misc_feature: MA Experiment 20000478 PARAMETER Experiment Name: Zm_5mM_SA_P Parameter: Tissue Value: Aerial
  misc_feature: MA Experiment 20000478 PARAMETER Experiment Name: Zm_5mM_SA_P Parameter: Treatment Value: 5mM SA vs. No Treatment
  misc_feature: MA Experiment ID: 20000480 Result: Up-regulated in Transcription
  misc_feature: MA Experiment 20000480 PARAMETER Experiment Name: Zm_Drought_P Parameter: Age (day) Value: 11
  misc_feature: MA Experiment 20000480 PARAMETER Experiment Name: Zm_Drought_P Parameter: Organism Value: Zea mays
  misc_feature: MA Experiment 20000480 PARAMETER Experiment Name: Zm_Drought_P Parameter: Plant Line Value: 35A19
  misc_feature: MA Experiment 20000480 PARAMETER Experiment Name: Zm_Drought_P Parameter: Timepoint (hr) Value: 72
  misc_feature: MA Experiment 20000480 PARAMETER Experiment Name: Zm_Drought_P Parameter: Tissue Value: Aerial
  misc_feature: MA Experiment 20000480 PARAMETER Experiment Name: Zm_Drought_P Parameter: Treatment Value: Drought vs. No Drought
  misc_feature: MA Experiment ID: 20000492 Result: Down-regulated in Transcription
  misc_feature: MA Experiment 20000492 PARAMETER Experiment Name: Zm_Hybrid_Seed_Dev_P Parameter: DAP Value: 12
  misc_feature: MA Experiment 20000492 PARAMETER Experiment Name: Zm_Hybrid_Seed_Dev_P Parameter: Organism Value: Zea mays
  misc_feature: MA Experiment 20000492 PARAMETER Experiment Name: Zm_Hybrid_Seed_Dev_P Parameter: Plant Line Value: 35A19
  misc_feature: MA Experiment 20000492 PARAMETER Experiment Name: Zm_Hybrid_Seed_Dev_P Parameter: Tissue Value: Fert Kernel vs. Unfert Floret
  misc_feature: MA Experiment ID: 20000535 Result: Down-regulated in Transcription
  misc_feature: MA Experiment 20000535 PARAMETER Experiment Name: Zm_Hybrid_Seed_Dev_P Parameter: DAP Value: 30 vs. 12
  misc_feature: MA Experiment 20000535 PARAMETER Experiment Name: Zm_Hybrid_Seed_Dev_P Parameter: Organism Value: Zea mays
  misc_feature: MA Experiment 20000535 PARAMETER Experiment Name: Zm_Hybrid_Seed_Dev_P Parameter: Plant Line Value: 35A19
  misc_feature: MA Experiment 20000535 PARAMETER Experiment Name: Zm_Hybrid_Seed_Dev_P Parameter: Tissue Value: Embryo vs. Unfert Floret
gcacgagaccattacctagaacatcctaatcaaaaaaaaggaaacacaattcagcacacgcaccaccaaagaggccggagaagaggggatctcggagaagagtcttcgcctcgcggagagacgtgctctgcctagcatatatagccacacgaaagagagtgcttggcctgccggccttcatctagctagctattgctaactagccagcagcagcgtgcgtgcgttgaaggcagcagaggtagagaggtttttgagagagagaatggcaagcaggcaaggtgtagccgcctccatgttcgccacggcattgctcctcggcgtctttgcatccatcccacaaagtgctgaggccatcggggtgtgctacggcatgagcgccaacaacctgccggcggcgagcacggtggtgagcatgtacaaggcgaacggcatctcggcgatgcggctgtacgcgccggaccagggcgcgctgcaggcggtgggcggcacgggcatcagcgtggccgtgggcgcccccaacgacgtgctgtccaacatcgcggctagccccgcggcggccgcgtcgtgggtgcgcaacaacatccaggcgtacccgtccgtgtcgttccggtacgtgtgcgtgggcaacgaggtggccggcggcgcggcgcaggacctggcgccggccatggagaacgtgcacgcggcgctggcggcggccgggctgggccacatcaaggtgacgacgtcggtgtcgcaggccatcctgggcgtgtacagcccgccgtccgccgcggagttcaccggcgaggcgcgcgggtacatgggccccgtgctgcagttcctggcccgcaccgggtcgccgctcatggccaacatctacccgtacctggcctgggcatacaaccccagcgccatggacatgagctacgcggctcttcacctcctccggcaccgtcgtgcaggacggcgcctacgggtaccagaacctcttcggacaccaccgtcgacgccttctacgtcgccatgggcaagaacggcggctccggcgtgccgctcgtggtgtcggagagcgggtggccgtccggcggcggcgtccaggccacgccggccaacgcgagggtgtacaaccagtacctcatcaaccacgtcgggcgcgggacgccgcgccaccccggcgccatcgagacctacctcttctccatgttcaacgagaaccagaaggagagcggcgtggagcagaactgggggctcttctaccccaacatgcagcacgtctaccccatcagcttctgaagaaccgttaaccgtaccgatccaagctagctgctagctggccctggtggtggctccgaccgacgacggacgacgacgatcgacctgcagccgtatgtgtcgatccggccgtatacagatgatagtacgtagcatgtatgtatatatatggtatatgtgggcttgctttgcgaccgctgggagtgagtatccgatccaattggtacggtagctactcccagatgcgtacgccgtgagtgatgctgagtacgtattttatatgtatatgttac

SEQ ID NO: 10621 - protein, 349 aa, Zea mays subsp. mays
  peptide (1)..(349): Ceres Seq. ID no. 12364899
  misc_feature (31)..(217): Pfam Name: Glycosyl hydrolases family 17 Pfam Description: Glycosyl hydrolases family 17
  misc_feature (1)..(217): Homolog of NCBI NO: 486849 NR Description: licheninase (EC 3.2.1.73) precursor - wheat
  misc_feature (1)..(217): Homolog of NCBI NO: 288654 NR Description: (1-3, 1-4)-beta-glucanase [Avena sativa]
  misc_feature (5)..(217): Homolog of NCBI NO: 100591 NR Description: licheninase (EC 3.2.1.73) I precursor, splice a - barley >gi|18984|emb|CAA40094.1| unnamed protein product
  misc_feature (1)..(217): Homolog of NCBI NO: 228411 NR Description: beta glucanase:ISOTYPE=II
  misc_feature (29)..(217): Homolog of NCBI NO: 840908 NR Description: beta glucanase [Triticum aestivum]
  misc_feature (1)..(217): Homolog of NCBI NO: 13249140 NR Description: glucanase [Oryza sativa]
  misc_feature (23)..(217): Homolog of NCBI NO: 100592 NR Description: licheninase (EC 3.2.1.73) isoenzyme EIb precursor barley >gi|4688931|emb|CAB41402.1| lichenase [Hordeum vulgare
  misc_feature (1)..(217): Homolog of NCBI NO: 854361 NR Description: beta-glucanase [Oryza sativa (japonica
  misc_feature (25)..(217): Homolog of NCBI NO: 121773 NR Description: LICHENASE II PRECURSOR (ENDO-BETA-1,3-1,4
  misc_feature (25)..(217): Homolog of NCBI NO: 224995 NR Description: glucan glucohydrolase
MASRQGVAASMFATALLLGVFASIPQSAEAIGVCYGMSANNLPAASTVVSMYKANGISAMRLYAPDQGALQAVGGTGISVAVGAPNDVLSNIAASPAAAASWVRNNIQAYPSVSFRYVCVGNEVAGGAAQDLAPAMENVHAALAAAGLGHIKVTTSVSQAILGVYSPPSAAEFTGEARGYMGPVLQFLARTGSPLMANIYPYLAWAYNPSAMDMSYAALHLLRHRRAGRRLRVPEPLRTPPSTPSTSPWARTAAPACRSWCRRAGGRPAAASRPRRPTRGCTTSTSSTTSGAGRRATPAPSRPTSSPCSTRTRRRAAWSRTGGSSTPTCSTSTPSASEEPLTVPIQASC

SEQ ID NO: 10622 - protein, 339 aa, Zea mays subsp. mays
  peptide (1)..(339): Ceres Seq. ID no. 12364900
  misc_feature (21)..(207): Pfam Name: Glycosyl hydrolases family 17 Pfam Description: Glycosyl hydrolases family 17
  misc_feature (1)..(207): Homolog of NCBI NO: 486849 NR Description: licheninase (EC 3.2.1.73) precursor - wheat
  misc_feature (1)..(207): Homolog of NCBI NO: 288654 NR Description: (1-3, 1-4)-beta-glucanase [Avena sativa]
  misc_feature (1)..(207): Homolog of NCBI NO: 100591 NR Description: licheninase (EC 3.2.1.73) I precursor, splice a - barley >gi|18984|emb|CAA40094.1| unnamed protein product
  misc_feature (1)..(207): Homolog of NCBI NO: 228411 NR Description: beta glucanase:ISOTYPE=II
  misc_feature (19)..(207): Homolog of NCBI NO: 840908 NR Description: beta glucanase [Triticum aestivum]
  misc_feature (1)..(207): Homolog of NCBI NO: 13249140 NR Description: glucanase [Oryza sativa]
  misc_feature (13)..(207): Homolog of NCBI NO: 100592 NR Description: licheninase (EC 3.2.1.73) isoenzyme EIb precursor barley >gi|4688931|emb|CAB41402.1| lichenase [Hordeum vulgare
  misc_feature (1)..(207): Homolog of NCBI NO: 854361 NR Description: beta-glucanase [Oryza sativa (japonica
  misc_feature (15)..(207): Homolog of NCBI NO: 121773 NR Description: LICHENASE II PRECURSOR (ENDO-BETA-1,3-1,4
  misc_feature (15)..(207): Homolog of NCBI NO: 224995 NR Description: glucan glucohydrolase
MFATALLLGVFASIPQSAEAIGVCYGMSANNLPAASTVVSMYKANGISAMRLYAPDQGALQAVGGTGISVAVGAPNDVLSNIAASPAAAASWVRNNIQAYPSVSFRYVCVGNEVAGGAAQDLAPAMENVHAALAAAGLGHIKVTTSVSQAILGVYSPPSAAEFTGEARGYMGPVLQFLARTGSPLMANIYPYLAWAYNPSAMDMSYAALHLLRHRRAGRRLRVPEPLRTPPSTPSTSPWARTAAPACRSWCRRAGGRPAAASRPRRPTRGCTTSTSSTTSGAGRRATPAPSRPTSSPCSTRTRRRAAWSRTGGSSTPTCSTSTPSASEEPLTVPIQASC

SEQ ID NO: 10623 - protein, 313 aa, Zea mays subsp. mays
  peptide (1)..(313): Ceres Seq. ID no. 12364901
  misc_feature (1)..(181): Pfam Name: Glycosyl hydrolases family 17 Pfam Description: Glycosyl hydrolases family 17
  misc_feature (1)..(181): Homolog of NCBI NO: 486849 NR Description: licheninase (EC 3.2.1.73) precursor - wheat
  misc_feature (1)..(181): Homolog of NCBI NO: 288654 NR Description: (1-3, 1-4)-beta-glucanase [Avena sativa]
  misc_feature (1)..(181): Homolog of NCBI NO: 100591 NR Description: licheninase (EC 3.2.1.73) I precursor, splice a - barley >gi|18984|emb|CAA40094.1| unnamed protein product
  misc_feature (1)..(181): Homolog of NCBI NO: 228411 NR Description: beta glucanase:ISOTYPE=II
  misc_feature (1)..(181): Homolog of NCBI NO: 840908 NR Description: beta glucanase [Triticum aestivum]
  misc_feature (1)..(181): Homolog of NCBI NO: 13249140 NR Description: glucanase [Oryza sativa]
  misc_feature (1)..(181): Homolog of NCBI NO: 100592 NR Description: licheninase (EC 3.2.1.73) isoenzyme EIb precursor barley >gi|4688931|emb|CAB41402.1| lichenase [Hordeum vulgare
  misc_feature (1)..(181): Homolog of NCBI NO: 854361 NR Description: beta-glucanase [Oryza sativa (japonica
  misc_feature (1)..(181): Homolog of NCBI NO: 121773 NR Description: LICHENASE II PRECURSOR (ENDO-BETA-1,3-1,4
  misc_feature (1)..(181): Homolog of NCBI NO: 224995 NR Description: glucan glucohydrolase
MSANNLPAASTVVSMYKANGISAMRLYAPDQGALQAVGGTGISVAVGAPNDVLSNIAASPAAAASWVRNNIQAYPSVSFRYVCVGNEVAGGAAQDLAPAMENVHAALAAAGLGHIKVTTSVSQAILGVYSPPSAAEFTGEARGYMGPVLQFLARTGSPLMANIYPYLAWAYNPSAMDMSYAALHLLRHRRAGRRLRVPEPLRTPPSTPSTSPWARTAAPACRSWCRRAGGRPAAASRPRRPTRGCTTSTSSTTSGAGRRATPAPSRPTSSPCSTRTRRRAAWSRTGGSSTPTCSTSTPSASEEPLTVPIQASC

SEQ ID NO: 10624 - DNA, 1717 bp, Zea mays subsp. mays
  misc_feature (1)..(1717): Ceres Seq. ID no. 12341036
  misc_feature: MA Experiment ID: 108543 Result: Up-regulated in Transcription
  misc_feature: MA Experiment ID: 20000535 Result: Down-regulated in Transcription
  misc_feature: MA Experiment 20000535 PARAMETER Experiment Name: Zm_Hybrid_Seed_Dev_P Parameter: DAP Value: 30 vs. 12
  misc_feature: MA Experiment 20000535 PARAMETER Experiment Name: Zm_Hybrid_Seed_Dev_P Parameter: Organism Value: Zea mays
  misc_feature: MA Experiment 20000535 PARAMETER Experiment Name: Zm_Hybrid_Seed_Dev_P Parameter: Plant Line Value: 35A19
  misc_feature: MA Experiment 20000535 PARAMETER Experiment Name: Zm_Hybrid_Seed_Dev_P Parameter: Tissue Value: Embryo vs. Unfert Floret
caaacgaccgcaccagccagtccacttcgccagtgatctgtctcagctcgtcgcgtctccggcgccgacagacacggggcgagtgggcaacgcggctccgagatcggcgggcaggatgatgatgctgatcgactgctcgaggtgccgtaccccgctgcagctgccgcacggggctccctgtatccgatgcgccatctgtggggctatcacgcacgtcgcccccgcccctcctgtcgagcccaaccgcggtgccgtacagccgccgccggggtggggtccaccgccgccgccggtgcacgggcgaaagcgagccgtggtgtgcgggatatcgtatcggcactcgcggtatgagctgaagggctgcatcaacgacgtcaagtgcatgcgccacgtcctcatgacgcgcttcaacttccccgacgactccatcattatgctcaacgaagaacaaaccgacccctacaaaatcccaacaaagcataacatagggatggccatgtattggcttgtgcaaggttgtcaacctggagactcattggtgttccattattctgggcatggagcacagcaaagaaactacaatggagatgaggttgatgggtttgatgaaaccctctgcccattggattttgagacacaaggaatgattgtggatgatgacataaatacagcactagttcgaccacttcctcgtggagttaaacttcatgcattcattgatgcttgtcatagtggaactgcacttgatttgccttacctctgcagaatgaacaggagtgggcaatatgtatgggaagatcaccgaccaccatctggtgtctggaaaggcactagtggtggggaggctatttcatttagtggttgtgatgatgatcagacctctgcagatacctctgctttatcaaaggtcacttcgactggtgcaatgacatttggcttcatccaagctattgaacgtggacagggcaccacctacggtagtatcctgaactccatgcgttcgacaatacgcaacacagatgactcagcaggtgtaggtggcggtgctgttacatcactaattacaatgcttcttactggagggagcctatctgctggtggtctgagacaggagccacaactgacggcatgcgagccatttgatgtctatgcgaagcccttctccctatgacgcgttcatggtgctgctgctgcccacccatttcacgttatcaacttatcatcgtgtacatttcaccatcccgattgttaacagcgcgtggaattacaatccgtataaggaagctatgcatatatatcgtttgtttcacaggtacaatccgtatatgcatagcttccttatacggatgtaattaggcctggaacaactgttgaactgaggaacgcaaagatcgacatgttcaagggttcgatgcggcttgcagtggacaagtggggaattgtcaaagctgctgaaagctcagctgagtggacagtcaaggaggacaacaacctgtccttaattgagtttgagctggtgaccgtgacggagtgaaaaccgccattgcttaggagtattgttggttttctgtgttgttgaacctaatcatcatcgccaatcaataaggactcgtggttgatgttctcggcatcggagttgcgtattgctgtaccgttgcttgcttactgtgcgttgtggctacttttgactgctatcgaataataataaattggtgtc

SEQ ID NO: 10625 - protein, 389 aa, Zea mays subsp. mays
  peptide (1)..(389): Ceres Seq. ID no. 12341037
  misc_feature (102)..(389): Pfam Name: Caspase domain Pfam Description: Caspase domain
  misc_feature (33)..(389): Homolog of NCBI NO: 30678252 NR Description: expressed protein [Arabidopsis thaliana]
  misc_feature (89)..(389): Homolog of NCBI NO: 37536924 NR Description: hypothetical protein [Oryza sativa (japonica group)] >gi|12597889|gb|AAG60197.1| hypothetical protein [Oryza >gi|31433553|gb|AAP55051.1| hypothetical protein [Oryza sativa
  misc_feature (70)..(389): Homolog of NCBI NO: 32482814 NR Description: metacaspase 2 [Arabidopsis thaliana]
  misc_feature (39)..(95): Homolog of NCBI NO: 32482814 NR Description: metacaspase 2 [Arabidopsis thaliana]
  misc_feature (33)..(298): Homolog of NCBI NO: 3258570 NR Description: Unknown protein [Arabidopsis thaliana]
  misc_feature (70)..(389): Homolog of NCBI NO: 30686772 NR Description: expressed protein [Arabidopsis thaliana]
  misc_feature (39)..(95): Homolog of NCBI NO: 30686772 NR Description: expressed protein [Arabidopsis thaliana]
  misc_feature (70)..(375): Homolog of NCBI NO: 7485453 NR Description: hypothetical protein F13M23.250 - Arabidopsis >gi|4455254|emb|CAB36753.1| putative protein [Arabidopsis >gi|7269361|emb|CAB79420.1| putative protein [Arabidopsis
  misc_feature (39)..(95): Homolog of NCBI NO: 7485453 NR Description: hypothetical protein F13M23.250 - Arabidopsis >gi|4455254|emb|CAB36753.1| putative protein [Arabidopsis >gi|7269361|emb|CAB79420.1| putative protein [Arabidopsis
  misc_feature (86)..(389): Homolog of NCBI NO: 15237654 NR Description: expressed protein; protein id: At5g64240.1,
KRPHQPVHFASDLSQLVASPAPTDTGRVGNAAPRSAGRMMMLIDCSRCRTPLQLPHGAPCIRCAICGAITHVAPAPPVEPNRGAVQPPPGWGPPPPPVHGRKRAVVCGISYRHSRYELKGCINDVKCMRHVLMTRFNFPDDSIIMLNEEQTDPYKIPTKHNIGMAMYWLVQGCQPGDSLVFHYSGHGAQQRNYNGDEVDGFDETLCPLDFETQGMIVDDDINTALVRPLPRGVKLHAFIDACHSGTALDLPYLCRMNRSGQYVWEDHRPPSGVWKGTSGGEAISFSGCDDDQTSADTSALSKVTSTGAMTFGFIQAIERGQGTTYGSILNSMRSTIRNTDDSAGVGGGAVTSLITMLLTGGSLSAGGLRQEPQLTACEPFDVYAKPFSL

SEQ ID NO: 10626 - protein, 351 aa, Zea mays subsp. mays
  peptide (1)..(351): Ceres Seq. ID no. 12341038
  misc_feature (64)..(351): Pfam Name: Caspase domain Pfam Description: Caspase domain
  misc_feature (1)..(351): Homolog of NCBI NO: 30678252 NR Description: expressed protein [Arabidopsis thaliana]
  misc_feature (51)..(351): Homolog of NCBI NO: 37536924 NR Description: hypothetical protein [Oryza sativa (japonica group)] >gi|12597889|gb|AAG60197.1| hypothetical protein [Oryza >gi|31433553|gb|AAP55051.1| hypothetical protein [Oryza sativa
  misc_feature (32)..(351): Homolog of NCBI NO: 32482814 NR Description: metacaspase 2 [Arabidopsis thaliana]
  misc_feature (1)..(57): Homolog of NCBI NO: 32482814 NR Description: metacaspase 2 [Arabidopsis thaliana]
  misc_feature (1)..(260): Homolog of NCBI NO: 3258570 NR Description: Unknown protein [Arabidopsis thaliana]
  misc_feature (32)..(351): Homolog of NCBI NO: 30686772 NR Description: expressed protein [Arabidopsis thaliana]
  misc_feature (1)..(57): Homolog of NCBI NO: 30686772 NR Description: expressed protein [Arabidopsis thaliana]
  misc_feature (32)..(337): Homolog of NCBI NO: 7485453 NR Description: hypothetical protein F13M23.250 - Arabidopsis >gi|4455254|emb|CAB36753.1| putative protein [Arabidopsis >gi|7269361|emb|CAB79420.1| putative protein [Arabidopsis
  misc_feature (1)..(57): Homolog of NCBI NO: 7485453 NR Description: hypothetical protein F13M23.250 - Arabidopsis >gi|4455254|emb|CAB36753.1| putative protein [Arabidopsis >gi|7269361|emb|CAB79420.1| putative protein [Arabidopsis
  misc_feature (48)..(351): Homolog of NCBI NO: 15237654 NR Description: expressed protein; protein id: At5g64240.1,
MMMLIDCSRCRTPLQLPHGAPCIRCAICGAITHVAPAPPVEPNRGAVQPPPGWGPPPPPVHGRKRAVVCGISYRHSRYELKGCINDVKCMRHVLMTRFNFPDDSIIMLNEEQTDPYKIPTKHNIGMAMYWLVQGCQPGDSLVFHYSGHGAQQRNYNGDEVDGFDETLCPLDFETQGMIVDDDINTALVRPLPRGVKLHAFIDACHSGTALDLPYLCRMNRSGQYVWEDHRPPSGVWKGTSGGEAISFSGCDDDQTSADTSALSKVTSTGAMTFGFIQAIERGQGTTYGSILNSMRSTIRNTDDSAGVGGGAVTSLITMLLTGGSLSAGGLRQEPQLTACEPFDVYAKPFSL

SEQ ID NO: 10627 - protein, 350 aa, Zea mays subsp. mays
  peptide (1)..(350): Ceres Seq. ID no. 12341039
  misc_feature (63)..(350): Pfam Name: Caspase domain Pfam Description: Caspase domain
  misc_feature (1)..(350): Homolog of NCBI NO: 30678252 NR Description: expressed protein [Arabidopsis thaliana]
  misc_feature (50)..(350): Homolog of NCBI NO: 37536924 NR Description: hypothetical protein [Oryza sativa (japonica group)] >gi|12597889|gb|AAG60197.1| hypothetical protein [Oryza >gi|31433553|gb|AAP55051.1| hypothetical protein [Oryza sativa
  misc_feature (31)..(350): Homolog of NCBI NO: 32482814 NR Description: metacaspase 2 [Arabidopsis thaliana]
  misc_feature (1)..(56): Homolog of NCBI NO: 32482814 NR Description: metacaspase 2 [Arabidopsis thaliana]
  misc_feature (1)..(259): Homolog of NCBI NO: 3258570 NR Description: Unknown protein [Arabidopsis thaliana]
  misc_feature (31)..(350): Homolog of NCBI NO: 30686772 NR Description: expressed protein [Arabidopsis thaliana]
  misc_feature (1)..(56): Homolog of NCBI NO: 30686772 NR Description: expressed protein [Arabidopsis thaliana]
  misc_feature (31)..(336): Homolog of NCBI NO: 7485453 NR Description: hypothetical protein F13M23.250 - Arabidopsis >gi|4455254|emb|CAB36753.1| putative protein [Arabidopsis >gi|7269361|emb|CAB79420.1| putative protein [Arabidopsis
  misc_feature (1)..(56): Homolog of NCBI NO: 7485453 NR Description: hypothetical protein F13M23.250 - Arabidopsis >gi|4455254|emb|CAB36753.1| putative protein [Arabidopsis >gi|7269361|emb|CAB79420.1| putative protein [Arabidopsis
  misc_feature (47)..(350): Homolog of NCBI NO: 15237654 NR Description: expressed protein; protein id: At5g64240.1,
MMLIDCSRCRTPLQLPHGAPCIRCAICGAITHVAPAPPVEPNRGAVQPPPGWGPPPPPVHGRKRAVVCGISYRHSRYELKGCINDVKCMRHVLMTRFNFPDDSIIMLNEEQTDPYKIPTKHNIGMAMYWLVQGCQPGDSLVFHYSGHGAQQRNYNGDEVDGFDETLCPLDFETQGMIVDDDINTALVRPLPRGVKLHAFIDACHSGTALDLPYLCRMNRSGQYVWEDHRPPSGVWKGTSGGEAISFSGCDDDQTSADTSALSKVTSTGAMTFGFIQAIERGQGTTYGSILNSMRSTIRNTDDSAGVGGGAVTSLITMLLTGGSLSAGGLRQEPQLTACEPFDVYAKPFSL

SEQ ID NO: 10628 - DNA, 1453 bp, Zea mays subsp. mays
  misc_feature (1)..(1453): Ceres Seq. ID no. 12364902
  misc_feature: MA Experiment ID: 108503 Result: Down-regulated in Transcription
  misc_feature: MA Experiment 108503 PARAMETER Experiment Name: Zm_Drought_P Parameter: Age (day) Value: 8
  misc_feature: MA Experiment 108503 PARAMETER Experiment Name: Zm_Drought_P Parameter: Organism Value: Zea mays
  misc_feature: MA Experiment 108503 PARAMETER Experiment Name: Zm_Drought_P Parameter: Plant Line Value: 35A19
  misc_feature: MA Experiment 108503 PARAMETER Experiment Name: Zm_Drought_P Parameter: Timepoint (hr) Value: 6
  misc_feature: MA Experiment 108503 PARAMETER Experiment Name: Zm_Drought_P Parameter: Tissue Value: Aerial
  misc_feature: MA Experiment 108503 PARAMETER Experiment Name: Zm_Drought_P Parameter: Treatment Value: Drought vs. No Drought
  misc_feature: MA Experiment ID: 108504 Result: Down-regulated in Transcription
  misc_feature: MA Experiment 108504 PARAMETER Experiment Name: Zm_Drought_P Parameter: Age (day) Value: 8
  misc_feature: MA Experiment 108504 PARAMETER Experiment Name: Zm_Drought_P Parameter: Organism Value: Zea mays
  misc_feature: MA Experiment 108504 PARAMETER Experiment Name: Zm_Drought_P Parameter: Plant Line Value: 35A19
  misc_feature: MA Experiment 108504 PARAMETER Experiment Name: Zm_Drought_P Parameter: Timepoint (hr) Value: 12
  misc_feature: MA Experiment 108504 PARAMETER Experiment Name: Zm_Drought_P Parameter: Tissue Value: Aerial
  misc_feature: MA Experiment 108504 PARAMETER Experiment Name: Zm_Drought_P Parameter: Treatment Value: Drought vs. No Drought
  misc_feature: MA Experiment ID: 108526 Result: Down-regulated in Transcription
  misc_feature: MA Experiment 108526 PARAMETER Experiment Name: Zm_5mM_NO_P Parameter: Age (day) Value: 8
  misc_feature: MA Experiment 108526 PARAMETER Experiment Name: Zm_5mM_NO_P Parameter: Organism Value: Zea mays
  misc_feature: MA Experiment 108526 PARAMETER Experiment Name: Zm_5mM_NO_P Parameter: Plant Line Value: 35A19
  misc_feature: MA Experiment 108526 PARAMETER Experiment Name: Zm_5mM_NO_P Parameter: Timepoint (hr) Value: 1
  misc_feature: MA Experiment 108526 PARAMETER Experiment Name: Zm_5mM_NO_P Parameter: Tissue Value: Aerial
  misc_feature: MA Experiment 108526 PARAMETER Experiment Name: Zm_5mM_NO_P Parameter: Treatment Value: 5mM NO vs. No Treatment
  misc_feature: MA Experiment ID: 108528 Result: Up-regulated in Transcription
  misc_feature: MA Experiment 108528 PARAMETER Experiment Name: Zm_Imbibed_Seeds_P Parameter: Age (day) Value: 5 vs. 2
  misc_feature: MA Experiment 108528 PARAMETER Experiment Name: Zm_Imbibed_Seeds_P Parameter: Organism Value: Zea mays
  misc_feature: MA Experiment 108528 PARAMETER Experiment Name: Zm_Imbibed_Seeds_P Parameter: Plant Line Value: 35A19
  misc_feature: MA Experiment 108528 PARAMETER Experiment Name: Zm_Imbibed_Seeds_P Parameter: Tissue Value: Aerial vs. Embryo
  misc_feature: MA Experiment ID: 108530 Result: Up-regulated in Transcription
  misc_feature: MA Experiment 108530 PARAMETER Experiment Name: Zm_Imbibed_Seeds_P Parameter: Age (day) Value: 6 vs. 2
  misc_feature: MA Experiment 108530 PARAMETER Experiment Name: Zm_Imbibed_Seeds_P Parameter: Organism Value: Zea mays
  misc_feature: MA Experiment 108530 PARAMETER Experiment Name: Zm_Imbibed_Seeds_P Parameter: Plant Line Value: 35A19
  misc_feature: MA Experiment 108530 PARAMETER Experiment Name: Zm_Imbibed_Seeds_P Parameter: Tissue Value: Aerial vs. Embryo
  misc_feature: MA Experiment ID: 108540 Result: Down-regulated in Transcription
  misc_feature: MA Experiment 108540 PARAMETER Experiment Name: Zm_20percent_PEG_P Parameter: Age (day) Value: 8
  misc_feature: MA Experiment 108540 PARAMETER Experiment Name: Zm_20percent_PEG_P Parameter: Organism Value: Zea mays
  misc_feature: MA Experiment 108540 PARAMETER Experiment Name: Zm_20percent_PEG_P Parameter: Plant Line Value: 35A19
  misc_feature: MA Experiment 108540 PARAMETER Experiment Name: Zm_20percent_PEG_P Parameter: Timepoint (hr) Value: 6
  misc_feature: MA Experiment 108540 PARAMETER Experiment Name: Zm_20percent_PEG_P Parameter: Tissue Value: Aerial
  misc_feature: MA Experiment 108540 PARAMETER Experiment Name: Zm_20percent_PEG_P Parameter: Treatment Value: 20percent PEG vs. No Treatment
  misc_feature: MA Experiment ID: 108542 Result: Down-regulated in Transcription
  misc_feature: MA Experiment 108542 PARAMETER Experiment Name: Zm_150mM_NaCl_P Parameter: Age (day) Value: 8
  misc_feature: MA Experiment 108542 PARAMETER Experiment Name: Zm_150mM_NaCl_P Parameter: Organism Value: Zea mays
  misc_feature: MA Experiment 108542 PARAMETER Experiment Name: Zm_150mM_NaCl_P Parameter: Plant Line Value: 35A19
  misc_feature: MA Experiment 108542 PARAMETER Experiment Name: Zm_150mM_NaCl_P Parameter: Timepoint (hr) Value: 6
  misc_feature: MA Experiment 108542 PARAMETER Experiment Name: Zm_150mM_NaCl_P Parameter: Tissue Value: Aerial
  misc_feature: MA Experiment 108542 PARAMETER Experiment Name: Zm_150mM_NaCl_P Parameter: Treatment Value: 150mM NaCl vs. No Treatment
  misc_feature: MA Experiment ID: 108556 Result: Down-regulated in Transcription
  misc_feature: MA Experiment 108556 PARAMETER Experiment Name: Zm_Drought_P Parameter: Age (day) Value: 9
  misc_feature: MA Experiment 108556 PARAMETER Experiment Name: Zm_Drought_P Parameter: Organism Value: Zea mays
  misc_feature: MA Experiment 108556 PARAMETER Experiment Name: Zm_Drought_P Parameter: Plant Line Value: 35A19
  misc_feature: MA Experiment 108556 PARAMETER Experiment Name: Zm_Drought_P Parameter: Timepoint (hr) Value: 24
  misc_feature: MA Experiment 108556 PARAMETER Experiment Name: Zm_Drought_P Parameter: Tissue Value: Aerial
  misc_feature: MA Experiment 108556 PARAMETER Experiment Name: Zm_Drought_P Parameter: Treatment Value: Drought vs. No Drought
  misc_feature: MA Experiment ID: 108559 Result: Down-regulated in Transcription
  misc_feature: MA Experiment 108559 PARAMETER Experiment Name: Zm_5mM_NO_P Parameter: Age (day) Value: 8
  misc_feature: MA Experiment 108559 PARAMETER Experiment Name: Zm_5mM_NO_P Parameter: Organism Value: Zea mays
  misc_feature: MA Experiment 108559 PARAMETER Experiment Name: Zm_5mM_NO_P Parameter: Plant Line Value: 35A19
  misc_feature: MA Experiment 108559 PARAMETER Experiment Name: Zm_5mM_NO_P Parameter: Timepoint (hr) Value: 12
  misc_feature: MA Experiment 108559 PARAMETER Experiment Name: Zm_5mM_NO_P Parameter: Tissue Value: Aerial
  misc_feature: MA Experiment 108559 PARAMETER Experiment Name: Zm_5mM_NO_P Parameter: Treatment Value: 5mM NO vs. No Treatment
  misc_feature: MA Experiment ID: 108597 Result: Down-regulated in Transcription
  misc_feature: MA Experiment 108597 PARAMETER Experiment Name: Zm_100uM_ABA_P Parameter: Age (day) Value: 9
  misc_feature: MA Experiment 108597 PARAMETER Experiment Name: Zm_100uM_ABA_P Parameter: Organism Value: Zea mays
  misc_feature: MA Experiment 108597 PARAMETER Experiment Name: Zm_100uM_ABA_P Parameter: Plant Line Value: 35A19
  misc_feature: MA Experiment 108597 PARAMETER Experiment Name: Zm_100uM_ABA_P Parameter: Timepoint (hr) Value: 24
  misc_feature: MA Experiment 108597 PARAMETER Experiment Name: Zm_100uM_ABA_P Parameter: Tissue Value: Aerial
  misc_feature: MA Experiment 108597 PARAMETER Experiment Name: Zm_100uM_ABA_P Parameter: Treatment Value: 100uM ABA vs. No Treatment
  misc_feature: MA Experiment ID: 20000477 Result: Down-regulated in Transcription
  misc_feature: MA Experiment 20000477 PARAMETER Experiment Name: Zm_5mM_SA_P Parameter: Age (day) Value: 10
  misc_feature: MA Experiment 20000477 PARAMETER Experiment Name: Zm_5mM_SA_P Parameter: Organism Value: Zea mays
  misc_feature: MA Experiment 20000477 PARAMETER Experiment Name: Zm_5mM_SA_P Parameter: Plant Line Value: 35A19
  misc_feature: MA Experiment 20000477 PARAMETER Experiment Name: Zm_5mM_SA_P Parameter: Timepoint (hr) Value: 48
  misc_feature: MA Experiment 20000477 PARAMETER Experiment Name: Zm_5mM_SA_P Parameter: Tissue Value: Aerial
  misc_feature: MA Experiment 20000477 PARAMETER Experiment Name: Zm_5mM_SA_P Parameter: Treatment Value: 5mM SA vs. No Treatment
  misc_feature: MA Experiment ID: 20000480 Result: Down-regulated in Transcription
  misc_feature: MA Experiment 20000480 PARAMETER Experiment Name: Zm_Drought_P Parameter: Age (day) Value: 11
  misc_feature: MA Experiment 20000480 PARAMETER Experiment Name: Zm_Drought_P Parameter: Organism Value: Zea mays
  misc_feature: MA Experiment 20000480 PARAMETER Experiment Name: Zm_Drought_P Parameter: Plant Line Value: 35A19
  misc_feature: MA Experiment 20000480 PARAMETER Experiment Name: Zm_Drought_P Parameter: Timepoint (hr) Value: 72
  misc_feature: MA Experiment 20000480 PARAMETER Experiment Name: Zm_Drought_P Parameter: Tissue Value: Aerial
  misc_feature: MA Experiment 20000480 PARAMETER Experiment Name: Zm_Drought_P Parameter: Treatment Value: Drought vs. No Drought
  misc_feature: MA Experiment ID: 20000629 Result: Up-regulated in Transcription
  misc_feature: MA Experiment 20000629 PARAMETER Experiment Name: Zm_Herbicide-Treatments_P Parameter: Timepoint (hr) Value: 12
  misc_feature: MA Experiment 20000629 PARAMETER Experiment Name: Zm_Herbicide-Treatments_P Parameter: Tissue Value: Aerial
  misc_feature: MA Experiment 20000629 PARAMETER Experiment Name: Zm_Herbicide-Treatments_P Parameter: Treatment Value: Trimec vs. No Treatment
  misc_feature: MA Experiment ID: 20001608 Result: Down-regulated in Transcription
  misc_feature: MA Experiment 20001608 PARAMETER Experiment Name: Zm_50ppm_KNO3_L-to-H_P Parameter: Age (day) Value: 21
  misc_feature: MA Experiment 20001608 PARAMETER Experiment Name: Zm_50ppm_KNO3_L-to-H_P Parameter: Organism Value: Zea mays
  misc_feature: MA Experiment 20001608 PARAMETER Experiment Name: Zm_50ppm_KNO3_L-to-H_P Parameter: Plant Line Value: 35A19
  misc_feature: MA Experiment 20001608 PARAMETER Experiment Name: Zm_50ppm_KNO3_L-to-H_P Parameter: Timepoint (hr) Value: 48
  misc_feature: MA Experiment 20001608 PARAMETER Experiment Name: Zm_50ppm_KNO3_L-to-H_P Parameter: Tissue Value: Shoots
  misc_feature: MA Experiment 20001608 PARAMETER Experiment Name: Zm_50ppm_KNO3_L-to-H_P Parameter: Treatment Value: 50ppm KNO3 vs. 50ppm KCl
tcctaatcgaaaaattagccagcgagctgaggcctgaggagcgagcacagccgagtcacccggccggccgcccgcacgcacggacaccaacaactcccttggacgcacccgatcgaccctgctgcctgctagccgtgcgcagtagtgggagcgagcacgagtgagagtgggcagcgagaacatacgccgcccccggccggtgtgactggtggtggcgtcgcgcgcgcgatggggagggcgccgtgctgcgagaaggtggggctcaagcgcgggaggtggacgaaggaggaggaccagatactcgccaactacatcgcagagcacggcgagggatcctggaggtcgctgcccaagaatgcagggctgctccgctgcggcaagagctgccgcctgcggtggatcaactaccttcgggccgacgtcaagagggggaacatctccaaggaggaagaggacgtcatcatcaagctccacgccacccttggaaacaggtggtccctgatcgccagccacctccccggccgaacagacaacgagatcaagaactactggaactcgcacctcagccgccagatccacacgtaccgccggaaatacaccgccggcccggacacggcgcccatcgccatcgccatcgccatcgacatgagcaagctgcacagcgccgagaggcggcgcggtggcaggaccccgggccggtcgccgaagagcgccaccagcagcagcagcatgaccaagagcaagcagccggacgaccctgagccagaaccggaggccggcggcgcgtccagcccgcggcacagcgacggggcgcgaagcgccgtggtggacccggacccggacccgaaccagcccaacagcagcagcggcagcggcagcacgggcgagggggaggacgcgacggggccgtgggtgctggatccgatcgagctcggggacctctgggaggccgagagcgagatggacgccctcatgtctatcgggggggctgcccacgactcggccaccgcggaaggattcgacgcggcccaggcccaggtggacgacctgttcgacgacatggactgggataacttcgcggcccatctgtggggggagccggagcagcagaacgaccacagcgcgcagccgcagccccagcaggccgccgagccgcaggctgctgctgctgctgatgtggcggcggcgggggcggaggcctgcgacccggacgaacacgaactggaggcgttggaaacttggctcctgtccgactcgttctgacagttcccgtcatcagataccgatcaggtcgacgcagctagctagggcctaggtgttgctccgtgcgtgcagtttcgtgtaaatttcgtttctagttcgtaaataggtgctggttcgtgcatggtatattggtatgggccttcgagttcgaatagagagagagaggagacttgcgtcatgcatggcatgg

SEQ ID NO: 10629 - protein, 344 aa, Zea mays subsp. mays
  peptide (1)..(344): Ceres Seq. ID no. 12364903
  misc_feature (14)..(61): Pfam Name: Myb-like DNA-binding domain Pfam Description: Myb-like DNA-binding domain
  misc_feature (1)..(344): Homolog of NCBI NO: 11526779 NR Description: P-like protein [Zea mays subsp. parviglumis]
  misc_feature (1)..(344): Homolog of NCBI NO: 11526773 NR Description: P2 protein [Zea mays]
  misc_feature (1)..(344): Homolog of NCBI NO: 11526775 NR Description: P2-t protein [Zea mays subsp. parviglumis]
  misc_feature (1)..(344): Homolog of NCBI NO: 16507120 NR Description: myb-like transcription factor [Zea mays]
  misc_feature (1)..(252): Homolog of NCBI NO: 7438327 NR Description: Myb-like transcription regulator P - maize
  misc_feature (1)..(270): Homolog of NCBI NO: 127588 NR Description: Myb-related protein P >gi|100929|pir||A39697
  misc_feature (1)..(343): Homolog of NCBI NO: 19072772 NR Description: typical A-type R2R3 Myb protein [Oryza sativa]
  misc_feature (1)..(281): Homolog of NCBI NO: 34905688 NR Description: putative myb-related protein P [Oryza sativa
  misc_feature (1)..(281): Homolog of NCBI NO: 28610110 NR Description: R2R3 Myb transcription factor MYB-IF35 [Zea mays]
  misc_feature (1)..(239): Homolog of NCBI NO: 11358528 NR Description: myb-related transcription factor MYB12 [imported] Arabidopsis thaliana >gi|3941420|gb|AAC83586.1| putative
MGRAPCCEKVGLKRGRWTKEEDQILANYIAEHGEGSWRSLPKNAGLLRCGKSCRLRWINYLRADVKRGNISKEEEDVIIKLHATLGNRWSLIASHLPGRTDNEIKNYWNSHLSRQIHTYRRKYTAGPDTAPIAIAIAIDMSKLHSAERRRGGRTPGRSPKSATSSSSMTKSKQPDDPEPEPEAGGASSPRHSDGARSAVVDPDPDPNQPNSSSGSGSTGEGEDATGPWVLDPIELGDLWEAESEMDALMSIGGAAHDSATAEGFDAAQAQVDDLFDDMDWDNFAAHLWGEPEQQNDHSAQPQPQQAAEPQAAAAADVAAAGAEACDPDEHELEALETWLLSDSF

SEQ ID NO: 10630 - protein, 205 aa, Zea mays subsp. mays
  peptide (1)..(205): Ceres Seq. ID no. 12364904
  misc_feature (1)..(205): Homolog of NCBI NO: 11526779 NR Description: P-like protein [Zea mays subsp. parviglumis]
  misc_feature (1)..(205): Homolog of NCBI NO: 11526773 NR Description: P2 protein [Zea mays]
  misc_feature (1)..(205): Homolog of NCBI NO: 11526775 NR Description: P2-t protein [Zea mays subsp. parviglumis]
  misc_feature (1)..(205): Homolog of NCBI NO: 16507120 NR Description: myb-like transcription factor [Zea mays]
  misc_feature (1)..(113): Homolog of NCBI NO: 7438327 NR Description: Myb-like transcription regulator P - maize
  misc_feature (1)..(131): Homolog of NCBI NO: 127588 NR Description: Myb-related protein P >gi|100929|pir||A39697
  misc_feature (1)..(204): Homolog of NCBI NO: 19072772 NR Description: typical A-type R2R3 Myb protein [Oryza sativa]
  misc_feature (1)..(142): Homolog of NCBI NO: 34905688 NR Description: putative myb-related protein P [Oryza sativa
  misc_feature (1)..(142): Homolog of NCBI NO: 28610110 NR Description: R2R3 Myb transcription factor MYB-IF35 [Zea mays]
  misc_feature (1)..(100): Homolog of NCBI NO: 11358528 NR Description: myb-related transcription factor MYB12 [imported] Arabidopsis thaliana >gi|3941420|gb|AAC83586.1| putative
MSKLHSAERRRGGRTPGRSPKSATSSSSMTKSKQPDDPEPEPEAGGASSPRHSDGARSAVVDPDPDPNQPNSSSGSGSTGEGEDATGPWVLDPIELGDLWEAESEMDALMSIGGAAHDSATAEGFDAAQAQVDDLFDDMDWDNFAAHLWGEPEQQNDHSAQPQPQQAAEPQAAAAADVAAAGAEACDPDEHELEALETWLLSDSF

SEQ ID NO: 10631 - protein, 177 aa, Zea mays subsp. mays
  peptide (1)..(177): Ceres Seq. ID no. 12364905
  misc_feature (1)..(177): Homolog of NCBI NO: 11526779 NR Description: P-like protein [Zea mays subsp. parviglumis]
  misc_feature (1)..(177): Homolog of NCBI NO: 11526773 NR Description: P2 protein [Zea mays]
  misc_feature (1)..(177): Homolog of NCBI NO: 11526775 NR Description: P2-t protein [Zea mays subsp. parviglumis]
  misc_feature (1)..(177): Homolog of NCBI NO: 16507120 NR Description: myb-like transcription factor [Zea mays]
  misc_feature (1)..(85): Homolog of NCBI NO: 7438327 NR Description: Myb-like transcription regulator P - maize
  misc_feature (1)..(103): Homolog of NCBI NO: 127588 NR Description: Myb-related protein P >gi|100929|pir||A39697
  misc_feature (1)..(176): Homolog of NCBI NO: 19072772 NR Description: typical A-type R2R3 Myb protein [Oryza sativa]
  misc_feature (1)..(114): Homolog of NCBI NO: 34905688 NR Description: putative myb-related protein P [Oryza sativa
  misc_feature (1)..(114): Homolog of NCBI NO: 28610110 NR Description: R2R3 Myb transcription factor MYB-IF35 [Zea mays]
  misc_feature (1)..(72): Homolog of NCBI NO: 11358528 NR Description: myb-related transcription factor MYB12 [imported] Arabidopsis thaliana >gi|3941420|gb|AAC83586.1| putative
MTKSKQPDDPEPEPEAGGASSPRHSDGARSAVVDPDPDPNQPNSSSGSGSTGEGEDATGPWVLDPIELGDLWEAESEMDALMSIGGAAHDSATAEGFDAAQAQVDDLFDDMDWDNFAAHLWGEPEQQNDHSAQPQPQQAAEPQAAAAADVAAAGAEACDPDEHELEALETWLLSDSF

SEQ ID NO: 10632 - DNA, 1087 bp, Zea mays subsp. mays
  misc_feature (1)..(1087): Ceres Seq. ID no. 12342079
  misc_feature: MA Experiment ID: 108556 Result: Down-regulated in Transcription
  misc_feature: MA Experiment 108556 PARAMETER Experiment Name: Zm_Drought_P Parameter: Age (day) Value: 9
  misc_feature: MA Experiment 108556 PARAMETER Experiment Name: Zm_Drought_P Parameter: Organism Value: Zea mays
  misc_feature: MA Experiment 108556 PARAMETER Experiment Name: Zm_Drought_P Parameter: Plant Line Value: 35A19
  misc_feature: MA Experiment 108556 PARAMETER Experiment Name: Zm_Drought_P Parameter: Timepoint (hr) Value: 24
  misc_feature: MA Experiment 108556 PARAMETER Experiment Name: Zm_Drought_P Parameter: Tissue Value: Aerial
  misc_feature: MA Experiment 108556 PARAMETER Experiment Name: Zm_Drought_P Parameter: Treatment Value: Drought vs. No Drought
  misc_feature: MA Experiment ID: 20000492 Result: Up-regulated in Transcription
  misc_feature: MA Experiment 20000492 PARAMETER Experiment Name: Zm_Hybrid_Seed_Dev_P Parameter: DAP Value: 12
  misc_feature: MA Experiment 20000492 PARAMETER Experiment Name: Zm_Hybrid_Seed_Dev_P Parameter: Organism Value: Zea mays
  misc_feature: MA Experiment 20000492 PARAMETER Experiment Name: Zm_Hybrid_Seed_Dev_P Parameter: Plant Line Value: 35A19
  misc_feature: MA Experiment 20000492 PARAMETER Experiment Name: Zm_Hybrid_Seed_Dev_P Parameter: Tissue Value: Fert Kernel vs. Unfert Floret
aaaaacccacaccacacttcgttccccttgtcccaattgctcctccacttcccccaccgcccaccagtgatctcgccgccgcgacgcgaggcaccacggccggcgccggccgccttcctccagaaagtatcccccgtgcgcccgaatcacctcttaatttcgttcttagccgctgcgtttcacagaggtcgcgacatgcccgcctcggcggctcctcctgcccagcccgcggcaccgccccctcctcctcctcccgcttctcctgcccctccggaggatgtggaggcgactgccggttcaccttcgagggcttcagcagtggggacggtgaactggggaacggccaccctcgttggcgtcttcgctgggctgctatacggggggagcagggaggcctccgcttccgtcagtaaggatgccgaggtgatgctgaagatgggaagcacaactgacaagcgtgaacagtatagattgatgagagatgctatggagaaaaggttcattcgggttgccaaaggttcactagtcgggggtgttcggctggggatgtttactgcgactttctttggcatacagaaccttcttatcgatactcgtggagtacatgatgtattcaacattgccgctgctggctctgctactgcagctgcttttggccttatattgccagggtcaatgatgtggcgtgcaaggaatgtattggtgggatctgctcttggtgctggcatctgctatccacttggctgggtacagttaaagctggcagaaaaggccaatcttgagattgcaaattcaaaaccatcatccgatttgacagagggaaaagaaaatcaaagccgtgtgggtgctgctatcgaacgacttgagggtagtctgaagaagtgagtgaagcctacgcatcgatggcatttttctcgttgtcttggttccataaatgtagcagctacaaggactgggctgcactgactattgcttcttttctcgcatgttatggacttttatttcgagtttgcagtaggtatcgccgtaccgcactggtaacttgtatctttcaagtcacaagttattgagttcgcagttgctattc

SEQ ID NO: 10633 - protein, 294 aa, Zea mays subsp. mays
  peptide (1)..(294): Ceres Seq. ID no. 12342080
  misc_feature (66)..(294): Homolog of NCBI NO: 34903198 NR Description: unnamed protein product [Oryza sativa (japonica group)] >gi|6721563|dbj|BAA89593.1| unnamed protein product
  misc_feature (91)..(294): Homolog of NCBI NO: 15242587 NR Description: putative protein; protein id: At5g63000.1 thaliana] >gi|28393224|gb|AAO42042.1| unknown protein thaliana] >gi|28973221|gb|AAO63935.1| unknown protein
  misc_feature (91)..(259): Homolog of NCBI NO: 9758300 NR Description: contains similarity to unknown
KNPHHTSFPLSQLLLHFPHRPPVISPPRREAPRPAPAAFLQKVSPVRPNHLLISFLAAAFHRGRDMPASAAPPAQPAAPPPPPPPASPAPPEDVEATAGSPSRASAVGTVNWGTATLVGVFAGLLYGGSREASASVSKDAEVMLKMGSTTDKREQYRLMRDAMEKRFIRVAKGSLVGGVRLGMFTATFFGIQNLLIDTRGVHDVFNIAAAGSATAAAFGLILPGSMMWRARNVLVGSALGAGICYPLGWVQLKLAEKANLEIANSKPSSDLTEGKENQSRVGAAIERLEGSLKK

SEQ ID NO: 10634 - protein, 229 aa, Zea mays subsp. mays
  peptide (1)..(229): Ceres Seq. ID no. 12342081
  misc_feature (1)..(229): Homolog of NCBI NO: 34903198 NR Description: unnamed protein product [Oryza sativa (japonica group)] >gi|6721563|dbj|BAA89593.1| unnamed protein product
  misc_feature (26)..(229): Homolog of NCBI NO: 15242587 NR Description: putative protein; protein id: At5g63000.1 thaliana] >gi|28393224|gb|AAO42042.1| unknown protein thaliana] >gi|28973221|gb|AAO63935.1| unknown protein
  misc_feature (26)..(194): Homolog of NCBI NO: 9758300 NR Description: contains similarity to unknown
MPASAAPPAQPAAPPPPPPPASPAPPEDVEATAGSPSRASAVGTVNWGTATLVGVFAGLLYGGSREASASVSKDAEVMLKMGSTTDKREQYRLMRDAMEKRFIRVAKGSLVGGVRLGMFTATFFGIQNLLIDTRGVHDVFNIAAAGSATAAAFGLILPGSMMWRARNVLVGSALGAGICYPLGWVQLKLAEKANLEIANSKPSSDLTEGKENQSRVGAAIERLEGSLKK

SEQ ID NO: 10635 - protein, 152 aa, Zea mays subsp. mays
  peptide (1)..(152): Ceres Seq. ID no. 12342082
  misc_feature (1)..(152): Homolog of NCBI NO: 34903198 NR Description: unnamed protein product [Oryza sativa (japonica group)] >gi|6721563|dbj|BAA89593.1| unnamed protein product
  misc_feature (1)..(152): Homolog of NCBI NO: 15242587 NR Description: putative protein; protein id: At5g63000.1 thaliana] >gi|28393224|gb|AAO42042.1| unknown protein thaliana] >gi|28973221|gb|AAO63935.1| unknown protein
  misc_feature (1)..(117): Homolog of NCBI NO: 9758300 NR Description: contains similarity to unknown
MLKMGSTTDKREQYRLMRDAMEKRFIRVAKGSLVGGVRLGMFTATFFGIQNLLIDTRGVHDVFNIAAAGSATAAAFGLILPGSMMWRARNVLVGSALGAGICYPLGWVQLKLAEKANLEIANSKPSSDLTEGKENQSRVGAAIERLEGSLKK

SEQ ID NO: 10636 - DNA, 1201 bp, Zea mays subsp. mays
  misc_feature (1)..(1201): Ceres Seq. ID no. 12374495
  misc_feature: MA Experiment ID: 108522 Result: Up-regulated in Transcription
  misc_feature: MA Experiment 108522 PARAMETER Experiment Name: Zm_42deg_Heat_P Parameter: Age (day) Value: 8
  misc_feature: MA Experiment 108522 PARAMETER Experiment Name: Zm_42deg_Heat_P Parameter: Organism Value: Zea mays
  misc_feature: MA Experiment 108522 PARAMETER Experiment Name: Zm_42deg_Heat_P Parameter: Plant Line Value: 35A19
  misc_feature: MA Experiment 108522 PARAMETER Experiment Name: Zm_42deg_Heat_P Parameter: Temperature (deg C) Value: 42 vs. 22
  misc_feature: MA Experiment 108522 PARAMETER Experiment Name: Zm_42deg_Heat_P Parameter: Timepoint (hr) Value: 1
  misc_feature: MA Experiment 108522 PARAMETER Experiment Name: Zm_42deg_Heat_P Parameter: Tissue Value: Aerial
  misc_feature: MA Experiment ID: 108528 Result: Up-regulated in Transcription
  misc_feature: MA Experiment 108528 PARAMETER Experiment Name: Zm_Imbibed_Seeds_P Parameter: Age (day) Value: 5 vs. 2
  misc_feature: MA Experiment 108528 PARAMETER Experiment Name: Zm_Imbibed_Seeds_P Parameter: Organism Value: Zea mays
  misc_feature: MA Experiment 108528 PARAMETER Experiment Name: Zm_Imbibed_Seeds_P Parameter: Plant Line Value: 35A19
  misc_feature: MA Experiment 108528 PARAMETER Experiment Name: Zm_Imbibed_Seeds_P Parameter: Tissue Value: Aerial vs. Embryo
  misc_feature: MA Experiment ID: 108530 Result: Up-regulated in Transcription
  misc_feature: MA Experiment 108530 PARAMETER Experiment Name: Zm_Imbibed_Seeds_P Parameter: Age (day) Value: 6 vs. 2
  misc_feature: MA Experiment 108530 PARAMETER Experiment Name: Zm_Imbibed_Seeds_P Parameter: Organism Value: Zea mays
  misc_feature: MA Experiment 108530 PARAMETER Experiment Name: Zm_Imbibed_Seeds_P Parameter: Plant Line Value: 35A19
  misc_feature: MA Experiment 108530 PARAMETER Experiment Name: Zm_Imbibed_Seeds_P Parameter: Tissue Value: Aerial vs. Embryo
  misc_feature: MA Experiment ID: 108535 Result: Down-regulated in Transcription
  misc_feature: MA Experiment 108535 PARAMETER Experiment Name: Zm_Meristem_P Parameter: Age (day) Value: 8
  misc_feature: MA Experiment 108535 PARAMETER Experiment Name: Zm_Meristem_P Parameter: Organism Value: Zea mays
  misc_feature: MA Experiment 108535 PARAMETER Experiment Name: Zm_Meristem_P Parameter: Plant Line Value: 35A19
  misc_feature: MA Experiment 108535 PARAMETER Experiment Name: Zm_Meristem_P Parameter: Tissue Value: Root Meristem vs. Above Root Meristem
  misc_feature: MA Experiment ID: 108536 Result: Down-regulated in Transcription
  misc_feature: MA Experiment 108536 PARAMETER Experiment Name: Zm_Meristem_P Parameter: Age (day) Value: 8
  misc_feature: MA Experiment 108536 PARAMETER Experiment Name: Zm_Meristem_P Parameter: Organism Value: Zea mays
  misc_feature: MA Experiment 108536 PARAMETER Experiment Name: Zm_Meristem_P Parameter: Plant Line Value: 35A19
  misc_feature: MA Experiment 108536 PARAMETER Experiment Name: Zm_Meristem_P Parameter: Tissue Value: Shoot Meristem vs. Above Shoot Meristem
  misc_feature: MA Experiment ID: 108543 Result: Up-regulated in Transcription
  misc_feature: MA Experiment ID: 108545 Result: Up-regulated in Transcription
  misc_feature: MA Experiment 108545 PARAMETER Experiment Name: Zm_Imbibed_Seeds_P Parameter: Age (day) Value: 3 vs. 2
  misc_feature: MA Experiment 108545 PARAMETER Experiment Name: Zm_Imbibed_Seeds_P Parameter: Organism Value: Zea mays
  misc_feature: MA Experiment 108545 PARAMETER Experiment Name: Zm_Imbibed_Seeds_P Parameter: Plant Line Value: 35A19
  misc_feature: MA Experiment 108545 PARAMETER Experiment Name: Zm_Imbibed_Seeds_P Parameter: Tissue Value: Aerial vs. Embryo
  misc_feature: MA Experiment ID: 108546 Result: Down-regulated in Transcription
  misc_feature: MA Experiment 108546 PARAMETER Experiment Name: Zm_Imbibed_Seeds_P Parameter: Age (day) Value: 3 vs. 2
  misc_feature: MA Experiment 108546 PARAMETER Experiment Name: Zm_Imbibed_Seeds_P Parameter: Organism Value: Zea mays
  misc_feature: MA Experiment 108546 PARAMETER Experiment Name: Zm_Imbibed_Seeds_P Parameter: Plant Line Value: 35A19
  misc_feature: MA Experiment 108546 PARAMETER Experiment Name: Zm_Imbibed_Seeds_P Parameter: Tissue Value: Roots vs. Embryo
  misc_feature: MA Experiment ID: 108547 Result: Up-regulated in Transcription
  misc_feature: MA Experiment 108547 PARAMETER Experiment Name: Zm_Imbibed_Seeds_P Parameter: Age (day) Value: 4 vs. 2
  misc_feature: MA Experiment 108547 PARAMETER Experiment Name: Zm_Imbibed_Seeds_P Parameter: Organism Value: Zea mays
  misc_feature: MA Experiment 108547 PARAMETER Experiment Name: Zm_Imbibed_Seeds_P Parameter: Plant Line Value: 35A19
  misc_feature: MA Experiment 108547 PARAMETER Experiment Name: Zm_Imbibed_Seeds_P Parameter: Tissue Value: Aerial vs. Embryo
  misc_feature: MA Experiment ID: 20000535 Result: Down-regulated in Transcription
  misc_feature: MA Experiment 20000535 PARAMETER Experiment Name: Zm_Hybrid_Seed_Dev_P Parameter: DAP Value: 30 vs. 12
  misc_feature: MA Experiment 20000535 PARAMETER Experiment Name: Zm_Hybrid_Seed_Dev_P Parameter: Organism Value: Zea mays
  misc_feature: MA Experiment 20000535 PARAMETER Experiment Name: Zm_Hybrid_Seed_Dev_P Parameter: Plant Line Value: 35A19
  misc_feature: MA Experiment 20000535 PARAMETER Experiment Name: Zm_Hybrid_Seed_Dev_P Parameter: Tissue Value: Embryo vs. Unfert Floret
  misc_feature: MA Experiment ID: 20001614 Result: Up-regulated in Transcription
  misc_feature: MA Experiment 20001614 PARAMETER Experiment Name: Zm_50ppm_KNO3_L-to-H_P Parameter: Age (day) Value: 21
  misc_feature: MA Experiment 20001614 PARAMETER Experiment Name: Zm_50ppm_KNO3_L-to-H_P Parameter: Organism Value: Zea mays
  misc_feature: MA Experiment 20001614 PARAMETER Experiment Name: Zm_50ppm_KNO3_L-to-H_P Parameter: Plant Line Value: 35A19
  misc_feature: MA Experiment 20001614 PARAMETER Experiment Name: Zm_50ppm_KNO3_L-to-H_P Parameter: Timepoint (hr) Value: 48
  misc_feature: MA Experiment 20001614 PARAMETER Experiment Name: Zm_50ppm_KNO3_L-to-H_P Parameter: Tissue Value: Roots
  misc_feature: MA Experiment 20001614 PARAMETER Experiment Name: Zm_50ppm_KNO3_L-to-H_P Parameter: Treatment Value: 50ppm KNO3 vs. 50ppm KCl
cttcacgatacgcacccaccagaggaaaagggcaaaagccaaaaggcatcaccgccgcgacgacgatggcagcctcgctccaagccgcggccaccctgatgcagccggccaagatcggcggccgggcgccctttgcctcgctgccgtcccgcccgtcgtcgcaactcgcctgcagggcgttcggcgtcgacgccggcgccgccaggatcacgtgctccctgcaggacgtcgccagcaggtgcgtcgacgccgcgaagctcgccggcttcgcgctcgccacctcggcgctcctcgtctcgggcgcgagcgcggagggcacgcccaagaggctgacctacgacgagatccagagcaaaacgtacatggaggtgaagggcacgggcacggcgaaccagtgcccgaccatcgacggcggcgtggagtcgttcccgttcaaggccggcaagtaccagatgaagaagctgtgcctggagccgacgtccttcaccgtcaaggcggagggcatcgccaagaacgccccgcccgagttccagaagaccaagctcatgacccgcctcacgtacacgctggacgagatcgagggcccgctcgaggtcggctccgacggcacgctcaagttcgaggagaaggacggcatcgactacgccgccgtcaccgtgcagctcccggggggcgagcgcgtgccgttcctcttcaccgtcaagcagctcgtcgccaccggcaagcccgagagcttcggcgggcccttcctcgtgcccagctaccgcggctcctccttcctcgaccccaagggccgcggcggctccaccggctacgacaacgccgtcgcgctccccgccgggggcagaggtgacgaggaggagctccagaaggagaacatcaagaacgccgcctcctccaccggcaacatcacgttgagcgtcaccaagagcaacccggagaccggcgaggtcatcggcgtcttcgagagcgtgcagccgtccgacaccgacctcggggccaaggcgcccaaggatgtcaagatccagggggtctggtacgctcagctcgagtgattcgagtgtctaactgctaggtgtccgaccgccgtcatggatcttgggaaggtgtatgtataccatggaaaactttggagagcagaggaggaatcgtgtatgtaatgtacttgttaatgcaaattcgggctgtcgcttttttactc

SEQ ID NO: 10637 - protein, 350 aa, Zea mays subsp. mays
  peptide (1)..(350): Ceres Seq. ID no. 12374496
  misc_feature (114)..(350): Pfam Name: Manganese-stabilising protein / photosystem II Pfam Description: Manganese-stabilising protein / photosystem II
  misc_feature (22)..(350): Homolog of NCBI NO: 131388 NR Description: Oxygen-evolving enhancer protein 1, chloroplast (OEE1) (33 kDa subunit of oxygen evolving system of photosystem
  misc_feature (22)..(350): Homolog of NCBI NO: 11134054 NR Description: Oxygen-evolving enhancer protein 1, chloroplast (OEE1) (33 kDa subunit of oxygen evolving system of photosystem
  misc_feature (22)..(350): Homolog of NCBI NO: 9229957 NR Description: oxygen evolving enhancer protein 1 precursor
  misc_feature (22)..(350): Homolog of NCBI NO: 131385 NR Description: OXYGEN-EVOLVING ENHANCER PROTEIN 1, CHLOROPLAST (OEE1) (33 KDA SUBUNIT OF OXYGEN EVOLVING SYSTEM OF PHOTOSYSTEM
  misc_feature (22)..(350): Homolog of NCBI NO: 12644171 NR Description: Oxygen-evolving enhancer protein 1, chloroplast (OEE1) (33 kDa subunit of oxygen evolving system of photosystem
  misc_feature (23)..(350): Homolog of NCBI NO: 100454 NR Description: photosystem II oxygen-evolving complex protein 1
  misc_feature (22)..(350): Homolog of NCBI NO: 11133881 NR Description: Oxygen-evolving enhancer protein 1, chloroplast (OEE1) (33 kDa subunit of oxygen evolving system of photosystem (OEC 33 kDa subunit) (33 kDa thylakoid membrane protein) protein
  misc_feature (22)..(350): Homolog of NCBI NO: 15230324 NR Description: photosystem II oxygen-evolving complex 33 protein id: At3g50820.1, supported by cDNA: 95531., supported by
  misc_feature (22)..(350): Homolog of NCBI NO: 131384 NR Description: Oxygen-evolving enhancer protein 1, chloroplast (OEE1) (33 kDa subunit of oxygen evolving system of photosystem (OEC 33 kDa subunit) (33 kDa thylakoid membrane protein)
  misc_feature (17)..(349): Homolog of NCBI NO: 7008029 NR Description: oxygen-evolving enhancer protein 1 precursor
SRYAPTRGKGQKPKGITAATTMAASLQAAATLMQPAKIGGRAPFASLPSRPSSQLACRAFGVDAGAARITCSLQDVASRCVDAAKLAGFALATSALLVSGASAEGTPKRLTYDEIQSKTYMEVKGTGTANQCPTIDGGVESFPFKAGKYQMKKLCLEPTSFTVKAEGIAKNAPPEFQKTKLMTRLTYTLDEIEGPLEVGSDGTLKFEEKDGIDYAAVTVQLPGGERVPFLFTVKQLVATGKPESFGGPFLVPSYRGSSFLDPKGRGGSTGYDNAVALPAGGRGDEEELQKENIKNAASSTGNITLSVTKSNPETGEVIGVFESVQPSDTDLGAKAPKDVKIQGVWYAQLE

SEQ ID NO: 10638 - protein, 329 aa, Zea mays subsp. mays
  peptide (1)..(329): Ceres Seq. ID no. 12374497
  misc_feature (93)..(329): Pfam Name: Manganese-stabilising protein / photosystem II Pfam Description: Manganese-stabilising protein / photosystem II
  misc_feature (1)..(329): Homolog of NCBI NO: 12644171 NR Description: Oxygen-evolving enhancer protein 1, chloroplast (OEE1) (33 kDa subunit of oxygen evolving system of photosystem
  misc_feature (2)..(329): Homolog of NCBI NO: 100454 NR Description: photosystem II oxygen-evolving complex protein 1
  misc_feature (1)..(329): Homolog of NCBI NO: 11133881 NR Description: Oxygen-evolving enhancer protein 1, chloroplast (OEE1) (33 kDa subunit of oxygen evolving system of photosystem (OEC 33 kDa subunit) (33 kDa thylakoid membrane protein) protein
  misc_feature (1)..(329): Homolog of NCBI NO: 131388 NR Description: Oxygen-evolving enhancer protein 1, chloroplast (OEE1) (33 kDa subunit of oxygen evolving system of photosystem
  misc_feature (1)..(329): Homolog of NCBI NO: 9229957 NR Description: oxygen evolving enhancer protein 1 precursor
  misc_feature (1)..(329): Homolog of NCBI NO: 131385 NR Description: OXYGEN-EVOLVING ENHANCER PROTEIN 1, CHLOROPLAST (OEE1) (33 KDA SUBUNIT OF OXYGEN EVOLVING SYSTEM OF PHOTOSYSTEM
  misc_feature (1)..(329): Homolog of NCBI NO: 11134054 NR Description: Oxygen-evolving enhancer protein 1, chloroplast (OEE1) (33 kDa subunit of oxygen evolving system of photosystem
  misc_feature (1)..(329): Homolog of NCBI NO: 15230324 NR Description: photosystem II oxygen-evolving complex 33 protein id: At3g50820.1, supported by cDNA: 95531., supported by
  misc_feature (1)..(329): Homolog of NCBI NO: 131384 NR Description: Oxygen-evolving enhancer protein 1, chloroplast (OEE1) (33 kDa subunit of oxygen evolving system of photosystem (OEC 33 kDa subunit) (33 kDa thylakoid membrane protein)
  misc_feature (1)..(328): Homolog of NCBI NO: 7008029 NR Description: oxygen-evolving enhancer protein 1 precursor
MAASLQAAATLMQPAKIGGRAPFASLPSRPSSQLACRAFGVDAGAARITCSLQDVASRCVDAAKLAGFALATSALLVSGASAEGTPKRLTYDEIQSKTYMEVKGTGTANQCPTIDGGVESFPFKAGKYQMKKLCLEPTSFTVKAEGIAKNAPPEFQKTKLMTRLTYTLDEIEGPLEVGSDGTLKFEEKDGIDYAAVTVQLPGGERVPFLFTVKQLVATGKPESFGGPFLVPSYRGSSFLDPKGRGGSTGYDNAVALPAGGRGDEEELQKENIKNAASSTGNITLSVTKSNPETGEVIGVFESVQPSDTDLGAKAPKDVKIQGVWYAQLE

SEQ ID NO: 10639 - protein, 318 aa, Zea mays subsp. mays
  peptide (1)..(318): Ceres Seq. ID no. 12374498
  misc_feature (82)..(318): Pfam Name: Manganese-stabilising protein / photosystem II Pfam Description: Manganese-stabilising protein / photosystem II
  misc_feature (1)..(318): Homolog of NCBI NO: 131388 NR Description: Oxygen-evolving enhancer protein 1, chloroplast (OEE1) (33 kDa subunit of oxygen evolving system of photosystem
  misc_feature (1)..(318): Homolog of NCBI NO: 11134054 NR Description: Oxygen-evolving enhancer protein 1, chloroplast (OEE1) (33 kDa subunit of oxygen evolving system of photosystem
  misc_feature (1)..(318): Homolog of NCBI NO: 9229957 NR Description: oxygen evolving enhancer protein 1 precursor
  misc_feature (1)..(318): Homolog of NCBI NO: 131385 NR Description: OXYGEN-EVOLVING ENHANCER PROTEIN 1, CHLOROPLAST (OEE1) (33 KDA SUBUNIT OF OXYGEN EVOLVING SYSTEM OF PHOTOSYSTEM
  misc_feature (1)..(318): Homolog of NCBI NO: 12644171 NR Description: Oxygen-evolving enhancer protein 1, chloroplast (OEE1) (33 kDa subunit of oxygen evolving system of photosystem
  misc_feature (1)..(318): Homolog of NCBI NO: 100454 NR Description: photosystem II oxygen-evolving complex protein 1
  misc_feature (1)..(318): Homolog of NCBI NO: 11133881 NR Description: Oxygen-evolving enhancer protein 1, chloroplast (OEE1) (33 kDa subunit of oxygen evolving system of photosystem (OEC 33 kDa subunit) (33 kDa thylakoid membrane protein) protein
  misc_feature (1)..(318): Homolog of NCBI NO: 15230324 NR Description: photosystem II oxygen-evolving complex 33 protein id: At3g50820.1, supported by cDNA: 95531., supported by
  misc_feature (1)..(318): Homolog of NCBI NO: 131384 NR Description: Oxygen-evolving enhancer protein 1, chloroplast (OEE1) (33 kDa subunit of oxygen evolving system of photosystem (OEC 33 kDa subunit) (33 kDa thylakoid membrane protein)
  misc_feature (1)..(317): Homolog of NCBI NO: 7008029 NR Description: oxygen-evolving enhancer protein 1 precursor
MQPAKIGGRAPFASLPSRPSSQLACRAFGVDAGAARITCSLQDVASRCVDAAKLAGFALATSALLVSGASAEGTPKRLTYDEIQSKTYMEVKGTGTANQCPTIDGGVESFPFKAGKYQMKKLCLEPTSFTVKAEGIAKNAPPEFQKTKLMTRLTYTLDEIEGPLEVGSDGTLKFEEKDGIDYAAVTVQLPGGERVPFLFTVKQLVATGKPESFGGPFLVPSYRGSSFLDPKGRGGSTGYDNAVALPAGGRGDEEELQKENIKNAASSTGNITLSVTKSNPETGEVIGVFESVQPSDTDLGAKAPKDVKIQGVWYAQLE

SEQ ID NO: 10640 - DNA, 1219 bp, Zea mays subsp. mays
  misc_feature (1)..(1219): Ceres Seq. ID no. 12379390
  misc_feature: MA Experiment ID: 108535 Result: Down-regulated in Transcription
  misc_feature: MA Experiment 108535 PARAMETER Experiment Name: Zm_Meristem_P Parameter: Age (day) Value: 8
  misc_feature: MA Experiment 108535 PARAMETER Experiment Name: Zm_Meristem_P Parameter: Organism Value: Zea mays
  misc_feature: MA Experiment 108535 PARAMETER Experiment Name: Zm_Meristem_P Parameter: Plant Line Value: 35A19
  misc_feature: MA Experiment 108535 PARAMETER Experiment Name: Zm_Meristem_P Parameter: Tissue Value: Root Meristem vs. Above Root Meristem
agcaccacctccaaatcttctcgggcctgcctctgcctctgcctcctgaggtgctgaacgacagctctgctacttctgatctgcatgatggccgggaaagcagcatgccggagtcatggagccagctgcttcttgggggattagtcggagatcacgagagatacaacgctgccacagctttactgtcaaaaggattagaggagcgacctgcagcttacaattgctatgaccctggacatggtggtggtgaggagatccagacatcggggaccaacattaggtctcatcaggtgagccaggcgctcttagcgtcgtcctctcctaggtcctgcatcaccacaagcctcggcagcaacatgctggacttctcaaacaccaccgtgccgccggcaccggatctgaagaatcatcactccgataactcttctgagggtaacagcgctggaagtggttcggctccaaagaaggctagggttcagacctcttcttcagcacagtctaccctaaaggtaagaaaggagaggcttggggatagaatcactgcacttcaccagatagtgtccccatttggcaaggagactattggctacattagattcctcctgagtcaaatcgaggctctcagcttcccttacttgggccatgacaacggggactccatgcaacaacataatactaataacttgctgctaaaccatagcactagcgatgccatggtacaagttcaaggtcctccgatgaccaatcaggagggggaggtctatggcaatggcattgaggagggcagcaggaaggatttgaggagcagggggctgtgcctggtgccagtgtcgtgcacgtcgcacctcgccgacgacaacggcccctcagacttctgggcggtgtccgcggcgccgtccccgcctcctccgcctccgccattcgccggcatcatctggcgatagagtcgtgtccagaccggcgtcgatccacccatcagtcgcatgcattattcatgcatgcatgacgtaaatatatacatatagtatcatgcatcactataccattggtttttttttaaaaaaaaatgtttggttgcttgccagggttgctagctagctatagctttgtttgaccgatgagctgaggtatccatcgagcatggagctacctgcagcctataccaggctgctgtatactgtacgtatgtagtacaccgtagtatatgtactgtacgttg

SEQ ID NO: 10641 - protein, 313 aa, Zea mays subsp. mays
  peptide (1)..(313): Ceres Seq. ID no. 12379391
  misc_feature (171)..(200): Pfam Name: Helix-loop-helix DNA-binding domain Pfam Description: Helix-loop-helix DNA-binding domain
  misc_feature (84)..(293): Homolog of NCBI NO: 15233452 NR Description: putative protein; protein id: At4g29100.1, by cDNA: gi_19698938 [Arabidopsis thaliana]
  misc_feature (14)..(293): Homolog of NCBI NO: 33111977 NR Description: putative bHLH133 transcription factor
  misc_feature (104)..(293): Homolog of NCBI NO: 11045087 NR Description: putative protein [Brassica napus]
  misc_feature (111)..(212): Homolog of NCBI NO: 15217667 NR Description: hypothetical protein; protein id: At1g27660.1
  misc_feature (257)..(303): Homolog of NCBI NO: 15217667 NR Description: hypothetical protein; protein id: At1g27660.1
  misc_feature (118)..(205): Homolog of NCBI NO: 25403326 NR Description: protein T22C5.11 [imported] - Arabidopsis >gi|6693018|gb|AAF24944.1|AC012375_7 T22C5.11 [Arabidopsis
  misc_feature (257)..(303): Homolog of NCBI NO: 25403326 NR Description: protein T22C5.11 [imported] - Arabidopsis >gi|6693018|gb|AAF24944.1|AC012375_7 T22C5.11 [Arabidopsis
  misc_feature (155)..(212): Homolog of NCBI NO: 32562998 NR Description: bHLH transcription factor [Arabidopsis thaliana]
  misc_feature (259)..(299): Homolog of NCBI NO: 32562998 NR Description: bHLH transcription factor [Arabidopsis thaliana]
  misc_feature (140)..(227): Homolog of NCBI NO: 15232315 NR Description: hypothetical protein; protein id: At3g20640.1 thaliana] >gi|26451163|dbj|BAC42685.1| putative bHLH
HHLQIFSGLPLPLPPEVLNDSSATSDLHDGRESSMPESWSQLLLGGLVGDHERYNAATALLSKGLEERPAAYNCYDPGHGGGEEIQTSGTNIRSHQVSQALLASSSPRSCITTSLGSNMLDFSNTTVPPAPDLKNHHSDNSSEGNSAGSGSAPKKARVQTSSSAQSTLKVRKERLGDRITALHQIVSPFGKETIGYIRFLLSQIEALSFPYLGHDNGDSMQQHNTNNLLLNHSTSDAMVQVQGPPMTNQEGEVYGNGIEEGSRKDLRSRGLCLVPVSCTSHLADDNGPSDFWAVSAAPSPPPPPPPFAGIIWR

SEQ ID NO: 10642 - protein, 279 aa, Zea mays subsp. mays
  peptide (1)..(279): Ceres Seq. ID no. 12379392
  misc_feature (137)..(166): Pfam Name: Helix-loop-helix DNA-binding domain Pfam Description: Helix-loop-helix DNA-binding domain
  misc_feature (50)..(259): Homolog of NCBI NO: 15233452 NR Description: putative protein; protein id: At4g29100.1, by cDNA: gi_19698938 [Arabidopsis thaliana]
  misc_feature (1)..(259): Homolog of NCBI NO: 33111977 NR Description: putative bHLH133 transcription factor
  misc_feature (70)..(259): Homolog of NCBI NO: 11045087 NR Description: putative protein [Brassica napus]
  misc_feature (77)..(178): Homolog of NCBI NO: 15217667 NR Description: hypothetical protein; protein id: At1g27660.1
  misc_feature (223)..(269): Homolog of NCBI NO: 15217667 NR Description: hypothetical protein; protein id: At1g27660.1
  misc_feature (84)..(171): Homolog of NCBI NO: 25403326 NR Description: protein T22C5.11 [imported] - Arabidopsis >gi|6693018|gb|AAF24944.1|AC012375_7 T22C5.11 [Arabidopsis
  misc_feature (223)..(269): Homolog of NCBI NO: 25403326 NR Description: protein T22C5.11 [imported] - Arabidopsis >gi|6693018|gb|AAF24944.1|AC012375_7 T22C5.11 [Arabidopsis
  misc_feature (121)..(178): Homolog of NCBI NO: 32562998 NR Description: bHLH transcription factor [Arabidopsis thaliana]
  misc_feature (225)..(265): Homolog of NCBI NO: 32562998 NR Description: bHLH transcription factor [Arabidopsis thaliana]
  misc_feature (106)..(193): Homolog of NCBI NO: 15232315 NR Description: hypothetical protein; protein id: At3g20640.1 thaliana] >gi|26451163|dbj|BAC42685.1| putative bHLH
MPESWSQLLLGGLVGDHERYNAATALLSKGLEERPAAYNCYDPGHGGGEEIQTSGTNIRSHQVSQALLASSSPRSCITTSLGSNMLDFSNTTVPPAPDLKNHHSDNSSEGNSAGSGSAPKKARVQTSSSAQSTLKVRKERLGDRITALHQIVSPFGKETIGYIRFLLSQIEALSFPYLGHDNGDSMQQHNTNNLLLNHSTSDAMVQVQGPPMTNQEGEVYGNGIEEGSRKDLRSRGLCLVPVSCTSHLADDNGPSDFWAVSAAPSPPPPPPPFAGIIWR

SEQ ID NO: 10643 - protein, 195 aa, Zea mays subsp. mays
  peptide (1)..(195): Ceres Seq. ID no. 12379393
  misc_feature (53)..(82): Pfam Name: Helix-loop-helix DNA-binding domain Pfam Description: Helix-loop-helix DNA-binding domain
  misc_feature (1)..(175): Homolog of NCBI NO: 15233452 NR Description: putative protein; protein id: At4g29100.1, by cDNA: gi_19698938 [Arabidopsis thaliana]
  misc_feature (1)..(175): Homolog of NCBI NO: 33111977 NR Description: putative bHLH133 transcription factor
  misc_feature (1)..(175): Homolog of NCBI NO: 11045087 NR Description: putative protein [Brassica napus]
  misc_feature (1)..(94): Homolog of NCBI NO: 15217667 NR Description: hypothetical protein; protein id: At1g27660.1
  misc_feature (139)..(185): Homolog of NCBI NO: 15217667 NR Description: hypothetical protein; protein id: At1g27660.1
  misc_feature (1)..(87): Homolog of NCBI NO: 25403326 NR Description: protein T22C5.11 [imported] - Arabidopsis >gi|6693018|gb|AAF24944.1|AC012375_7 T22C5.11 [Arabidopsis
  misc_feature (139)..(185): Homolog of NCBI NO: 25403326 NR Description: protein T22C5.11 [imported] - Arabidopsis >gi|6693018|gb|AAF24944.1|AC012375_7 T22C5.11 [Arabidopsis
  misc_feature (37)..(94): Homolog of NCBI NO: 32562998 NR Description: bHLH transcription factor [Arabidopsis thaliana]
  misc_feature (141)..(181): Homolog of NCBI NO: 32562998 NR Description: bHLH transcription factor [Arabidopsis thaliana]
  misc_feature (22)..(109): Homolog of NCBI NO: 15232315 NR Description: hypothetical protein; protein id: At3g20640.1 thaliana] >gi|26451163|dbj|BAC42685.1| putative bHLH
MLDFSNTTVPPAPDLKNHHSDNSSEGNSAGSGSAPKKARVQTSSSAQSTLKVRKERLGDRITALHQIVSPFGKETIGYIRFLLSQIEALSFPYLGHDNGDSMQQHNTNNLLLNHSTSDAMVQVQGPPMTNQEGEVYGNGIEEGSRKDLRSRGLCLVPVSCTSHLADDNGPSDFWAVSAAPSPPPPPPPFAGIIWR

SEQ ID NO: 10644 - DNA, 915 bp, Zea mays subsp. mays
  misc_feature (1)..(915): Ceres Seq. ID no. 12374370
  misc_feature: MA Experiment ID: 108528 Result: Down-regulated in Transcription
  misc_feature: MA Experiment 108528 PARAMETER Experiment Name: Zm_Imbibed_Seeds_P Parameter: Age (day) Value: 5 vs. 2
  misc_feature: MA Experiment 108528 PARAMETER Experiment Name: Zm_Imbibed_Seeds_P Parameter: Organism Value: Zea mays
  misc_feature: MA Experiment 108528 PARAMETER Experiment Name: Zm_Imbibed_Seeds_P Parameter: Plant Line Value: 35A19
  misc_feature: MA Experiment 108528 PARAMETER Experiment Name: Zm_Imbibed_Seeds_P Parameter: Tissue Value: Aerial vs. Embryo
  misc_feature: MA Experiment ID: 108530 Result: Down-regulated in Transcription
  misc_feature: MA Experiment 108530 PARAMETER Experiment Name: Zm_Imbibed_Seeds_P Parameter: Age (day) Value: 6 vs. 2
  misc_feature: MA Experiment 108530 PARAMETER Experiment Name: Zm_Imbibed_Seeds_P Parameter: Organism Value: Zea mays
  misc_feature: MA Experiment 108530 PARAMETER Experiment Name: Zm_Imbibed_Seeds_P Parameter: Plant Line Value: 35A19
  misc_feature: MA Experiment 108530 PARAMETER Experiment Name: Zm_Imbibed_Seeds_P Parameter: Tissue Value: Aerial vs. Embryo
  misc_feature: MA Experiment ID: 108535 Result: Up-regulated in Transcription
  misc_feature: MA Experiment 108535 PARAMETER Experiment Name: Zm_Meristem_P Parameter: Age (day) Value: 8
  misc_feature: MA Experiment 108535 PARAMETER Experiment Name: Zm_Meristem_P Parameter: Organism Value: Zea mays
  misc_feature: MA Experiment 108535 PARAMETER Experiment Name: Zm_Meristem_P Parameter: Plant Line Value: 35A19
  misc_feature: MA Experiment 108535 PARAMETER Experiment Name: Zm_Meristem_P Parameter: Tissue Value: Root Meristem vs. Above Root Meristem
  misc_feature: MA Experiment ID: 108536 Result: Up-regulated in Transcription
  misc_feature: MA Experiment 108536 PARAMETER Experiment Name: Zm_Meristem_P Parameter: Age (day) Value: 8
  misc_feature: MA Experiment 108536 PARAMETER Experiment Name: Zm_Meristem_P Parameter: Organism Value: Zea mays
  misc_feature: MA Experiment 108536 PARAMETER Experiment Name: Zm_Meristem_P Parameter: Plant Line Value: 35A19
  misc_feature: MA Experiment 108536 PARAMETER Experiment Name: Zm_Meristem_P Parameter: Tissue Value: Shoot Meristem vs. Above Shoot Meristem
  misc_feature: MA Experiment ID: 108544 Result: Down-regulated in Transcription
  misc_feature: MA Experiment ID: 108545 Result: Down-regulated in Transcription
  misc_feature: MA Experiment 108545 PARAMETER Experiment Name: Zm_Imbibed_Seeds_P Parameter: Age (day) Value: 3 vs. 2
  misc_feature: MA Experiment 108545 PARAMETER Experiment Name: Zm_Imbibed_Seeds_P Parameter: Organism Value: Zea mays
  misc_feature: MA Experiment 108545 PARAMETER Experiment Name: Zm_Imbibed_Seeds_P Parameter: Plant Line Value: 35A19
  misc_feature: MA Experiment 108545 PARAMETER Experiment Name: Zm_Imbibed_Seeds_P Parameter: Tissue Value: Aerial vs. Embryo
  misc_feature: MA Experiment ID: 108547 Result: Down-regulated in Transcription
  misc_feature: MA Experiment 108547 PARAMETER Experiment Name: Zm_Imbibed_Seeds_P Parameter: Age (day) Value: 4 vs. 2
  misc_feature: MA Experiment 108547 PARAMETER Experiment Name: Zm_Imbibed_Seeds_P Parameter: Organism Value: Zea mays
  misc_feature: MA Experiment 108547 PARAMETER Experiment Name: Zm_Imbibed_Seeds_P Parameter: Plant Line Value: 35A19
  misc_feature: MA Experiment 108547 PARAMETER Experiment Name: Zm_Imbibed_Seeds_P Parameter: Tissue Value: Aerial vs. Embryo
  misc_feature: MA Experiment ID: 108689 Result: Down-regulated in Transcription
  misc_feature: MA Experiment 108689 PARAMETER Experiment Name: Zm_Drought_Roots_P Parameter: Age (day) Value: 9
  misc_feature: MA Experiment 108689 PARAMETER Experiment Name: Zm_Drought_Roots_P Parameter: Organism Value: Zea mays
  misc_feature: MA Experiment 108689 PARAMETER Experiment Name: Zm_Drought_Roots_P Parameter: Plant Line Value: 35A19
  misc_feature: MA Experiment 108689 PARAMETER Experiment Name: Zm_Drought_Roots_P Parameter: Timepoint (hr) Value: 24
  misc_feature: MA Experiment 108689 PARAMETER Experiment Name: Zm_Drought_Roots_P Parameter: Tissue Value: Roots
  misc_feature: MA Experiment 108689 PARAMETER Experiment Name: Zm_Drought_Roots_P Parameter: Treatment Value: Drought vs. No Drought
  misc_feature: MA Experiment ID: 20000108 Result: Up-regulated in Transcription
  misc_feature: MA Experiment 20000108 PARAMETER Experiment Name: Zm_Root-Tips_P Parameter: Age (day) Value: 12
  misc_feature: MA Experiment 20000108 PARAMETER Experiment Name: Zm_Root-Tips_P Parameter: Organism Value: Zea mays
  misc_feature: MA Experiment 20000108 PARAMETER Experiment Name: Zm_Root-Tips_P Parameter: Tissue Value: Root tips vs. Root mid region    35
  misc_feature: MA Experiment 20000108 PARAMETER Experiment Name: Zm_Root-Tips_P Parameter: Tissue Value: Root tips vs. Root mid region   Sequence Listing-Misc Features (4)
  misc_feature: MA Experiment ID: 20000533 Result: Up-regulated in Transcription
  misc_feature: MA Experiment 20000533 PARAMETER Experiment Name: Zm_0.001percent_MeJA_P Parameter: Age (day) Value: 11
  misc_feature: MA Experiment 20000533 PARAMETER Experiment Name: Zm_0.001percent_MeJA_P Parameter: Organism Value: Zea mays
  misc_feature: MA Experiment 20000533 PARAMETER Experiment Name: Zm_0.001percent_MeJA_P Parameter: Plant Line Value: 35A19
  misc_feature: MA Experiment 20000533 PARAMETER Experiment Name: Zm_0.001percent_MeJA_P Parameter: Timepoint (hr) Value: 72
  misc_feature: MA Experiment 20000533 PARAMETER Experiment Name: Zm_0.001percent_MeJA_P Parameter: Tissue Value: Aerial
  misc_feature: MA Experiment 20000533 PARAMETER Experiment Name: Zm_0.001percent_MeJA_P Parameter: Treatment Value: 0.001percent MeJA vs. No Treatment
  misc_feature: MA Experiment ID: 20000535 Result: Up-regulated in Transcription
  misc_feature: MA Experiment 20000535 PARAMETER Experiment Name: Zm_Hybrid_Seed_Dev_P Parameter: DAP Value: 30 vs. 12
  misc_feature: MA Experiment 20000535 PARAMETER Experiment Name: Zm_Hybrid_Seed_Dev_P Parameter: Organism Value: Zea mays
  misc_feature: MA Experiment 20000535 PARAMETER Experiment Name: Zm_Hybrid_Seed_Dev_P Parameter: Plant Line Value: 35A19
  misc_feature: MA Experiment 20000535 PARAMETER Experiment Name: Zm_Hybrid_Seed_Dev_P Parameter: Tissue Value: Embryo vs. Unfert Floret
acaccacactcccgaaacgccgaaaccccaccccgcaccactcatggacgccgccggcgcgcgtccatcggcaccgtcggccgctgctgccgcagtcgccggggcctccgtcgcggacgagccccgggacgcgcgggtggtgcgggagctcctgcgctcgatgggtctcggtgagggcgagtacgaaccccgcgtcgtgcaccagttcctggacctggcctaccgatacgtcggagacgtgctaggggacgcccaagtctacgccgaccacgccgggaaggctcagatcgacgccgacgacgtccgcctcgccatccaggccaaggtcaatttctccttctcccagccgccgccgcgtgaggttctccttgagctggcccgcagccgaaacagaatgccgctgcccaaatcaattgctcctcctggctcaattcccctcccgcctgagcaggacacactgttggcccagaactaccaactcctgcctccgttgaagccgccacctcaatatgaggaaaacgaggatgagaatgaagaatccaacccaagtctgacaccgaacccggcaaattctaatccaaccttctcgcaggatcagcggagtaacgagcaacagcacactccccagcatggccagagggtttcatttcaactcaatgctgtggcagctgctgctgcaaagcgacctcggatgaccgtcgaccagctgaacatcggctaaccagttatcgttggttagactgtagtatcattttcccccatcttttagtgtggtgaatcatgtttcgaagagatttagtgttgtagtggtatgtagccagggcttgcatgcatatgtgtccaagttcgactttgggttgcttgtacttctccatttcataactgaaatcatatttcagatttgagttaaaaggt

SEQ ID NO: 10645 - protein, 239 aa, Zea mays subsp. mays
  peptide (1)..(239): Ceres Seq. ID no. 12374371
  misc_feature (32)..(161): Pfam Name: Transcription initiation factor IID, 31kD subunit Pfam Description: Transcription initiation factor IID, 31kD
  misc_feature (121)..(239): Homolog of NCBI NO: 30017563 NR Description: putative transcription initiation factor [Oryza
  misc_feature (15)..(120): Homolog of NCBI NO: 30017563 NR Description: putative transcription initiation factor [Oryza
  misc_feature (32)..(219): Homolog of NCBI NO: 15221048 NR Description: transcriptional activation factor TAFII32, protein id: At1g54140.1, supported by cDNA: 39230., supported by gi_7638156 [Arabidopsis thaliana] >gi|25405699|pir||E96582
  misc_feature (16)..(198): Homolog of NCBI NO: 24059851 NR Description: transcriptional activation factor TAFII32-like
  misc_feature (35)..(239): Homolog of NCBI NO: 18079237 NR Description: TAF9 RNA polymerase II, TATA box binding protein
  misc_feature (35)..(239): Homolog of NCBI NO: 28175808 NR Description: Similar to TAF9 RNA polymerase II, TATA box
  misc_feature (35)..(227): Homolog of NCBI NO: 33086648 NR Description: Cb1-739 [Rattus norvegicus]
  misc_feature (35)..(227): Homolog of NCBI NO: 4507351 NR Description: TBP-associated factor 9; TAF9 RNA polymerase II,
  misc_feature (35)..(227): Homolog of NCBI NO: 13097291 NR Description: TATA box binding protein (TBP)-associated factor,
  misc_feature (35)..(227): Homolog of NCBI NO: 34576553 NR Description: TAF9 RNA polymerase II, TATA box binding protein associated factor [Rattus norvegicus] >gi|34068042|gb|AAQ56726.1|
HHTPETPKPHPAPLMDAAGARPSAPSAAAAAVAGASVADEPRDARVVRELLRSMGLGEGEYEPRVVHQFLDLAYRYVGDVLGDAQVYADHAGKAQIDADDVRLAIQAKVNFSFSQPPPREVLLELARSRNRMPLPKSIAPPGSIPLPPEQDTLLAQNYQLLPPLKPPPQYEENEDENEESNPSLTPNPANSNPTFSQDQRSNEQQHTPQHGQRVSFQLNAVAAAAAKRPRMTVDQLNIG

SEQ ID NO: 10646 - protein, 225 aa, Zea mays subsp. mays
  peptide (1)..(225): Ceres Seq. ID no. 12374372
  misc_feature (18)..(147): Pfam Name: Transcription initiation factor IID, 31kD subunit Pfam Description: Transcription initiation factor IID, 31kD
  misc_feature (107)..(225): Homolog of NCBI NO: 30017563 NR Description: putative transcription initiation factor [Oryza
  misc_feature (1)..(106): Homolog of NCBI NO: 30017563 NR Description: putative transcription initiation factor [Oryza
  misc_feature (18)..(205): Homolog of NCBI NO: 15221048 NR Description: transcriptional activation factor TAFII32, protein id: At1g54140.1, supported by cDNA: 39230., supported by gi_7638156 [Arabidopsis thaliana] >gi|25405699|pir||E96582
  misc_feature (2)..(184): Homolog of NCBI NO: 24059851 NR Description: transcriptional activation factor TAFII32-like
  misc_feature (21)..(225): Homolog of NCBI NO: 18079237 NR Description: TAF9 RNA polymerase II, TATA box binding protein
  misc_feature (21)..(225): Homolog of NCBI NO: 28175808 NR Description: Similar to TAF9 RNA polymerase II, TATA box
  misc_feature (21)..(213): Homolog of NCBI NO: 33086648 NR Description: Cb1-739 [Rattus norvegicus]
  misc_feature (21)..(213): Homolog of NCBI NO: 4507351 NR Description: TBP-associated factor 9; TAF9 RNA polymerase II,
  misc_feature (21)..(213): Homolog of NCBI NO: 13097291 NR Description: TATA box binding protein (TBP)-associated factor,
  misc_feature (21)..(213): Homolog of NCBI NO: 34576553 NR Description: TAF9 RNA polymerase II, TATA box binding protein associated factor [Rattus norvegicus] >gi|34068042|gb|AAQ56726.1|
MDAAGARPSAPSAAAAAVAGASVADEPRDARVVRELLRSMGLGEGEYEPRVVHQFLDLAYRYVGDVLGDAQVYADHAGKAQIDADDVRLAIQAKVNFSFSQPPPREVLLELARSRNRMPLPKSIAPPGSIPLPPEQDTLLAQNYQLLPPLKPPPQYEENEDENEESNPSLTPNPANSNPTFSQDQRSNEQQHTPQHGQRVSFQLNAVAAAAAKRPRMTVDQLNIG

SEQ ID NO: 10647 - protein, 186 aa, Zea mays subsp. mays
  peptide (1)..(186): Ceres Seq. ID no. 12374373
  misc_feature (1)..(108): Pfam Name: Transcription initiation factor IID, 31kD subunit Pfam Description: Transcription initiation factor IID, 31kD
  misc_feature (68)..(186): Homolog of NCBI NO: 30017563 NR Description: putative transcription initiation factor [Oryza
  misc_feature (1)..(67): Homolog of NCBI NO: 30017563 NR Description: putative transcription initiation factor [Oryza
  misc_feature (1)..(166): Homolog of NCBI NO: 15221048 NR Description: transcriptional activation factor TAFII32, protein id: At1g54140.1, supported by cDNA: 39230., supported by gi_7638156 [Arabidopsis thaliana] >gi|25405699|pir||E96582
  misc_feature (1)..(145): Homolog of NCBI NO: 24059851 NR Description: transcriptional activation factor TAFII32-like
  misc_feature (1)..(186): Homolog of NCBI NO: 18079237 NR Description: TAF9 RNA polymerase II, TATA box binding protein
  misc_feature (1)..(186): Homolog of NCBI NO: 28175808 NR Description: Similar to TAF9 RNA polymerase II, TATA box
  misc_feature (1)..(174): Homolog of NCBI NO: 33086648 NR Description: Cb1-739 [Rattus norvegicus]
  misc_feature (1)..(174): Homolog of NCBI NO: 4507351 NR Description: TBP-associated factor 9; TAF9 RNA polymerase II,
  misc_feature (1)..(174): Homolog of NCBI NO: 13097291 NR Description: TATA box binding protein (TBP)-associated factor,
  misc_feature (1)..(174): Homolog of NCBI NO: 34576553 NR Description: TAF9 RNA polymerase II, TATA box binding protein associated factor [Rattus norvegicus] >gi|34068042|gb|AAQ56726.1|
MGLGEGEYEPRVVHQFLDLAYRYVGDVLGDAQVYADHAGKAQIDADDVRLAIQAKVNFSFSQPPPREVLLELARSRNRMPLPKSIAPPGSIPLPPEQDTLLAQNYQLLPPLKPPPQYEENEDENEESNPSLTPNPANSNPTFSQDQRSNEQQHTPQHGQRVSFQLNAVAAAAAKRPRMTVDQLNIG

SEQ ID NO: 10648 - DNA, 1701 bp, Zea mays subsp. mays
  misc_feature (1)..(1701): Ceres Seq. ID no. 12379394
  misc_feature: MA Experiment ID: 108522 Result: Up-regulated in Transcription
  misc_feature: MA Experiment 108522 PARAMETER Experiment Name: Zm_42deg_Heat_P Parameter: Age (day) Value: 8
  misc_feature: MA Experiment 108522 PARAMETER Experiment Name: Zm_42deg_Heat_P Parameter: Organism Value: Zea mays
  misc_feature: MA Experiment 108522 PARAMETER Experiment Name: Zm_42deg_Heat_P Parameter: Plant Line Value: 35A19
  misc_feature: MA Experiment 108522 PARAMETER Experiment Name: Zm_42deg_Heat_P Parameter: Temperature (deg C) Value: 42 vs. 22
  misc_feature: MA Experiment 108522 PARAMETER Experiment Name: Zm_42deg_Heat_P Parameter: Timepoint (hr) Value: 1
  misc_feature: MA Experiment 108522 PARAMETER Experiment Name: Zm_42deg_Heat_P Parameter: Tissue Value: Aerial
  misc_feature: MA Experiment ID: 108523 Result: Up-regulated in Transcription
  misc_feature: MA Experiment 108523 PARAMETER Experiment Name: Zm_42deg_Heat_P Parameter: Age (day) Value: 8
  misc_feature: MA Experiment 108523 PARAMETER Experiment Name: Zm_42deg_Heat_P Parameter: Organism Value: Zea mays
  misc_feature: MA Experiment 108523 PARAMETER Experiment Name: Zm_42deg_Heat_P Parameter: Plant Line Value: 35A19
  misc_feature: MA Experiment 108523 PARAMETER Experiment Name: Zm_42deg_Heat_P Parameter: Temperature (deg C) Value: 42 vs. 22
  misc_feature: MA Experiment 108523 PARAMETER Experiment Name: Zm_42deg_Heat_P Parameter: Timepoint (hr) Value: 6
  misc_feature: MA Experiment 108523 PARAMETER Experiment Name: Zm_42deg_Heat_P Parameter: Tissue Value: Aerial
  misc_feature: MA Experiment ID: 108535 Result: Down-regulated in Transcription
  misc_feature: MA Experiment 108535 PARAMETER Experiment Name: Zm_Meristem_P Parameter: Age (day) Value: 8
  misc_feature: MA Experiment 108535 PARAMETER Experiment Name: Zm_Meristem_P Parameter: Organism Value: Zea mays
  misc_feature: MA Experiment 108535 PARAMETER Experiment Name: Zm_Meristem_P Parameter: Plant Line Value: 35A19
  misc_feature: MA Experiment 108535 PARAMETER Experiment Name: Zm_Meristem_P Parameter: Tissue Value: Root Meristem vs. Above Root Meristem
  misc_feature: MA Experiment ID: 108536 Result: Down-regulated in Transcription
  misc_feature: MA Experiment 108536 PARAMETER Experiment Name: Zm_Meristem_P Parameter: Age (day) Value: 8
  misc_feature: MA Experiment 108536 PARAMETER Experiment Name: Zm_Meristem_P Parameter: Organism Value: Zea mays
  misc_feature: MA Experiment 108536 PARAMETER Experiment Name: Zm_Meristem_P Parameter: Plant Line Value: 35A19
  misc_feature: MA Experiment 108536 PARAMETER Experiment Name: Zm_Meristem_P Parameter: Tissue Value: Shoot Meristem vs. Above Shoot Meristem
  misc_feature: MA Experiment ID: 20000477 Result: Up-regulated in Transcription
  misc_feature: MA Experiment 20000477 PARAMETER Experiment Name: Zm_5mM_SA_P Parameter: Age (day) Value: 10
  misc_feature: MA Experiment 20000477 PARAMETER Experiment Name: Zm_5mM_SA_P Parameter: Organism Value: Zea mays
  misc_feature: MA Experiment 20000477 PARAMETER Experiment Name: Zm_5mM_SA_P Parameter: Plant Line Value: 35A19
  misc_feature: MA Experiment 20000477 PARAMETER Experiment Name: Zm_5mM_SA_P Parameter: Timepoint (hr) Value: 48
  misc_feature: MA Experiment 20000477 PARAMETER Experiment Name: Zm_5mM_SA_P Parameter: Tissue Value: Aerial
  misc_feature: MA Experiment 20000477 PARAMETER Experiment Name: Zm_5mM_SA_P Parameter: Treatment Value: 5mM SA vs. No Treatment
  misc_feature: MA Experiment ID: 20000492 Result: Down-regulated in Transcription
  misc_feature: MA Experiment 20000492 PARAMETER Experiment Name: Zm_Hybrid_Seed_Dev_P Parameter: DAP Value: 12
  misc_feature: MA Experiment 20000492 PARAMETER Experiment Name: Zm_Hybrid_Seed_Dev_P Parameter: Organism Value: Zea mays
  misc_feature: MA Experiment 20000492 PARAMETER Experiment Name: Zm_Hybrid_Seed_Dev_P Parameter: Plant Line Value: 35A19
  misc_feature: MA Experiment 20000492 PARAMETER Experiment Name: Zm_Hybrid_Seed_Dev_P Parameter: Tissue Value: Fert Kernel vs. Unfert Floret
  misc_feature: MA Experiment ID: 20000535 Result: Down-regulated in Transcription
  misc_feature: MA Experiment 20000535 PARAMETER Experiment Name: Zm_Hybrid_Seed_Dev_P Parameter: DAP Value: 30 vs. 12
  misc_feature: MA Experiment 20000535 PARAMETER Experiment Name: Zm_Hybrid_Seed_Dev_P Parameter: Organism Value: Zea mays
  misc_feature: MA Experiment 20000535 PARAMETER Experiment Name: Zm_Hybrid_Seed_Dev_P Parameter: Plant Line Value: 35A19
  misc_feature: MA Experiment 20000535 PARAMETER Experiment Name: Zm_Hybrid_Seed_Dev_P Parameter: Tissue Value: Embryo vs. Unfert Floret
aactcgtggaacctacagggctttaacttctcccaacttcctcaaacaaatcctagcatcttcctaccccgtcccgatccatccatggcagcccctaccgtcgtcttactgcccgtgtggggtgctggccacctcatgtccatgctcgacgccggcaagcggctgctcacccgcgggggtcgcgcgctctcgctcaccgtgctcgtcatgcgagcgcccacggagcagctcgcggccgatctcgacgcccacatacgcagggaggaggcatcgggcctcgacgtccgcttcgtccgcctccccgccgttcagcccccgacgcacttccacggcatcgaggagttcatctccaggctggtacagctgcacgcgccccacgtcagggcggctatctccagcctggcttccccggtggcagcggtcgttatggacttcttctgcacggcgctgctcgacgtgacccgcgagctcgccgtgcccgcgtacgtctacttcactgccagcgccgggatgctcgcgttcttcctccgcctcccgtcgctccacgaggaggtgacggtccagttcgaggagatggagggcgcggtggatgtgcccgggctgccgcccgtgccgccgtcttccctgccggtgccagtgatggacaagaaccacccgaattacacgtggttcatgtaccacggcaggcgcttcgccgaggccgacggcatcatcgtcaacacggctgccgagctcgagcagagcgtgcttgctgccatcgccgacgggcggtgcacgccgggtgtccgtgccccgacggtctatccaattggcccggttatctcgttcagcccccccgcccactaacacagaacatccgcacgagtgcgtgcggtggctcgacacgcagcccgcggcctccgtggtgctcctctgcttcgggagccaagggttctccgcggcgccacaggcgcacgagatcgcgcacggcctggagcgtagcggccaccgcttcctctgggtgctgcgcggcccaccggcacccggcgagcggcacccgtcggacgcgaacctctccgagctgctccccgatggattcctcgaaaggaccaagggcagaggcctggtgtggccgacgaaggcgccgcagaaagagatactagcccacgccgccgttggtggtttcgtgacacacggcggctggaactcggtgctcgagagcctgtggttcggggtgccgatggcaccgtggccgctgtacgccgagcagcacctgaacgcgttcacgctggtggcctatgtaggcgtcgccgtggcgatgaaggtggacaggaagaggaacaatttcgtggaggcctcggagctggagcgagcggtgaaggagctgatgggcggtggcgaggaagggaggaaggcgagggagaaggccatggagatgagggatgcctgcaggaacgccgtggaggagggtggctcatcctactcttcactacgaaggctatcagagaagatatgtaaagtcgacaagaacctatgagtctgacgatgagaggcaattttacatcacattctttattgctgtaaactagcagtaagagaggatgtgattgattaaggttgagaataaattcttatcattgaatataaattagatgaatgatatattttatctaaaaataaagtaaaaatcaaacacctataatttggcaatttctattatat

SEQ ID NO: 10649 - protein, 281 aa, Zea mays subsp. mays
  peptide (1)..(281): Ceres Seq. ID no. 12379395
  misc_feature (34)..(274): Pfam Name: UDP-glucoronosyl and UDP-glucosyl transferase Pfam Description: UDP-glucoronosyl and UDP-glucosyl transferase
  misc_feature (29)..(280): Homolog of NCBI NO: 34394683 NR Description: putative flavonol 3-O-glucosyltransferase [Oryza
  misc_feature (29)..(279): Homolog of NCBI NO: 34394651 NR Description: putative glucosyltransferase [Oryza sativa
  misc_feature (31)..(275): Homolog of NCBI NO: 34394680 NR Description: putative glucosyltransferase [Oryza sativa
  misc_feature (29)..(279): Homolog of NCBI NO: 34394653 NR Description: putative glucosyltransferase-3 [Oryza sativa
  misc_feature (28)..(274): Homolog of NCBI NO: 34394676 NR Description: putative glucosyltransferase [Oryza sativa
  misc_feature (30)..(274): Homolog of NCBI NO: 22535568 NR Description: putative glucosyltransferase [Oryza sativa
  misc_feature (209)..(280): Homolog of NCBI NO: 19911213 NR Description: glucosyltransferase like protein [Vigna angularis]
  misc_feature (115)..(157): Homolog of NCBI NO: 19911213 NR Description: glucosyltransferase like protein [Vigna angularis]
  misc_feature (29)..(275): Homolog of NCBI NO: 14349251 NR Description: glucosyltransferase [Nicotiana tabacum]
  misc_feature (29)..(281): Homolog of NCBI NO: 34898742 NR Description: putative betanidin 6-O-glucosyltransferase [Oryza
NSWNLQGFNFSQLPQTNPSIFLPRPDPSMAAPTVVLLPVWGAGHLMSMLDAGKRLLTRGGRALSLTVLVMRAPTEQLAADLDAHIRREEASGLDVRFVRLPAVQPPTHFHGIEEFISRLVQLHAPHVRAAISSLASPVAAVVMDFFCTALLDVTRELAVPAYVYFTASAGMLAFFLRLPSLHEEVTVQFEEMEGAVDVPGLPPVPPSSLPVPVMDKNHPNYTWFMYHGRRFAEADGIIVNTAAELEQSVLAAIADGRCTPGVRAPTVYPIGPVISFSPPAH

SEQ ID NO: 10650 - protein, 253 aa, Zea mays subsp. mays
  peptide (1)..(253): Ceres Seq. ID no. 12379396
  misc_feature (6)..(246): Pfam Name: UDP-glucoronosyl and UDP-glucosyl transferase Pfam Description: UDP-glucoronosyl and UDP-glucosyl transferase
  misc_feature (1)..(252): Homolog of NCBI NO: 34394683 NR Description: putative flavonol 3-O-glucosyltransferase [Oryza
  misc_feature (1)..(251): Homolog of NCBI NO: 34394651 NR Description: putative glucosyltransferase [Oryza sativa
  misc_feature (3)..(247): Homolog of NCBI NO: 34394680 NR Description: putative glucosyltransferase [Oryza sativa
  misc_feature (1)..(251): Homolog of NCBI NO: 34394653 NR Description: putative glucosyltransferase-3 [Oryza sativa
  misc_feature (1)..(246): Homolog of NCBI NO: 34394676 NR Description: putative glucosyltransferase [Oryza sativa
  misc_feature (2)..(246): Homolog of NCBI NO: 22535568 NR Description: putative glucosyltransferase [Oryza sativa
  misc_feature (181)..(252): Homolog of NCBI NO: 19911213 NR Description: glucosyltransferase like protein [Vigna angularis]
  misc_feature (87)..(129): Homolog of NCBI NO: 19911213 NR Description: glucosyltransferase like protein [Vigna angularis]
  misc_feature (1)..(247): Homolog of NCBI NO: 14349251 NR Description: glucosyltransferase [Nicotiana tabacum]
  misc_feature (1)..(253): Homolog of NCBI NO: 34898742 NR Description: putative betanidin 6-O-glucosyltransferase [Oryza
MAAPTVVLLPVWGAGHLMSMLDAGKRLLTRGGRALSLTVLVMRAPTEQLAADLDAHIRREEASGLDVRFVRLPAVQPPTHFHGIEEFISRLVQLHAPHVRAAISSLASPVAAVVMDFFCTALLDVTRELAVPAYVYFTASAGMLAFFLRLPSLHEEVTVQFEEMEGAVDVPGLPPVPPSSLPVPVMDKNHPNYTWFMYHGRRFAEADGIIVNTAAELEQSVLAAIADGRCTPGVRAPTVYPIGPVISFSPPAH

SEQ ID NO: 10651 - protein, 236 aa, Zea mays subsp. mays
  peptide (1)..(236): Ceres Seq. ID no. 12379397
  misc_feature (1)..(229): Pfam Name: UDP-glucoronosyl and UDP-glucosyl transferase Pfam Description: UDP-glucoronosyl and UDP-glucosyl transferase
  misc_feature (1)..(235): Homolog of NCBI NO: 34394683 NR Description: putative flavonol 3-O-glucosyltransferase [Oryza
  misc_feature (1)..(234): Homolog of NCBI NO: 34394651 NR Description: putative glucosyltransferase [Oryza sativa
  misc_feature (1)..(230): Homolog of NCBI NO: 34394680 NR Description: putative glucosyltransferase [Oryza sativa
  misc_feature (1)..(234): Homolog of NCBI NO: 34394653 NR Description: putative glucosyltransferase-3 [Oryza sativa
  misc_feature (1)..(229): Homolog of NCBI NO: 34394676 NR Description: putative glucosyltransferase [Oryza sativa
  misc_feature (1)..(229): Homolog of NCBI NO: 22535568 NR Description: putative glucosyltransferase [Oryza sativa
  misc_feature (164)..(235): Homolog of NCBI NO: 19911213 NR Description: glucosyltransferase like protein [Vigna angularis]
  misc_feature (70)..(112): Homolog of NCBI NO: 19911213 NR Description: glucosyltransferase like protein [Vigna angularis]
  misc_feature (1)..(230): Homolog of NCBI NO: 14349251 NR Description: glucosyltransferase [Nicotiana tabacum]
  misc_feature (1)..(236): Homolog of NCBI NO: 34898742 NR Description: putative betanidin 6-O-glucosyltransferase [Oryza
MSMLDAGKRLLTRGGRALSLTVLVMRAPTEQLAADLDAHIRREEASGLDVRFVRLPAVQPPTHFHGIEEFISRLVQLHAPHVRAAISSLASPVAAVVMDFFCTALLDVTRELAVPAYVYFTASAGMLAFFLRLPSLHEEVTVQFEEMEGAVDVPGLPPVPPSSLPVPVMDKNHPNYTWFMYHGRRFAEADGIIVNTAAELEQSVLAAIADGRCTPGVRAPTVYPIGPVISFSPPAH

SEQ ID NO: 10652 - DNA, 1417 bp, Zea mays subsp. mays
  misc_feature (1)..(1417): Ceres Seq. ID no. 12364906
  misc_feature: MA Experiment ID: 108527 Result: Down-regulated in Transcription
  misc_feature: MA Experiment 108527 PARAMETER Experiment Name: Zm_5mM_NO_P Parameter: Age (day) Value: 8
  misc_feature: MA Experiment 108527 PARAMETER Experiment Name: Zm_5mM_NO_P Parameter: Organism Value: Zea mays
  misc_feature: MA Experiment 108527 PARAMETER Experiment Name: Zm_5mM_NO_P Parameter: Plant Line Value: 35A19
  misc_feature: MA Experiment 108527 PARAMETER Experiment Name: Zm_5mM_NO_P Parameter: Timepoint (hr) Value: 6
  misc_feature: MA Experiment 108527 PARAMETER Experiment Name: Zm_5mM_NO_P Parameter: Tissue Value: Aerial
  misc_feature: MA Experiment 108527 PARAMETER Experiment Name: Zm_5mM_NO_P Parameter: Treatment Value: 5mM NO vs. No Treatment
  misc_feature: MA Experiment ID: 108528 Result: Up-regulated in Transcription
  misc_feature: MA Experiment 108528 PARAMETER Experiment Name: Zm_Imbibed_Seeds_P Parameter: Age (day) Value: 5 vs. 2
  misc_feature: MA Experiment 108528 PARAMETER Experiment Name: Zm_Imbibed_Seeds_P Parameter: Organism Value: Zea mays
  misc_feature: MA Experiment 108528 PARAMETER Experiment Name: Zm_Imbibed_Seeds_P Parameter: Plant Line Value: 35A19
  misc_feature: MA Experiment 108528 PARAMETER Experiment Name: Zm_Imbibed_Seeds_P Parameter: Tissue Value: Aerial vs. Embryo
  misc_feature: MA Experiment ID: 108529 Result: Down-regulated in Transcription
  misc_feature: MA Experiment 108529 PARAMETER Experiment Name: Zm_Imbibed_Seeds_P Parameter: Age (day) Value: 5 vs. 2
  misc_feature: MA Experiment 108529 PARAMETER Experiment Name: Zm_Imbibed_Seeds_P Parameter: Organism Value: Zea mays
  misc_feature: MA Experiment 108529 PARAMETER Experiment Name: Zm_Imbibed_Seeds_P Parameter: Plant Line Value: 35A19
  misc_feature: MA Experiment 108529 PARAMETER Experiment Name: Zm_Imbibed_Seeds_P Parameter: Tissue Value: Roots vs. Embryo
  misc_feature: MA Experiment ID: 108530 Result: Up-regulated in Transcription
  misc_feature: MA Experiment 108530 PARAMETER Experiment Name: Zm_Imbibed_Seeds_P Parameter: Age (day) Value: 6 vs. 2
  misc_feature: MA Experiment 108530 PARAMETER Experiment Name: Zm_Imbibed_Seeds_P Parameter: Organism Value: Zea mays
  misc_feature: MA Experiment 108530 PARAMETER Experiment Name: Zm_Imbibed_Seeds_P Parameter: Plant Line Value: 35A19
  misc_feature: MA Experiment 108530 PARAMETER Experiment Name: Zm_Imbibed_Seeds_P Parameter: Tissue Value: Aerial vs. Embryo
  misc_feature: MA Experiment ID: 108535 Result: Down-regulated in Transcription
  misc_feature: MA Experiment 108535 PARAMETER Experiment Name: Zm_Meristem_P Parameter: Age (day) Value: 8
  misc_feature: MA Experiment 108535 PARAMETER Experiment Name: Zm_Meristem_P Parameter: Organism Value: Zea mays
  misc_feature: MA Experiment 108535 PARAMETER Experiment Name: Zm_Meristem_P Parameter: Plant Line Value: 35A19
  misc_feature: MA Experiment 108535 PARAMETER Experiment Name: Zm_Meristem_P Parameter: Tissue Value: Root Meristem vs. Above Root Meristem
  misc_feature: MA Experiment ID: 108536 Result: Down-regulated in Transcription
  misc_feature: MA Experiment 108536 PARAMETER Experiment Name: Zm_Meristem_P Parameter: Age (day) Value: 8
  misc_feature: MA Experiment 108536 PARAMETER Experiment Name: Zm_Meristem_P Parameter: Organism Value: Zea mays
  misc_feature: MA Experiment 108536 PARAMETER Experiment Name: Zm_Meristem_P Parameter: Plant Line Value: 35A19
  misc_feature: MA Experiment 108536 PARAMETER Experiment Name: Zm_Meristem_P Parameter: Tissue Value: Shoot Meristem vs. Above Shoot Meristem
  misc_feature: MA Experiment ID: 108545 Result: Up-regulated in Transcription
  misc_feature: MA Experiment 108545 PARAMETER Experiment Name: Zm_Imbibed_Seeds_P Parameter: Age (day) Value: 3 vs. 2
  misc_feature: MA Experiment 108545 PARAMETER Experiment Name: Zm_Imbibed_Seeds_P Parameter: Organism Value: Zea mays
  misc_feature: MA Experiment 108545 PARAMETER Experiment Name: Zm_Imbibed_Seeds_P Parameter: Plant Line Value: 35A19
  misc_feature: MA Experiment 108545 PARAMETER Experiment Name: Zm_Imbibed_Seeds_P Parameter: Tissue Value: Aerial vs. Embryo
  misc_feature: MA Experiment ID: 108547 Result: Up-regulated in Transcription
  misc_feature: MA Experiment 108547 PARAMETER Experiment Name: Zm_Imbibed_Seeds_P Parameter: Age (day) Value: 4 vs. 2
  misc_feature: MA Experiment 108547 PARAMETER Experiment Name: Zm_Imbibed_Seeds_P Parameter: Organism Value: Zea mays
  misc_feature: MA Experiment 108547 PARAMETER Experiment Name: Zm_Imbibed_Seeds_P Parameter: Plant Line Value: 35A19
  misc_feature: MA Experiment 108547 PARAMETER Experiment Name: Zm_Imbibed_Seeds_P Parameter: Tissue Value: Aerial vs. Embryo
  misc_feature: MA Experiment ID: 108559 Result: Down-regulated in Transcription
  misc_feature: MA Experiment 108559 PARAMETER Experiment Name: Zm_5mM_NO_P Parameter: Age (day) Value: 8
  misc_feature: MA Experiment 108559 PARAMETER Experiment Name: Zm_5mM_NO_P Parameter: Organism Value: Zea mays
  misc_feature: MA Experiment 108559 PARAMETER Experiment Name: Zm_5mM_NO_P Parameter: Plant Line Value: 35A19
  misc_feature: MA Experiment 108559 PARAMETER Experiment Name: Zm_5mM_NO_P Parameter: Timepoint (hr) Value: 12
  misc_feature: MA Experiment 108559 PARAMETER Experiment Name: Zm_5mM_NO_P Parameter: Tissue Value: Aerial
  misc_feature: MA Experiment 108559 PARAMETER Experiment Name: Zm_5mM_NO_P Parameter: Treatment Value: 5mM NO vs. No Treatment
  misc_feature: MA Experiment ID: 108688 Result: Down-regulated in Transcription
  misc_feature: MA Experiment 108688 PARAMETER Experiment Name: Zm_Embryos-Flowers__P Parameter: Tissue Value: Immature Flowers vs. Aerial+
  misc_feature: MA Experiment ID: 20000492 Result: Down-regulated in Transcription
  misc_feature: MA Experiment 20000492 PARAMETER Experiment Name: Zm_Hybrid_Seed_Dev_P Parameter: DAP Value: 12
  misc_feature: MA Experiment 20000492 PARAMETER Experiment Name: Zm_Hybrid_Seed_Dev_P Parameter: Organism Value: Zea mays
  misc_feature: MA Experiment 20000492 PARAMETER Experiment Name: Zm_Hybrid_Seed_Dev_P Parameter: Plant Line Value: 35A19
  misc_feature: MA Experiment 20000492 PARAMETER Experiment Name: Zm_Hybrid_Seed_Dev_P Parameter: Tissue Value: Fert Kernel vs. Unfert Floret
tttttttttctcctccgccttccactcatccttgcccctgcctgccgtcgtgcatcatcatctccggccagggccagggcattcgtctccgcctccggtccggcctcctccactccgcgccccccagacgcgtcgctgcgtagctgctggccgccatggccaccgtcatggccgcggccgtctcgtccttcccgtcctcctcggccgtcgtcgccaaggcgtcgccggcgtccccctgtgccgccccgcacttccgcccgagggccgtgcgggccgctatccgggcgcaggcgtccgccgtcgaggcgcccgccacggccaaggccaagaaggagtccaagaagcaggaggagggcgtcgtcaccaacctatacaagcccaaggagccgtacgtcggcaggtgcctcctcaacaccaagatcaccggcgacgatgcgccgggggagacgtggcacatggtcttcagcaccgaaggcaagatcccgtacagagagggccagtccatcggcgtcatcgccgatggcgtcgacaagaacggcaagccgcacaaggtcaggctctactccatcgccagcagcgcgatcggcgacttcggcgactccaagacagtctcgctgtgtgtcaagaggctcatctacaccaacgatgccggagagatcgtcaaaggagtctgctccaacttcttatgtgatcttcagccaggtgataacgtccagataacaggaccagtcggcaaagaaatgctgatgcccaaagaccccaacgctaccattataatgcttgccaccggtacaggtatcgctccgttccgatcgttcctgtggaagatgttctttgagaagcatgacgactacaagttcaacggtctgggctggctcttcctgggtgttccaacgagcagctcgttgctctacaaggaggagttcgggaagatgaaggagagagcgccggagaacttccgggtcgactacgccgtcagccgggagcagacgaacgcggcgggggagaggatgtacatccagacccgtatggcggagtacaaagaggagctgtgggagctcctgaagaaggacaacacctacgtctacatgtgtgggttgaaaggcatggagaagggtatcgatgacattatggtgtcactggctgaaaaagacggaatcgactggttcgactacaagaagcagctgaagaggggagatcaatggaatgtggaggtctactaaccgctgaattttgcagctgacattttgtgttgtgcgtatctgtaagtgaggccagggtgtactacgtatataatgtagatagtgagtgtgttctgcgtttttttactattgccgtctctgtttatagatttgtataagtactcttaatattatgcctattcgattttttatatgagtaatgtgatcaagtgccc

SEQ ID NO: 10653 - protein, 355 aa, Zea mays subsp. mays
  peptide (1)..(355): Ceres Seq. ID no. 12364907
  misc_feature (203)..(325): Pfam Name: Oxidoreductase NAD-binding domain Pfam Description: Oxidoreductase NAD-binding domain
  misc_feature (1)..(355): Homolog of NCBI NO: 20302473 NR Description: ferredoxin-NADP(H) oxidoreductase [Triticum
  misc_feature (1)..(355): Homolog of NCBI NO: 20302471 NR Description: ferredoxin-NADP(H) oxidoreductase [Triticum
  misc_feature (1)..(355): Homolog of NCBI NO: 729477 NR Description: Ferredoxin--NADP reductase, chloroplast precursor
  misc_feature (1)..(355): Homolog of NCBI NO: 15239282 NR Description: ferredoxin-NADP+ reductase; protein id: supported by cDNA: gi_18175824, supported by cDNA: gi_20465660
  misc_feature (42)..(355): Homolog of NCBI NO: 13096165 NR Description: Chain A, Crystal Structure Of The Complex Between
  misc_feature (1)..(355): Homolog of NCBI NO: 6561891 NR Description: ferredoxin [Zea mays]
  misc_feature (1)..(355): Homolog of NCBI NO: 6561889 NR Description: ferredoxin [Zea mays]
  misc_feature (1)..(355): Homolog of NCBI NO: 6899972 NR Description: chloroplast ferredoxin-NADP+ oxidoreductase
  misc_feature (1)..(355): Homolog of NCBI NO: 729479 NR Description: Ferredoxin--NADP reductase, chloroplast precursor
  misc_feature (44)..(355): Homolog of NCBI NO: 16331051 NR Description: ferredoxin-NADP oxidoreductase [Synechocystis sp.
MATVMAAAVSSFPSSSAVVAKASPASPCAAPHFRPRAVRAAIRAQASAVEAPATAKAKKESKKQEEGVVTNLYKPKEPYVGRCLLNTKITGDDAPGETWHMVFSTEGKIPYREGQSIGVIADGVDKNGKPHKVRLYSIASSAIGDFGDSKTVSLCVKRLIYTNDAGEIVKGVCSNFLCDLQPGDNVQITGPVGKEMLMPKDPNATIIMLATGTGIAPFRSFLWKMFFEKHDDYKFNGLGWLFLGVPTSSSLLYKEEFGKMKERAPENFRVDYAVSREQTNAAGERMYIQTRMAEYKEELWELLKKDNTYVYMCGLKGMEKGIDDIMVSLAEKDGIDWFDYKKQLKRGDQWNVEVY

SEQ ID NO: 10654 - protein, 351 aa, Zea mays subsp. mays
  peptide (1)..(351): Ceres Seq. ID no. 12364908
  misc_feature (199)..(321): Pfam Name: Oxidoreductase NAD-binding domain Pfam Description: Oxidoreductase NAD-binding domain
  misc_feature (1)..(351): Homolog of NCBI NO: 6561889 NR Description: ferredoxin [Zea mays]
  misc_feature (38)..(351): Homolog of NCBI NO: 13096165 NR Description: Chain A, Crystal Structure Of The Complex Between
  misc_feature (1)..(351): Homolog of NCBI NO: 6561891 NR Description: ferredoxin [Zea mays]
  misc_feature (1)..(351): Homolog of NCBI NO: 20302473 NR Description: ferredoxin-NADP(H) oxidoreductase [Triticum
  misc_feature (1)..(351): Homolog of NCBI NO: 20302471 NR Description: ferredoxin-NADP(H) oxidoreductase [Triticum
  misc_feature (1)..(351): Homolog of NCBI NO: 729477 NR Description: Ferredoxin--NADP reductase, chloroplast precursor
  misc_feature (1)..(351): Homolog of NCBI NO: 15239282 NR Description: ferredoxin-NADP+ reductase; protein id: supported by cDNA: gi_18175824, supported by cDNA: gi_20465660
  misc_feature (1)..(351): Homolog of NCBI NO: 6899972 NR Description: chloroplast ferredoxin-NADP+ oxidoreductase
  misc_feature (1)..(351): Homolog of NCBI NO: 729479 NR Description: Ferredoxin--NADP reductase, chloroplast precursor
  misc_feature (40)..(351): Homolog of NCBI NO: 16331051 NR Description: ferredoxin-NADP oxidoreductase [Synechocystis sp.
MAAAVSSFPSSSAVVAKASPASPCAAPHFRPRAVRAAIRAQASAVEAPATAKAKKESKKQEEGVVTNLYKPKEPYVGRCLLNTKITGDDAPGETWHMVFSTEGKIPYREGQSIGVIADGVDKNGKPHKVRLYSIASSAIGDFGDSKTVSLCVKRLIYTNDAGEIVKGVCSNFLCDLQPGDNVQITGPVGKEMLMPKDPNATIIMLATGTGIAPFRSFLWKMFFEKHDDYKFNGLGWLFLGVPTSSSLLYKEEFGKMKERAPENFRVDYAVSREQTNAAGERMYIQTRMAEYKEELWELLKKDNTYVYMCGLKGMEKGIDDIMVSLAEKDGIDWFDYKKQLKRGDQWNVEVY

SEQ ID NO: 10655 - protein, 255 aa, Zea mays subsp. mays
  peptide (1)..(255): Ceres Seq. ID no. 12364909
  misc_feature (103)..(225): Pfam Name: Oxidoreductase NAD-binding domain Pfam Description: Oxidoreductase NAD-binding domain
  misc_feature (1)..(255): Homolog of NCBI NO: 6561889 NR Description: ferredoxin [Zea mays]
  misc_feature (1)..(255): Homolog of NCBI NO: 13096165 NR Description: Chain A, Crystal Structure Of The Complex Between
  misc_feature (1)..(255): Homolog of NCBI NO: 6561891 NR Description: ferredoxin [Zea mays]
  misc_feature (1)..(255): Homolog of NCBI NO: 20302473 NR Description: ferredoxin-NADP(H) oxidoreductase [Triticum
  misc_feature (1)..(255): Homolog of NCBI NO: 20302471 NR Description: ferredoxin-NADP(H) oxidoreductase [Triticum
  misc_feature (1)..(255): Homolog of NCBI NO: 729477 NR Description: Ferredoxin--NADP reductase, chloroplast precursor
  misc_feature (1)..(255): Homolog of NCBI NO: 15239282 NR Description: ferredoxin-NADP+ reductase; protein id: supported by cDNA: gi_18175824, supported by cDNA: gi_20465660
  misc_feature (1)..(255): Homolog of NCBI NO: 6899972 NR Description: chloroplast ferredoxin-NADP+ oxidoreductase
  misc_feature (1)..(255): Homolog of NCBI NO: 729479 NR Description: Ferredoxin--NADP reductase, chloroplast precursor
  misc_feature (1)..(255): Homolog of NCBI NO: 16331051 NR Description: ferredoxin-NADP oxidoreductase [Synechocystis sp.
MVFSTEGKIPYREGQSIGVIADGVDKNGKPHKVRLYSIASSAIGDFGDSKTVSLCVKRLIYTNDAGEIVKGVCSNFLCDLQPGDNVQITGPVGKEMLMPKDPNATIIMLATGTGIAPFRSFLWKMFFEKHDDYKFNGLGWLFLGVPTSSSLLYKEEFGKMKERAPENFRVDYAVSREQTNAAGERMYIQTRMAEYKEELWELLKKDNTYVYMCGLKGMEKGIDDIMVSLAEKDGIDWFDYKKQLKRGDQWNVEVY

SEQ ID NO: 10656 - DNA, 1365 bp, Zea mays subsp. mays
  misc_feature (1)..(1365): Ceres Seq. ID no. 12342083
  misc_feature: MA Experiment ID: 108523 Result: Down-regulated in Transcription
  misc_feature: MA Experiment 108523 PARAMETER Experiment Name: Zm_42deg_Heat_P Parameter: Age (day) Value: 8
  misc_feature: MA Experiment 108523 PARAMETER Experiment Name: Zm_42deg_Heat_P Parameter: Organism Value: Zea mays
  misc_feature: MA Experiment 108523 PARAMETER Experiment Name: Zm_42deg_Heat_P Parameter: Plant Line Value: 35A19
  misc_feature: MA Experiment 108523 PARAMETER Experiment Name: Zm_42deg_Heat_P Parameter: Temperature (deg C) Value: 42 vs. 22
  misc_feature: MA Experiment 108523 PARAMETER Experiment Name: Zm_42deg_Heat_P Parameter: Timepoint (hr) Value: 6
  misc_feature: MA Experiment 108523 PARAMETER Experiment Name: Zm_42deg_Heat_P Parameter: Tissue Value: Aerial
  misc_feature: MA Experiment ID: 108527 Result: Down-regulated in Transcription
  misc_feature: MA Experiment 108527 PARAMETER Experiment Name: Zm_5mM_NO_P Parameter: Age (day) Value: 8
  misc_feature: MA Experiment 108527 PARAMETER Experiment Name: Zm_5mM_NO_P Parameter: Organism Value: Zea mays
  misc_feature: MA Experiment 108527 PARAMETER Experiment Name: Zm_5mM_NO_P Parameter: Plant Line Value: 35A19
  misc_feature: MA Experiment 108527 PARAMETER Experiment Name: Zm_5mM_NO_P Parameter: Timepoint (hr) Value: 6
  misc_feature: MA Experiment 108527 PARAMETER Experiment Name: Zm_5mM_NO_P Parameter: Tissue Value: Aerial
  misc_feature: MA Experiment 108527 PARAMETER Experiment Name: Zm_5mM_NO_P Parameter: Treatment Value: 5mM NO vs. No Treatment
  misc_feature: MA Experiment ID: 20000630 Result: Down-regulated in Transcription
  misc_feature: MA Experiment 20000630 PARAMETER Experiment Name: Zm_Herbicide-Treatments_P Parameter: Timepoint (hr) Value: 4
  misc_feature: MA Experiment 20000630 PARAMETER Experiment Name: Zm_Herbicide-Treatments_P Parameter: Tissue Value: Aerial
  misc_feature: MA Experiment 20000630 PARAMETER Experiment Name: Zm_Herbicide-Treatments_P Parameter: Treatment Value: Roundup vs. No Treatment
agcctcgccgtcgattctctcccctccccttcgtcctcacgagcgacgaacgtcacgaacccctcctccacctcctgctactatcggcgccggagccctcctctggtctcaccgtgcaaatccccaaccccgaggcagacgcaggccagcccctgtgatggcacagaccaacggcaacgaccccttcagtccccctgtttcccaagaaagggttgtgataacaaacaagcatggtgagaggcttgtggggctgctgcatcacaccgcttcaaacaagattgtggtcttgtgccatggttttatagctaccaagaatgacagcctcattcttgacctggcggaagcgttgacaaaggaagggatcagtgtcttccgcttcgatttcagtggaaatggagaaagtgaaggccagtttgagtatggcaactacaggaaggaggctgacgatttgcattctgttgtattgtatctgtgtcaaaaaagttatgacatagcagctgttgttggtcatagcaaaggaggagatgtggtgattctatatgcttctgttcatgatgatgtgggcacaattgttaatttatcgggccggtttgatttaacaaaaggcattgaagaacggataggggaagggtctatcgatagaataaacaaagaaggctaccttgatgtcaaggacaaatctgaaaatgccagctacagggtaaccaaagaaagtttgatggaacggcttaatactgatatgcgcgctgcaagtgtttccataagcaagggatgcaggttcttaacagtccatggctcagctgataagaccatacccgtagaagatgcccatgagtttgcgaagcatatacccaaccatgaactgcgtgtcatagaaggagcaaatcataactacacctcacatcgcaaagaagttgctgatgcagtagtagatttcatcacgtccaatgtaaccgtataataaggctgggggatgaatgtcattccagaccacttggtcatgcacctatcgatcccctccatcatggggcaatactggtactaggtgtctattatcttctgaaccgaaaaccccatgtcatgcaggtttgatatgatgatgttgctcgtatgtgctcttaagaattactgtaaatattgaactcctggtagacttgtatgccgcagctcgcagtttatataggctcatatctctatagttttttttttctttcttctttgttcgagggctctattcccttgctcttttttgcatggttcatgtaagttttcttccttgtaccctatagttatttaatttatttaaatttggcactgtggactattttgtacaagaagtcttagtgcaaacgtacaagcaggccc

SEQ ID NO: 10657 - protein, 319 aa, Zea mays subsp. mays
  peptide (1)..(319): Ceres Seq. ID no. 12342084
  misc_feature (1)..(316): Homolog of NCBI NO: 34913068 NR Description: P0013G02.26 [Oryza sativa (japonica
  misc_feature (9)..(316): Homolog of NCBI NO: 34913064 NR Description: P0013G02.24 [Oryza sativa (japonica
  misc_feature (67)..(316): Homolog of NCBI NO: 21554728 NR Description: putative esterase [Arabidopsis thaliana]
  misc_feature (60)..(313): Homolog of NCBI NO: 15228202 NR Description: putative protein; protein id: At3g47590.1
  misc_feature (67)..(316): Homolog of NCBI NO: 15232826 NR Description: putative protein; protein id: At3g47560.1, by cDNA: 262295. [Arabidopsis thaliana] >gi|11281956|pir||T45716
  misc_feature (67)..(316): Homolog of NCBI NO: 22135864 NR Description: putative protein [Arabidopsis thaliana]
  misc_feature (67)..(313): Homolog of NCBI NO: 15220578 NR Description: hypothetical protein; protein id: At1g29840.1
  misc_feature (66)..(312): Homolog of NCBI NO: 11358640 NR Description: probable esterase-like protein - Arabidopsis
  misc_feature (66)..(312): Homolog of NCBI NO: 18416707 NR Description: putative esterase - like protein; protein id:
  misc_feature (70)..(319): Homolog of NCBI NO: 15224799 NR Description: putative esterase; protein id: At2g19550.1
ASPSILSPPLRPHERRTSRTPPPPPATIGAGALLWSHRANPQPRGRRRPAPVMAQTNGNDPFSPPVSQERVVITNKHGERLVGLLHHTASNKIVVLCHGFIATKNDSLILDLAEALTKEGISVFRFDFSGNGESEGQFEYGNYRKEADDLHSVVLYLCQKSYDIAAVVGHSKGGDVVILYASVHDDVGTIVNLSGRFDLTKGIEERIGEGSIDRINKEGYLDVKDKSENASYRVTKESLMERLNTDMRAASVSISKGCRFLTVHGSADKTIPVEDAHEFAKHIPNHELRVIEGANHNYTSHRKEVADAVVDFITSNVTV

SEQ ID NO: 10658 - protein, 267 aa, Zea mays subsp. mays
  peptide (1)..(267): Ceres Seq. ID no. 12342085
  misc_feature (1)..(264): Homolog of NCBI NO: 34913068 NR Description: P0013G02.26 [Oryza sativa (japonica
  misc_feature (1)..(264): Homolog of NCBI NO: 34913064 NR Description: P0013G02.24 [Oryza sativa (japonica
  misc_feature (15)..(264): Homolog of NCBI NO: 21554728 NR Description: putative esterase [Arabidopsis thaliana]
  misc_feature (8)..(261): Homolog of NCBI NO: 15228202 NR Description: putative protein; protein id: At3g47590.1
  misc_feature (15)..(264): Homolog of NCBI NO: 15232826 NR Description: putative protein; protein id: At3g47560.1, by cDNA: 262295. [Arabidopsis thaliana] >gi|11281956|pir||T45716
  misc_feature (15)..(264): Homolog of NCBI NO: 22135864 NR Description: putative protein [Arabidopsis thaliana]
  misc_feature (15)..(261): Homolog of NCBI NO: 15220578 NR Description: hypothetical protein; protein id: At1g29840.1
  misc_feature (14)..(260): Homolog of NCBI NO: 11358640 NR Description: probable esterase-like protein - Arabidopsis
  misc_feature (14)..(260): Homolog of NCBI NO: 18416707 NR Description: putative esterase - like protein; protein id:
  misc_feature (18)..(267): Homolog of NCBI NO: 15224799 NR Description: putative esterase; protein id: At2g19550.1
MAQTNGNDPFSPPVSQERVVITNKHGERLVGLLHHTASNKIVVLCHGFIATKNDSLILDLAEALTKEGISVFRFDFSGNGESEGQFEYGNYRKEADDLHSVVLYLCQKSYDIAAVVGHSKGGDVVILYASVHDDVGTIVNLSGRFDLTKGIEERIGEGSIDRINKEGYLDVKDKSENASYRVTKESLMERLNTDMRAASVSISKGCRFLTVHGSADKTIPVEDAHEFAKHIPNHELRVIEGANHNYTSHRKEVADAVVDFITSNVTV

SEQ ID NO: 10659 - DNA, 1233 bp, Zea mays subsp. mays
  misc_feature (1)..(1233): Ceres Seq. ID no. 12345079
  misc_feature: MA Experiment ID: 20000478 Result: Down-regulated in Transcription
  misc_feature: MA Experiment 20000478 PARAMETER Experiment Name: Zm_5mM_SA_P Parameter: Age (day) Value: 11
  misc_feature: MA Experiment 20000478 PARAMETER Experiment Name: Zm_5mM_SA_P Parameter: Organism Value: Zea mays
  misc_feature: MA Experiment 20000478 PARAMETER Experiment Name: Zm_5mM_SA_P Parameter: Plant Line Value: 35A19
  misc_feature: MA Experiment 20000478 PARAMETER Experiment Name: Zm_5mM_SA_P Parameter: Timepoint (hr) Value: 72
  misc_feature: MA Experiment 20000478 PARAMETER Experiment Name: Zm_5mM_SA_P Parameter: Tissue Value: Aerial
  misc_feature: MA Experiment 20000478 PARAMETER Experiment Name: Zm_5mM_SA_P Parameter: Treatment Value: 5mM SA vs. No Treatment
cccatttcctcttctccaaaccccactcaccgcaacgagccgccggatccatggccggcaaagacgggtccccgcctcctcccccgctcccatcctaccctgagatgatcgtggaggcaatccgggcgctgggactcgagaacggctgcaacaagactgcgatctcggactacatcaagggcagctacggctccaacctccctgcccagcacaacgccgtcctcacgggtcacctcgcccgcatgaaggctaccggcgagctcgccttcctcaggaacaactatctcctccccaacgaggacgaagcctccccgctgagcaccggtgggcacaagggccccgccgccgccgaggaggagtctactggcgtgttggacgttggtgacgatgtgttgcttgcttcccctctcgtcatcgacgctgacgccgtcgacattgatgtgcctgctccagctcccgttgtcaccgctgatgtcgacgatattgacgtgcctgctccagctcccgttgtcaccgctgatgtcaaccctgttcataccaagcggggacgcggacggcccccgaagcccaaggaccccgttgctgagggctacggtggtaagcccgctacagctcccgtcgccgccgctgccgtgcctgtcaagcgcgggcgcggacgtccgccgaaacccaagaaccccgtcgccgaggactcagctcccactgcggcttccgttgtcaccactgatggcaatgccgtgcctgtgaagcgtgggcgcggacgccccccaaagctcaaggaccccatcaatgtggccactgaccaggccaccagcggcatgctgagcccacgtggccgtgggcgcccgcccaagaaggccaaggtcgccgtggaagatcccagaggtgaacctgctgcagctcgagacgttgttgctgatgccagtgctgtacatgtcaagcgtgggcgtggacggcccccaagatgagtcctgcagctgcagtgactgggaagccgtctgagtcttaaaccatgaacattgaatcctatggtggtaatggtttgggagtagcttggtgtatcaaattgagttctgaactatcttatccagttgggtgcatagcatcggaagactaatctcaataatctggatggtttctgtacattgaatggcggatgatgcgtaatagttgactgctgctgaagacttgacttaatcattgctattttcttctcattgttgcgtgttaatt

SEQ ID NO: 10660 - protein, 321 aa, Zea mays subsp. mays
  peptide (1)..(321): Ceres Seq. ID no. 12345080
  misc_feature (30)..(104): Pfam Name: linker histone H1 and H5 family Pfam Description: linker histone H1 and H5 family
  misc_feature (207)..(319): Homolog of NCBI NO: 20502966 NR Description: HMG-I/Y protein HMGa [Triticum aestivum]
  misc_feature (22)..(113): Homolog of NCBI NO: 20502966 NR Description: HMG-I/Y protein HMGa [Triticum aestivum]
  misc_feature (162)..(258): Homolog of NCBI NO: 20502966 NR Description: HMG-I/Y protein HMGa [Triticum aestivum]
  misc_feature (14)..(232): Homolog of NCBI NO: 7439646 NR Description: DNA binding protein PF1 - rice
  misc_feature (210)..(321): Homolog of NCBI NO: 7439646 NR Description: DNA binding protein PF1 - rice
  misc_feature (21)..(193): Homolog of NCBI NO: 11544762 NR Description: HMGI/Y protein [Zea mays]
  misc_feature (21)..(193): Homolog of NCBI NO: 9837562 NR Description: high mobility group I/Y-2 [Zea mays]
  misc_feature (21)..(193): Homolog of NCBI NO: 4585621 NR Description: HMGI/Y protein [Zea mays]
  misc_feature (29)..(194): Homolog of NCBI NO: 629769 NR Description: histone-like DNA-binding protein PF 1 - oat
  misc_feature (30)..(306): Homolog of NCBI NO: 4218141 NR Description: HMR1 protein [Antirrhinum majus]
HFLFSKPHSPQRAAGSMAGKDGSPPPPPLPSYPEMIVEAIRALGLENGCNKTAISDYIKGSYGSNLPAQHNAVLTGHLARMKATGELAFLRNNYLLPNEDEASPLSTGGHKGPAAAEEESTGVLDVGDDVLLASPLVIDADAVDIDVPAPAPVVTADVDDIDVPAPAPVVTADVNPVHTKRGRGRPPKPKDPVAEGYGGKPATAPVAAAAVPVKRGRGRPPKPKNPVAEDSAPTAASVVTTDGNAVPVKRGRGRPPKLKDPINVATDQATSGMLSPRGRGRPPKKAKVAVEDPRGEPAAARDVVADASAVHVKRGRGRPPR

SEQ ID NO: 10661 - protein, 305 aa, Zea mays subsp. mays
  peptide (1)..(305): Ceres Seq. ID no. 12345081
  misc_feature (14)..(88): Pfam Name: linker histone H1 and H5 family Pfam Description: linker histone H1 and H5 family
  misc_feature (191)..(303): Homolog of NCBI NO: 20502966 NR Description: HMG-I/Y protein HMGa [Triticum aestivum]
  misc_feature (6)..(97): Homolog of NCBI NO: 20502966 NR Description: HMG-I/Y protein HMGa [Triticum aestivum]
  misc_feature (146)..(242): Homolog of NCBI NO: 20502966 NR Description: HMG-I/Y protein HMGa [Triticum aestivum]
  misc_feature (1)..(216): Homolog of NCBI NO: 7439646 NR Description: DNA binding protein PF1 - rice
  misc_feature (194)..(305): Homolog of NCBI NO: 7439646 NR Description: DNA binding protein PF1 - rice
  misc_feature (5)..(177): Homolog of NCBI NO: 11544762 NR Description: HMGI/Y protein [Zea mays]
  misc_feature (5)..(177): Homolog of NCBI NO: 9837562 NR Description: high mobility group I/Y-2 [Zea mays]
  misc_feature (5)..(177): Homolog of NCBI NO: 4585621 NR Description: HMGI/Y protein [Zea mays]
  misc_feature (13)..(178): Homolog of NCBI NO: 629769 NR Description: histone-like DNA-binding protein PF 1 - oat
  misc_feature (14)..(290): Homolog of NCBI NO: 4218141 NR Description: HMR1 protein [Antirrhinum majus]
MAGKDGSPPPPPLPSYPEMIVEAIRALGLENGCNKTAISDYIKGSYGSNLPAQHNAVLTGHLARMKATGELAFLRNNYLLPNEDEASPLSTGGHKGPAAAEEESTGVLDVGDDVLLASPLVIDADAVDIDVPAPAPVVTADVDDIDVPAPAPVVTADVNPVHTKRGRGRPPKPKDPVAEGYGGKPATAPVAAAAVPVKRGRGRPPKPKNPVAEDSAPTAASVVTTDGNAVPVKRGRGRPPKLKDPINVATDQATSGMLSPRGRGRPPKKAKVAVEDPRGEPAAARDVVADASAVHVKRGRGRPPR

SEQ ID NO: 10662 - protein, 287 aa, Zea mays subsp. mays
  peptide (1)..(287): Ceres Seq. ID no. 12345082
  misc_feature (1)..(70): Pfam Name: linker histone H1 and H5 family Pfam Description: linker histone H1 and H5 family
  misc_feature (173)..(285): Homolog of NCBI NO: 20502966 NR Description: HMG-I/Y protein HMGa [Triticum aestivum]
  misc_feature (1)..(79): Homolog of NCBI NO: 20502966 NR Description: HMG-I/Y protein HMGa [Triticum aestivum]
  misc_feature (128)..(224): Homolog of NCBI NO: 20502966 NR Description: HMG-I/Y protein HMGa [Triticum aestivum]
  misc_feature (1)..(198): Homolog of NCBI NO: 7439646 NR Description: DNA binding protein PF1 - rice
  misc_feature (176)..(287): Homolog of NCBI NO: 7439646 NR Description: DNA binding protein PF1 - rice
  misc_feature (1)..(159): Homolog of NCBI NO: 11544762 NR Description: HMGI/Y protein [Zea mays]
  misc_feature (1)..(159): Homolog of NCBI NO: 9837562 NR Description: high mobility group I/Y-2 [Zea mays]
  misc_feature (1)..(159): Homolog of NCBI NO: 4585621 NR Description: HMGI/Y protein [Zea mays]
  misc_feature (1)..(160): Homolog of NCBI NO: 629769 NR Description: histone-like DNA-binding protein PF 1 - oat
  misc_feature (1)..(272): Homolog of NCBI NO: 4218141 NR Description: HMR1 protein [Antirrhinum majus]
MIVEAIRALGLENGCNKTAISDYIKGSYGSNLPAQHNAVLTGHLARMKATGELAFLRNNYLLPNEDEASPLSTGGHKGPAAAEEESTGVLDVGDDVLLASPLVIDADAVDIDVPAPAPVVTADVDDIDVPAPAPVVTADVNPVHTKRGRGRPPKPKDPVAEGYGGKPATAPVAAAAVPVKRGRGRPPKPKNPVAEDSAPTAASVVTTDGNAVPVKRGRGRPPKLKDPINVATDQATSGMLSPRGRGRPPKKAKVAVEDPRGEPAAARDVVADASAVHVKRGRGRPPR

SEQ ID NO: 10663 - DNA, 1849 bp, Zea mays subsp. mays
  misc_feature (1)..(1849): Ceres Seq. ID no. 12351282
  misc_feature: MA Experiment ID: 108522 Result: Down-regulated in Transcription
  misc_feature: MA Experiment 108522 PARAMETER Experiment Name: Zm_42deg_Heat_P Parameter: Age (day) Value: 8
  misc_feature: MA Experiment 108522 PARAMETER Experiment Name: Zm_42deg_Heat_P Parameter: Organism Value: Zea mays
  misc_feature: MA Experiment 108522 PARAMETER Experiment Name: Zm_42deg_Heat_P Parameter: Plant Line Value: 35A19
  misc_feature: MA Experiment 108522 PARAMETER Experiment Name: Zm_42deg_Heat_P Parameter: Temperature (deg C) Value: 42 vs. 22
  misc_feature: MA Experiment 108522 PARAMETER Experiment Name: Zm_42deg_Heat_P Parameter: Timepoint (hr) Value: 1
  misc_feature: MA Experiment 108522 PARAMETER Experiment Name: Zm_42deg_Heat_P Parameter: Tissue Value: Aerial
  misc_feature: MA Experiment ID: 108527 Result: Down-regulated in Transcription
  misc_feature: MA Experiment 108527 PARAMETER Experiment Name: Zm_5mM_NO_P Parameter: Age (day) Value: 8
  misc_feature: MA Experiment 108527 PARAMETER Experiment Name: Zm_5mM_NO_P Parameter: Organism Value: Zea mays
  misc_feature: MA Experiment 108527 PARAMETER Experiment Name: Zm_5mM_NO_P Parameter: Plant Line Value: 35A19
  misc_feature: MA Experiment 108527 PARAMETER Experiment Name: Zm_5mM_NO_P Parameter: Timepoint (hr) Value: 6
  misc_feature: MA Experiment 108527 PARAMETER Experiment Name: Zm_5mM_NO_P Parameter: Tissue Value: Aerial
  misc_feature: MA Experiment 108527 PARAMETER Experiment Name: Zm_5mM_NO_P Parameter: Treatment Value: 5mM NO vs. No Treatment
  misc_feature: MA Experiment ID: 108535 Result: Down-regulated in Transcription
  misc_feature: MA Experiment 108535 PARAMETER Experiment Name: Zm_Meristem_P Parameter: Age (day) Value: 8
  misc_feature: MA Experiment 108535 PARAMETER Experiment Name: Zm_Meristem_P Parameter: Organism Value: Zea mays
  misc_feature: MA Experiment 108535 PARAMETER Experiment Name: Zm_Meristem_P Parameter: Plant Line Value: 35A19
  misc_feature: MA Experiment 108535 PARAMETER Experiment Name: Zm_Meristem_P Parameter: Tissue Value: Root Meristem vs. Above Root Meristem
  misc_feature: MA Experiment ID: 108559 Result: Down-regulated in Transcription
  misc_feature: MA Experiment 108559 PARAMETER Experiment Name: Zm_5mM_NO_P Parameter: Age (day) Value: 8
  misc_feature: MA Experiment 108559 PARAMETER Experiment Name: Zm_5mM_NO_P Parameter: Organism Value: Zea mays
  misc_feature: MA Experiment 108559 PARAMETER Experiment Name: Zm_5mM_NO_P Parameter: Plant Line Value: 35A19
  misc_feature: MA Experiment 108559 PARAMETER Experiment Name: Zm_5mM_NO_P Parameter: Timepoint (hr) Value: 12
  misc_feature: MA Experiment 108559 PARAMETER Experiment Name: Zm_5mM_NO_P Parameter: Tissue Value: Aerial
  misc_feature: MA Experiment 108559 PARAMETER Experiment Name: Zm_5mM_NO_P Parameter: Treatment Value: 5mM NO vs. No Treatment
  misc_feature: MA Experiment ID: 20000488 Result: Down-regulated in Transcription
  misc_feature: MA Experiment 20000488 PARAMETER Experiment Name: Zm_50mM_NH4NO3_L_to_H_P Parameter: Organism Value: Zea mays
  misc_feature: MA Experiment 20000488 PARAMETER Experiment Name: Zm_50mM_NH4NO3_L_to_H_P Parameter: Timepoint (hr) Value: 8
  misc_feature: MA Experiment 20000488 PARAMETER Experiment Name: Zm_50mM_NH4NO3_L_to_H_P Parameter: Tissue Value: Leaves
  misc_feature: MA Experiment 20000488 PARAMETER Experiment Name: Zm_50mM_NH4NO3_L_to_H_P Parameter: Treatment Value: 50mM NH4NO3 vs. 100mM Mannitol
  misc_feature: MA Experiment ID: 20000535 Result: Down-regulated in Transcription
  misc_feature: MA Experiment 20000535 PARAMETER Experiment Name: Zm_Hybrid_Seed_Dev_P Parameter: DAP Value: 30 vs. 12
  misc_feature: MA Experiment 20000535 PARAMETER Experiment Name: Zm_Hybrid_Seed_Dev_P Parameter: Organism Value: Zea mays
  misc_feature: MA Experiment 20000535 PARAMETER Experiment Name: Zm_Hybrid_Seed_Dev_P Parameter: Plant Line Value: 35A19
  misc_feature: MA Experiment 20000535 PARAMETER Experiment Name: Zm_Hybrid_Seed_Dev_P Parameter: Tissue Value: Embryo vs. Unfert Floret
  misc_feature: MA Experiment ID: 20000630 Result: Down-regulated in Transcription
  misc_feature: MA Experiment 20000630 PARAMETER Experiment Name: Zm_Herbicide-Treatments_P Parameter: Timepoint (hr) Value: 4
  misc_feature: MA Experiment 20000630 PARAMETER Experiment Name: Zm_Herbicide-Treatments_P Parameter: Tissue Value: Aerial
  misc_feature: MA Experiment 20000630 PARAMETER Experiment Name: Zm_Herbicide-Treatments_P Parameter: Treatment Value: Roundup vs. No Treatment
  misc_feature: MA Experiment ID: 20001608 Result: Down-regulated in Transcription
  misc_feature: MA Experiment 20001608 PARAMETER Experiment Name: Zm_50ppm_KNO3_L-to-H_P Parameter: Age (day) Value: 21
  misc_feature: MA Experiment 20001608 PARAMETER Experiment Name: Zm_50ppm_KNO3_L-to-H_P Parameter: Organism Value: Zea mays
  misc_feature: MA Experiment 20001608 PARAMETER Experiment Name: Zm_50ppm_KNO3_L-to-H_P Parameter: Plant Line Value: 35A19
  misc_feature: MA Experiment 20001608 PARAMETER Experiment Name: Zm_50ppm_KNO3_L-to-H_P Parameter: Timepoint (hr) Value: 48
  misc_feature: MA Experiment 20001608 PARAMETER Experiment Name: Zm_50ppm_KNO3_L-to-H_P Parameter: Tissue Value: Shoots
  misc_feature: MA Experiment 20001608 PARAMETER Experiment Name: Zm_50ppm_KNO3_L-to-H_P Parameter: Treatment Value: 50ppm KNO3 vs. 50ppm KCl
cccccctcccccacccacccagcgtgcgaggcgatcaaaccgtgtgcgggcatggtggccgcgctgctcctgacctcggcgaccgcgctcctggcgctggcggcggcgtggctctgggactacgtcgtggtgcgcctcctttggcggccccgcgccgtggccggcatgttcagggcgcagggggtccgcgggccgccctacagcttcctcagcggctgcaaccgcgagatgaggaggatgaaggcggaggccgacgacgggctccggctggacgtccgcgaccacaactacctccccagggtgatgccccatttcctcgcctggaagcagctgtacggggagccattcctgtactggatgggtccgcggccccgggtctgcctcttcgactacgagtcggtaaggcaagttcttttcaacaagcccggtcatttcttcaaggacgacgcccacccgactatcctggcaatgatgggcaaagggctggtcctggtggaaggcaccgactgggtgcgccatcggagggtggtcaacccagccttcgccatggacaagctcaagatgatgacggagacgatggtcagctgtgctgagccactgatcaagcggtgggaacagctcgcagcagccagcagatccagcgaggacggtgggaggggagaagtgcaagtggagttcagcaagcagttccaggacctgacggcggacgttatcgcccacaccggtttcggaagcagctacaaggagggcaaagaggtgttccatacgcagaagcagctcctggcgctcgccatggcgactctcctcaacgtgcagctgccaggattcaagtatctccctaccaagaacaacaggctcaagtgggcgctagaaaagaagatgaagacgacgctcacggcgatcatacagtcgcgggtggcatccaatgggaggagtagtggatacggagacgacctgctcggcctgatgctcgaggcctggctcacagcggaacgaggaggaggggaacgggacgagtcgagcctgaccatggacgagatcatagacgagtgcaagacattcttcttcgcaggccacgagaccacgtcccatttgctcacctggacaatgttcttgctcagcgtgtacccggaatggcagcaacggctaagggacgaggtcctgagagagtgcggacaggcaaaccctactgcagacacgcttaacaaattcaatgagatgacgatggtgctcctcgagacactgagactctacggccctgtcatgctcatgctaaggaagcctacctccgacataaggctgggcagcctcagcataccgaaaggcaacgggatcgccatacccgtcccgttcctccaccgagacagagaggtctggggcgacaacgccaatgacttcgatccgttgaggtttcagaacggggtcacgaacgcggccaagaccccgcaggctcttctgtcgttctcgatcgggccgagggcatgcatcggccagaacttcgcgatgctggaagcgaagtcggtgatggccatgatcatgaagaagttctccttcacgctttcctcgagctacgtgcacgcgcctgtggattatatcacgctccagcctaagttcggccttcccatagttttgaggccactcccggatgtatgatgtgaaatggatctgtagcctgatagctgattttttttggggggtctaagtatgcataagaggtcagtattcaggacttggtttcatccgccaaacagtaaggctaaagaaccaaaacttgttgaaaactggtaactttctgggattttatgcccgtattatgtatataaatatataatgctacatagaactttgt

SEQ ID NO: 10664 - protein, 550 aa, Zea mays subsp. mays
  peptide (1)..(550): Ceres Seq. ID no. 12351283
  misc_feature (19)..(547): Homolog of NCBI NO: 34896952 NR Description: putative cytochrome P450-related protein [Oryza
  misc_feature (27)..(547): Homolog of NCBI NO: 34913354 NR Description: putative cytochrome P450 [Oryza sativa (japonica group)] >gi|22293694|dbj|BAC10039.1| putative cytochrome P450
  misc_feature (27)..(547): Homolog of NCBI NO: 38112707 NR Description: cytochrome P450 [Triticum aestivum]
  misc_feature (17)..(547): Homolog of NCBI NO: 22324446 NR Description: putative cytochrome P450 [Oryza sativa (japonica
  misc_feature (27)..(547): Homolog of NCBI NO: 14719280 NR Description: cytochrome P450 [Zea mays]
  misc_feature (29)..(547): Homolog of NCBI NO: 34913346 NR Description: putative cytochrome P450 [Oryza sativa (japonica group)] >gi|22093840|dbj|BAC07127.1| putative cytochrome P450
  misc_feature (248)..(549): Homolog of NCBI NO: 28927679 NR Description: putative cytochrome P450, 5'-partial [Oryza
  misc_feature (80)..(231): Homolog of NCBI NO: 28927679 NR Description: putative cytochrome P450, 5'-partial [Oryza
  misc_feature (61)..(547): Homolog of NCBI NO: 34913350 NR Description: putative cytochrome P450 [Oryza sativa (japonica group)] >gi|22093842|dbj|BAC07129.1| putative cytochrome P450
  misc_feature (29)..(544): Homolog of NCBI NO: 34913362 NR Description: putative cytochrome P450 [Oryza sativa (japonica group)] >gi|22293698|dbj|BAC10043.1| putative cytochrome P450
PPSPTHPACEAIKPCAGMVAALLLTSATALLALAAAWLWDYVVVRLLWRPRAVAGMFRAQGVRGPPYSFLSGCNREMRRMKAEADDGLRLDVRDHNYLPRVMPHFLAWKQLYGEPFLYWMGPRPRVCLFDYESVRQVLFNKPGHFFKDDAHPTILAMMGKGLVLVEGTDWVRHRRVVNPAFAMDKLKMMTETMVSCAEPLIKRWEQLAAASRSSEDGGRGEVQVEFSKQFQDLTADVIAHTGFGSSYKEGKEVFHTQKQLLALAMATLLNVQLPGFKYLPTKNNRLKWALEKKMKTTLTAIIQSRVASNGRSSGYGDDLLGLMLEAWLTAERGGGERDESSLTMDEIIDECKTFFFAGHETTSHLLTWTMFLLSVYPEWQQRLRDEVLRECGQANPTADTLNKFNEMTMVLLETLRLYGPVMLMLRKPTSDIRLGSLSIPKGNGIAIPVPFLHRDREVWGDNANDFDPLRFQNGVTNAAKTPQALLSFSIGPRACIGQNFAMLEAKSVMAMIMKKFSFTLSSSYVHAPVDYITLQPKFGLPIVLRPLPDV

SEQ ID NO: 10665 - protein, 533 aa, Zea mays subsp. mays
  peptide (1)..(533): Ceres Seq. ID no. 12351284
  misc_feature (2)..(530): Homolog of NCBI NO: 34896952 NR Description: putative cytochrome P450-related protein [Oryza
  misc_feature (10)..(530): Homolog of NCBI NO: 34913354 NR Description: putative cytochrome P450 [Oryza sativa (japonica group)] >gi|22293694|dbj|BAC10039.1| putative cytochrome P450
  misc_feature (10)..(530): Homolog of NCBI NO: 38112707 NR Description: cytochrome P450 [Triticum aestivum]
  misc_feature (1)..(530): Homolog of NCBI NO: 22324446 NR Description: putative cytochrome P450 [Oryza sativa (japonica
  misc_feature (10)..(530): Homolog of NCBI NO: 14719280 NR Description: cytochrome P450 [Zea mays]
  misc_feature (12)..(530): Homolog of NCBI NO: 34913346 NR Description: putative cytochrome P450 [Oryza sativa (japonica group)] >gi|22093840|dbj|BAC07127.1| putative cytochrome P450
  misc_feature (231)..(532): Homolog of NCBI NO: 28927679 NR Description: putative cytochrome P450, 5'-partial [Oryza
  misc_feature (63)..(214): Homolog of NCBI NO: 28927679 NR Description: putative cytochrome P450, 5'-partial [Oryza
  misc_feature (44)..(530): Homolog of NCBI NO: 34913350 NR Description: putative cytochrome P450 [Oryza sativa (japonica group)] >gi|22093842|dbj|BAC07129.1| putative cytochrome P450
  misc_feature (12)..(527): Homolog of NCBI NO: 34913362 NR Description: putative cytochrome P450 [Oryza sativa (japonica group)] >gi|22293698|dbj|BAC10043.1| putative cytochrome P450
MVAALLLTSATALLALAAAWLWDYVVVRLLWRPRAVAGMFRAQGVRGPPYSFLSGCNREMRRMKAEADDGLRLDVRDHNYLPRVMPHFLAWKQLYGEPFLYWMGPRPRVCLFDYESVRQVLFNKPGHFFKDDAHPTILAMMGKGLVLVEGTDWVRHRRVVNPAFAMDKLKMMTETMVSCAEPLIKRWEQLAAASRSSEDGGRGEVQVEFSKQFQDLTADVIAHTGFGSSYKEGKEVFHTQKQLLALAMATLLNVQLPGFKYLPTKNNRLKWALEKKMKTTLTAIIQSRVASNGRSSGYGDDLLGLMLEAWLTAERGGGERDESSLTMDEIIDECKTFFFAGHETTSHLLTWTMFLLSVYPEWQQRLRDEVLRECGQANPTADTLNKFNEMTMVLLETLRLYGPVMLMLRKPTSDIRLGSLSIPKGNGIAIPVPFLHRDREVWGDNANDFDPLRFQNGVTNAAKTPQALLSFSIGPRACIGQNFAMLEAKSVMAMIMKKFSFTLSSSYVHAPVDYITLQPKFGLPIVLRPLPDV

SEQ ID NO: 10666 - protein, 495 aa, Zea mays subsp. mays
  peptide (1)..(495): Ceres Seq. ID no. 12351285
  misc_feature (1)..(492): Homolog of NCBI NO: 34896952 NR Description: putative cytochrome P450-related protein [Oryza
  misc_feature (1)..(492): Homolog of NCBI NO: 34913354 NR Description: putative cytochrome P450 [Oryza sativa (japonica group)] >gi|22293694|dbj|BAC10039.1| putative cytochrome P450
  misc_feature (1)..(492): Homolog of NCBI NO: 38112707 NR Description: cytochrome P450 [Triticum aestivum]
  misc_feature (1)..(492): Homolog of NCBI NO: 22324446 NR Description: putative cytochrome P450 [Oryza sativa (japonica
  misc_feature (1)..(492): Homolog of NCBI NO: 14719280 NR Description: cytochrome P450 [Zea mays]
  misc_feature (1)..(492): Homolog of NCBI NO: 34913346 NR Description: putative cytochrome P450 [Oryza sativa (japonica group)] >gi|22093840|dbj|BAC07127.1| putative cytochrome P450
  misc_feature (193)..(494): Homolog of NCBI NO: 28927679 NR Description: putative cytochrome P450, 5'-partial [Oryza
  misc_feature (25)..(176): Homolog of NCBI NO: 28927679 NR Description: putative cytochrome P450, 5'-partial [Oryza
  misc_feature (6)..(492): Homolog of NCBI NO: 34913350 NR Description: putative cytochrome P450 [Oryza sativa (japonica group)] >gi|22093842|dbj|BAC07129.1| putative cytochrome P450
  misc_feature (1)..(489): Homolog of NCBI NO: 34913362 NR Description: putative cytochrome P450 [Oryza sativa (japonica group)] >gi|22293698|dbj|BAC10043.1| putative cytochrome P450
MFRAQGVRGPPYSFLSGCNREMRRMKAEADDGLRLDVRDHNYLPRVMPHFLAWKQLYGEPFLYWMGPRPRVCLFDYESVRQVLFNKPGHFFKDDAHPTILAMMGKGLVLVEGTDWVRHRRVVNPAFAMDKLKMMTETMVSCAEPLIKRWEQLAAASRSSEDGGRGEVQVEFSKQFQDLTADVIAHTGFGSSYKEGKEVFHTQKQLLALAMATLLNVQLPGFKYLPTKNNRLKWALEKKMKTTLTAIIQSRVASNGRSSGYGDDLLGLMLEAWLTAERGGGERDESSLTMDEIIDECKTFFFAGHETTSHLLTWTMFLLSVYPEWQQRLRDEVLRECGQANPTADTLNKFNEMTMVLLETLRLYGPVMLMLRKPTSDIRLGSLSIPKGNGIAIPVPFLHRDREVWGDNANDFDPLRFQNGVTNAAKTPQALLSFSIGPRACIGQNFAMLEAKSVMAMIMKKFSFTLSSSYVHAPVDYITLQPKFGLPIVLRPLPDV

SEQ ID NO: 10667 - DNA, 1739 bp, Zea mays subsp. mays
  misc_feature (1)..(1739): Ceres Seq. ID no. 12347699
  misc_feature: MA Experiment ID: 20000534 Result: Down-regulated in Transcription
  misc_feature: MA Experiment 20000534 PARAMETER Experiment Name: Zm_Hybrid_Pollen_P Parameter: Age (day) Value: 8
  misc_feature: MA Experiment 20000534 PARAMETER Experiment Name: Zm_Hybrid_Pollen_P Parameter: Organism Value: Zea mays
  misc_feature: MA Experiment 20000534 PARAMETER Experiment Name: Zm_Hybrid_Pollen_P Parameter: Plant Line Value: 35A19
  misc_feature: MA Experiment 20000534 PARAMETER Experiment Name: Zm_Hybrid_Pollen_P Parameter: Tissue Value: Pollen vs. Aerial
accctttttcgtctctcctctgcctttccccatcgtctctccgtctacacctcatcataatcacagattcacagagcgctagggaggagagagggctagggtttcgtgctccctcacgcaacgaatccgagccggatcggggggtgcgcggagtcaccggcggcccggcgttgcctgggctgtgatacagttgcaatggcatctgtaactgatgagacagctaagattgagggtttgacatctgctgcagcctttgtggagggtggcattcaggacgcatgtgatgatgcatgcagcatttgccttgaggctttctgtgagagtgacccttctgcattgactggctgcaaacatgagttccatctccaatgcattcttgaatggtgccagagaagttcacagtgcccaatgtgttggcagcctattactatgaaggatcctaccagtcaggagctgcttgaggcagtagagcgtgagaggaatataagaactaatcaaactcggaacacaactatatttcatcatcctgctcttggggattttgagctgcagcatctgcctgttggtaatgatgctgagcttgaagagcgtatactgcagcatctagctgctgctgctgcaatgggaagggcacaccatcttggaagaagggaggggcacaggggacgatctggctctcatggtcgtccacatttcctagttttctctacacaaccaaattcaccttctgctggcacaatctcttcatcttctgctcatatggagggagaaaatgattcaaatcctgccacacctagagctagcgagtcatctccacgagctattcgcattggagaagtgggaaaccaaagtcctgggatgcttacctacgatgctgaacaggatgctgtcgtttcttccggaaatagcactcctgtatcgagtcctaggttttttaacaggagacactccactggacagtcaactccagacagggctgggccatcggatattcagtctttctcagactccctgaagtcccgcttaaatgccgtctctatgaagtacaaagaatctattacaaagagtactcgagggtggaaggagagattgttttcacgtaattcatccgtggcggatcttggttctgaagtgagaagagaagttaatgctggaattgcgtccgtatcacggatgatggagcgtctggaaactagaggaaatagcagaacaagtgatagcccggcagcatccacttctgaagttccctctgctacagaatcaagcaatgaaagggttacagagagcaactctgctgctgctgctgctggtggtggtactacccactacgggtaccagcgctagcaacgcctccgccccttgtgttgcgacatccggttcaaattaggacatgtaagggtctcagaaagaaggcttacacctgcaattcttcatcttcaaaggtttgtgagcctggcggcagagcagaagtgcagtaacatgatgccgtcatttttttctcaaccactgcataaacggctgcaaggggaaaaaaaccaaacggtgatttgatgtattggctcgataaaatggtggtgcgtgtggcctaggagaagtcggatttcatcttctgttttcgtctctttgtaaaaaaaatcgtctgagggcagatgtttaccggtataaataacggatatgtcatcttcatagtacgtggatcagttataaatatgattggaacagcaaagcttgctgctgtt

SEQ ID NO: 10668 - protein, 382 aa, Zea mays subsp. mays
  peptide (1)..(382): Ceres Seq. ID no. 12347700
  misc_feature (33)..(73): Pfam Name: Zinc finger, C3HC4 type (RING finger) Pfam Description: Zinc finger, C3HC4 type (RING finger)
  misc_feature (1)..(376): Homolog of NCBI NO: 32493110 NR Description: putative RING-H2 zinc finger protein [Oryza
  misc_feature (7)..(369): Homolog of NCBI NO: 18420424 NR Description: Expressed protein; protein id: At5g22000.1, by cDNA: gi_11762135, supported by cDNA: gi_18491184, supported
  misc_feature (7)..(364): Homolog of NCBI NO: 26451710 NR Description: putative RING-H2 finger protein RHF2a
  misc_feature (8)..(369): Homolog of NCBI NO: 30688252 NR Description: zinc finger (C3HC4-type RING finger) protein
  misc_feature (6)..(257): Homolog of NCBI NO: 27819501 NR Description: putative zinc finger protein [Oryza sativa
  misc_feature (1)..(114): Homolog of NCBI NO: 32400766 NR Description: RING-H2 finger protein [Triticum aestivum]
  misc_feature (15)..(207): Homolog of NCBI NO: 25360953 NR Description: RING-H2 finger protein RHF1a [imported] -
  misc_feature (15)..(207): Homolog of NCBI NO: 30682750 NR Description: zinc finger (C3HC4-type RING finger) protein
  misc_feature (219)..(375): Homolog of NCBI NO: 25360953 NR Description: RING-H2 finger protein RHF1a [imported] -
  misc_feature (219)..(375): Homolog of NCBI NO: 30682750 NR Description: zinc finger (C3HC4-type RING finger) protein
MASVTDETAKIEGLTSAAAFVEGGIQDACDDACSICLEAFCESDPSALTGCKHEFHLQCILEWCQRSSQCPMCWQPITMKDPTSQELLEAVERERNIRTNQTRNTTIFHHPALGDFELQHLPVGNDAELEERILQHLAAAAAMGRAHHLGRREGHRGRSGSHGRPHFLVFSTQPNSPSAGTISSSSAHMEGENDSNPATPRASESSPRAIRIGEVGNQSPGMLTYDAEQDAVVSSGNSTPVSSPRFFNRRHSTGQSTPDRAGPSDIQSFSDSLKSRLNAVSMKYKESITKSTRGWKERLFSRNSSVADLGSEVRREVNAGIASVSRMMERLETRGNSRTSDSPAASTSEVPSATESSNERVTESNSAAAAAGGGTTHYGYQR

SEQ ID NO: 10669 - protein, 311 aa, Zea mays subsp. mays
  peptide (1)..(311): Ceres Seq. ID no. 12347701
  misc_feature (1)..(305): Homolog of NCBI NO: 32493110 NR Description: putative RING-H2 zinc finger protein [Oryza
  misc_feature (1)..(298): Homolog of NCBI NO: 18420424 NR Description: Expressed protein; protein id: At5g22000.1, by cDNA: gi_11762135, supported by cDNA: gi_18491184, supported
  misc_feature (1)..(293): Homolog of NCBI NO: 26451710 NR Description: putative RING-H2 finger protein RHF2a
  misc_feature (1)..(298): Homolog of NCBI NO: 30688252 NR Description: zinc finger (C3HC4-type RING finger) protein
  misc_feature (1)..(186): Homolog of NCBI NO: 27819501 NR Description: putative zinc finger protein [Oryza sativa
  misc_feature (1)..(43): Homolog of NCBI NO: 32400766 NR Description: RING-H2 finger protein [Triticum aestivum]
  misc_feature (1)..(136): Homolog of NCBI NO: 25360953 NR Description: RING-H2 finger protein RHF1a [imported] -
  misc_feature (1)..(136): Homolog of NCBI NO: 30682750 NR Description: zinc finger (C3HC4-type RING finger) protein
  misc_feature (148)..(304): Homolog of NCBI NO: 25360953 NR Description: RING-H2 finger protein RHF1a [imported] -
  misc_feature (148)..(304): Homolog of NCBI NO: 30682750 NR Description: zinc finger (C3HC4-type RING finger) protein
MCWQPITMKDPTSQELLEAVERERNIRTNQTRNTTIFHHPALGDFELQHLPVGNDAELEERILQHLAAAAAMGRAHHLGRREGHRGRSGSHGRPHFLVFSTQPNSPSAGTISSSSAHMEGENDSNPATPRASESSPRAIRIGEVGNQSPGMLTYDAEQDAVVSSGNSTPVSSPRFFNRRHSTGQSTPDRAGPSDIQSFSDSLKSRLNAVSMKYKESITKSTRGWKERLFSRNSSVADLGSEVRREVNAGIASVSRMMERLETRGNSRTSDSPAASTSEVPSATESSNERVTESNSAAAAAGGGTTHYGYQR

SEQ ID NO: 10670 - protein, 304 aa, Zea mays subsp. mays
  peptide (1)..(304): Ceres Seq. ID no. 12347702
  misc_feature (141)..(297): Homolog of NCBI NO: 30682750 NR Description: zinc finger (C3HC4-type RING finger) protein
  misc_feature (1)..(298): Homolog of NCBI NO: 32493110 NR Description: putative RING-H2 zinc finger protein [Oryza
  misc_feature (1)..(291): Homolog of NCBI NO: 18420424 NR Description: Expressed protein; protein id: At5g22000.1, by cDNA: gi_11762135, supported by cDNA: gi_18491184, supported
  misc_feature (1)..(286): Homolog of NCBI NO: 26451710 NR Description: putative RING-H2 finger protein RHF2a
  misc_feature (1)..(291): Homolog of NCBI NO: 30688252 NR Description: zinc finger (C3HC4-type RING finger) protein
  misc_feature (1)..(179): Homolog of NCBI NO: 27819501 NR Description: putative zinc finger protein [Oryza sativa
  misc_feature (1)..(36): Homolog of NCBI NO: 32400766 NR Description: RING-H2 finger protein [Triticum aestivum]
  misc_feature (1)..(129): Homolog of NCBI NO: 25360953 NR Description: RING-H2 finger protein RHF1a [imported] -
  misc_feature (1)..(129): Homolog of NCBI NO: 30682750 NR Description: zinc finger (C3HC4-type RING finger) protein
  misc_feature (141)..(297): Homolog of NCBI NO: 25360953 NR Description: RING-H2 finger protein RHF1a [imported] -
MKDPTSQELLEAVERERNIRTNQTRNTTIFHHPALGDFELQHLPVGNDAELEERILQHLAAAAAMGRAHHLGRREGHRGRSGSHGRPHFLVFSTQPNSPSAGTISSSSAHMEGENDSNPATPRASESSPRAIRIGEVGNQSPGMLTYDAEQDAVVSSGNSTPVSSPRFFNRRHSTGQSTPDRAGPSDIQSFSDSLKSRLNAVSMKYKESITKSTRGWKERLFSRNSSVADLGSEVRREVNAGIASVSRMMERLETRGNSRTSDSPAASTSEVPSATESSNERVTESNSAAAAAGGGTTHYGYQR

SEQ ID NO: 10671 - DNA, 1358 bp, Zea mays subsp. mays
  misc_feature (1)..(1358): Ceres Seq. ID no. 13493529
  misc_feature: MA Experiment ID: 108528 Result: Up-regulated in Transcription
  misc_feature: MA Experiment 108528 PARAMETER Experiment Name: Zm_Imbibed_Seeds_P Parameter: Age (day) Value: 5 vs. 2
  misc_feature: MA Experiment 108528 PARAMETER Experiment Name: Zm_Imbibed_Seeds_P Parameter: Organism Value: Zea mays
  misc_feature: MA Experiment 108528 PARAMETER Experiment Name: Zm_Imbibed_Seeds_P Parameter: Plant Line Value: 35A19
  misc_feature: MA Experiment 108528 PARAMETER Experiment Name: Zm_Imbibed_Seeds_P Parameter: Tissue Value: Aerial vs. Embryo
  misc_feature: MA Experiment ID: 108530 Result: Up-regulated in Transcription
  misc_feature: MA Experiment 108530 PARAMETER Experiment Name: Zm_Imbibed_Seeds_P Parameter: Age (day) Value: 6 vs. 2
  misc_feature: MA Experiment 108530 PARAMETER Experiment Name: Zm_Imbibed_Seeds_P Parameter: Organism Value: Zea mays
  misc_feature: MA Experiment 108530 PARAMETER Experiment Name: Zm_Imbibed_Seeds_P Parameter: Plant Line Value: 35A19
  misc_feature: MA Experiment 108530 PARAMETER Experiment Name: Zm_Imbibed_Seeds_P Parameter: Tissue Value: Aerial vs. Embryo
  misc_feature: MA Experiment ID: 108535 Result: Down-regulated in Transcription
  misc_feature: MA Experiment 108535 PARAMETER Experiment Name: Zm_Meristem_P Parameter: Age (day) Value: 8
  misc_feature: MA Experiment 108535 PARAMETER Experiment Name: Zm_Meristem_P Parameter: Organism Value: Zea mays
  misc_feature: MA Experiment 108535 PARAMETER Experiment Name: Zm_Meristem_P Parameter: Plant Line Value: 35A19
  misc_feature: MA Experiment 108535 PARAMETER Experiment Name: Zm_Meristem_P Parameter: Tissue Value: Root Meristem vs. Above Root Meristem
  misc_feature: MA Experiment ID: 108547 Result: Up-regulated in Transcription
  misc_feature: MA Experiment 108547 PARAMETER Experiment Name: Zm_Imbibed_Seeds_P Parameter: Age (day) Value: 4 vs. 2
  misc_feature: MA Experiment 108547 PARAMETER Experiment Name: Zm_Imbibed_Seeds_P Parameter: Organism Value: Zea mays
  misc_feature: MA Experiment 108547 PARAMETER Experiment Name: Zm_Imbibed_Seeds_P Parameter: Plant Line Value: 35A19
  misc_feature: MA Experiment 108547 PARAMETER Experiment Name: Zm_Imbibed_Seeds_P Parameter: Tissue Value: Aerial vs. Embryo
  misc_feature: MA Experiment ID: 20000108 Result: Down-regulated in Transcription
  misc_feature: MA Experiment 20000108 PARAMETER Experiment Name: Zm_Root-Tips_P Parameter: Age (day) Value: 12
  misc_feature: MA Experiment 20000108 PARAMETER Experiment Name: Zm_Root-Tips_P Parameter: Organism Value: Zea mays
  misc_feature: MA Experiment 20000108 PARAMETER Experiment Name: Zm_Root-Tips_P Parameter: Tissue Value: Root tips vs. Root mid region    35
  misc_feature: MA Experiment 20000108 PARAMETER Experiment Name: Zm_Root-Tips_P Parameter: Tissue Value: Root tips vs. Root mid region   Sequence Listing-Misc Features (4)
aaaccaacccacgccatcatcatccgtcaatccatccatccatccgcttgtccctaccacctccaccaaccaaaacccccaaccgccgaggtcaccggcgactccgtcctcgccgcgccgcgccgtgaggatgtcgttccactaccacgaccacgggctgtccatggacgccgcggcagcggcggccgccgccgcgtcgtcgccgaaccctagcggcttctcccccggcatcggcggggaaagggagaaggcggccatcgcggcgcacccgctgtacgagcgcctcctggaggcgcacgtcgcctgcctacgcgtcgccacccccgtcgaccagctcccccgcatcgacgcgcagatcgccgcgcgccccccgccgctcgccgcggccgccggggccgcggccgcgggaggcccgtccggcggggaggagctcgacctcttcatgacgcactatgtattgctcctttgctcattcaaggagcagttgcagcagcatgtacgtgttcatgcaatggaagcagtgatgggttgctgggagcttgaacaatctttacaaagcctaacaggggcatctccgggtgaaggcactggaggaaccatgtctgacgatgaagataaccaggtggatagtgaagccaacatgttcgatggaaatgatggatcagacggtatgggctttggccccctaatactgacagagggtgaacggtccttagttgagcgtgtacggaaggagctgaagaacgagcttaagcagggttacaaggaaaagcttgtcgatatcagggaagagatcatgcgcaaacgcagggctgggaaacttcctggagataccgcatctgtactgaaagcttggtggcaagctcattcgaagtggccgtacccaactgaagacgacaaggccagactggtgcaggaaacggggttgcagctaaagcagatcaacaactggttcattaaccaacgcaaacggaactggcacagcaacccaacatcctcggctgaaaagaccaagaagaaaaggtgatgatggcccagagcaatcttggcaaaaagctagacatgtccactatactttattatggcgaagtacattctccctcacttcgtaggcaagagggaaaggtatcttgggtgacttgagtggccacctaatgcgcaagtttgaccacgtgtggggctggggttgggtagtgacctcagcagtatagcattcgctaacgtgatgtgggaatcacgtgttgcagtagaaccggcgagcgggaggggggtaatttatgttgtattgtaattactatatatgaaagacggacacaaacgtcgctcctcgtacgtccacgtcgtcacttttttcagcg

SEQ ID NO: 10672 - protein, 341 aa, Zea mays subsp. mays
  peptide (1)..(341): Ceres Seq. ID no. 13493530
  misc_feature (134)..(189): Pfam Name: KNOX2 domain Pfam Description: KNOX2 domain
  misc_feature (44)..(341): Homolog of NCBI NO: 14149139 NR Description: KNOX family class 2 homeodomain protein [Oryza
  misc_feature (46)..(341): Homolog of NCBI NO: 33333542 NR Description: knotted 7 [Hordeum vulgare]
  misc_feature (52)..(341): Homolog of NCBI NO: 7446253 NR Description: probable homeobox protein OSH45, splice form OSH44
  misc_feature (52)..(340): Homolog of NCBI NO: 7446252 NR Description: probable homeobox protein OSH45, splice form OSH45
  misc_feature (81)..(340): Homolog of NCBI NO: 15238743 NR Description: KNAT3 homeodomain protein [Arabidopsis thaliana]
  misc_feature (81)..(340): Homolog of NCBI NO: 21539535 NR Description: KNAT3 homeodomain protein [Arabidopsis thaliana]
  misc_feature (81)..(340): Homolog of NCBI NO: 21554222 NR Description: KNAT3 homeodomain protein [Arabidopsis thaliana]
  misc_feature (53)..(341): Homolog of NCBI NO: 3023961 NR Description: Homeobox protein knotted-1 like 3 (KNAP3)
  misc_feature (81)..(341): Homolog of NCBI NO: 20141566 NR Description: Homeobox protein knotted-1 like 4 (KNAT4)
  misc_feature (81)..(341): Homolog of NCBI NO: 1045044 NR Description: KNAT4 homeobox protein [Arabidopsis thaliana]
NQPTPSSSVNPSIHPLVPTTSTNQNPQPPRSPATPSSPRRAVRMSFHYHDHGLSMDAAAAAAAAASSPNPSGFSPGIGGEREKAAIAAHPLYERLLEAHVACLRVATPVDQLPRIDAQIAARPPPLAAAAGAAAAGGPSGGEELDLFMTHYVLLLCSFKEQLQQHVRVHAMEAVMGCWELEQSLQSLTGASPGEGTGGTMSDDEDNQVDSEANMFDGNDGSDGMGFGPLILTEGERSLVERVRKELKNELKQGYKEKLVDIREEIMRKRRAGKLPGDTASVLKAWWQAHSKWPYPTEDDKARLVQETGLQLKQINNWFINQRKRNWHSNPTSSAEKTKKKR

SEQ ID NO: 10673 - protein, 298 aa, Zea mays subsp. mays
  peptide (1)..(298): Ceres Seq. ID no. 13493531
  misc_feature (91)..(146): Pfam Name: KNOX2 domain Pfam Description: KNOX2 domain
  misc_feature (1)..(298): Homolog of NCBI NO: 14149139 NR Description: KNOX family class 2 homeodomain protein [Oryza
  misc_feature (3)..(298): Homolog of NCBI NO: 33333542 NR Description: knotted 7 [Hordeum vulgare]
  misc_feature (9)..(298): Homolog of NCBI NO: 7446253 NR Description: probable homeobox protein OSH45, splice form OSH44
  misc_feature (9)..(297): Homolog of NCBI NO: 7446252 NR Description: probable homeobox protein OSH45, splice form OSH45
  misc_feature (38)..(297): Homolog of NCBI NO: 15238743 NR Description: KNAT3 homeodomain protein [Arabidopsis thaliana]
  misc_feature (38)..(297): Homolog of NCBI NO: 21539535 NR Description: KNAT3 homeodomain protein [Arabidopsis thaliana]
  misc_feature (38)..(297): Homolog of NCBI NO: 21554222 NR Description: KNAT3 homeodomain protein [Arabidopsis thaliana]
  misc_feature (10)..(298): Homolog of NCBI NO: 3023961 NR Description: Homeobox protein knotted-1 like 3 (KNAP3)
  misc_feature (38)..(298): Homolog of NCBI NO: 20141566 NR Description: Homeobox protein knotted-1 like 4 (KNAT4)
  misc_feature (38)..(298): Homolog of NCBI NO: 1045044 NR Description: KNAT4 homeobox protein [Arabidopsis thaliana]
MSFHYHDHGLSMDAAAAAAAAASSPNPSGFSPGIGGEREKAAIAAHPLYERLLEAHVACLRVATPVDQLPRIDAQIAARPPPLAAAAGAAAAGGPSGGEELDLFMTHYVLLLCSFKEQLQQHVRVHAMEAVMGCWELEQSLQSLTGASPGEGTGGTMSDDEDNQVDSEANMFDGNDGSDGMGFGPLILTEGERSLVERVRKELKNELKQGYKEKLVDIREEIMRKRRAGKLPGDTASVLKAWWQAHSKWPYPTEDDKARLVQETGLQLKQINNWFINQRKRNWHSNPTSSAEKTKKKR

SEQ ID NO: 10674 - protein, 287 aa, Zea mays subsp. mays
  peptide (1)..(287): Ceres Seq. ID no. 13493532
  misc_feature (80)..(135): Pfam Name: KNOX2 domain Pfam Description: KNOX2 domain
  misc_feature (1)..(287): Homolog of NCBI NO: 14149139 NR Description: KNOX family class 2 homeodomain protein [Oryza
  misc_feature (1)..(287): Homolog of NCBI NO: 33333542 NR Description: knotted 7 [Hordeum vulgare]
  misc_feature (1)..(287): Homolog of NCBI NO: 7446253 NR Description: probable homeobox protein OSH45, splice form OSH44
  misc_feature (1)..(286): Homolog of NCBI NO: 7446252 NR Description: probable homeobox protein OSH45, splice form OSH45
  misc_feature (27)..(286): Homolog of NCBI NO: 15238743 NR Description: KNAT3 homeodomain protein [Arabidopsis thaliana]
  misc_feature (27)..(286): Homolog of NCBI NO: 21539535 NR Description: KNAT3 homeodomain protein [Arabidopsis thaliana]
  misc_feature (27)..(286): Homolog of NCBI NO: 21554222 NR Description: KNAT3 homeodomain protein [Arabidopsis thaliana]
  misc_feature (1)..(287): Homolog of NCBI NO: 3023961 NR Description: Homeobox protein knotted-1 like 3 (KNAP3)
  misc_feature (27)..(287): Homolog of NCBI NO: 20141566 NR Description: Homeobox protein knotted-1 like 4 (KNAT4)
  misc_feature (27)..(287): Homolog of NCBI NO: 1045044 NR Description: KNAT4 homeobox protein [Arabidopsis thaliana]
MDAAAAAAAAASSPNPSGFSPGIGGEREKAAIAAHPLYERLLEAHVACLRVATPVDQLPRIDAQIAARPPPLAAAAGAAAAGGPSGGEELDLFMTHYVLLLCSFKEQLQQHVRVHAMEAVMGCWELEQSLQSLTGASPGEGTGGTMSDDEDNQVDSEANMFDGNDGSDGMGFGPLILTEGERSLVERVRKELKNELKQGYKEKLVDIREEIMRKRRAGKLPGDTASVLKAWWQAHSKWPYPTEDDKARLVQETGLQLKQINNWFINQRKRNWHSNPTSSAEKTKKKR

SEQ ID NO: 10675 - DNA, 1446 bp, Zea mays subsp. mays
  misc_feature (1)..(1446): Ceres Seq. ID no. 13569613
  misc_feature: MA Experiment ID: 108504 Result: Up-regulated in Transcription
  misc_feature: MA Experiment 108504 PARAMETER Experiment Name: Zm_Drought_P Parameter: Age (day) Value: 8
  misc_feature: MA Experiment 108504 PARAMETER Experiment Name: Zm_Drought_P Parameter: Organism Value: Zea mays
  misc_feature: MA Experiment 108504 PARAMETER Experiment Name: Zm_Drought_P Parameter: Plant Line Value: 35A19
  misc_feature: MA Experiment 108504 PARAMETER Experiment Name: Zm_Drought_P Parameter: Timepoint (hr) Value: 12
  misc_feature: MA Experiment 108504 PARAMETER Experiment Name: Zm_Drought_P Parameter: Tissue Value: Aerial
  misc_feature: MA Experiment 108504 PARAMETER Experiment Name: Zm_Drought_P Parameter: Treatment Value: Drought vs. No Drought
  misc_feature: MA Experiment ID: 108527 Result: Down-regulated in Transcription
  misc_feature: MA Experiment 108527 PARAMETER Experiment Name: Zm_5mM_NO_P Parameter: Age (day) Value: 8
  misc_feature: MA Experiment 108527 PARAMETER Experiment Name: Zm_5mM_NO_P Parameter: Organism Value: Zea mays
  misc_feature: MA Experiment 108527 PARAMETER Experiment Name: Zm_5mM_NO_P Parameter: Plant Line Value: 35A19
  misc_feature: MA Experiment 108527 PARAMETER Experiment Name: Zm_5mM_NO_P Parameter: Timepoint (hr) Value: 6
  misc_feature: MA Experiment 108527 PARAMETER Experiment Name: Zm_5mM_NO_P Parameter: Tissue Value: Aerial
  misc_feature: MA Experiment 108527 PARAMETER Experiment Name: Zm_5mM_NO_P Parameter: Treatment Value: 5mM NO vs. No Treatment
  misc_feature: MA Experiment ID: 108529 Result: Up-regulated in Transcription
  misc_feature: MA Experiment 108529 PARAMETER Experiment Name: Zm_Imbibed_Seeds_P Parameter: Age (day) Value: 5 vs. 2
  misc_feature: MA Experiment 108529 PARAMETER Experiment Name: Zm_Imbibed_Seeds_P Parameter: Organism Value: Zea mays
  misc_feature: MA Experiment 108529 PARAMETER Experiment Name: Zm_Imbibed_Seeds_P Parameter: Plant Line Value: 35A19
  misc_feature: MA Experiment 108529 PARAMETER Experiment Name: Zm_Imbibed_Seeds_P Parameter: Tissue Value: Roots vs. Embryo
  misc_feature: MA Experiment ID: 108535 Result: Down-regulated in Transcription
  misc_feature: MA Experiment 108535 PARAMETER Experiment Name: Zm_Meristem_P Parameter: Age (day) Value: 8
  misc_feature: MA Experiment 108535 PARAMETER Experiment Name: Zm_Meristem_P Parameter: Organism Value: Zea mays
  misc_feature: MA Experiment 108535 PARAMETER Experiment Name: Zm_Meristem_P Parameter: Plant Line Value: 35A19
  misc_feature: MA Experiment 108535 PARAMETER Experiment Name: Zm_Meristem_P Parameter: Tissue Value: Root Meristem vs. Above Root Meristem
  misc_feature: MA Experiment ID: 108543 Result: Up-regulated in Transcription
  misc_feature: MA Experiment ID: 108597 Result: Up-regulated in Transcription
  misc_feature: MA Experiment 108597 PARAMETER Experiment Name: Zm_100uM_ABA_P Parameter: Age (day) Value: 9
  misc_feature: MA Experiment 108597 PARAMETER Experiment Name: Zm_100uM_ABA_P Parameter: Organism Value: Zea mays
  misc_feature: MA Experiment 108597 PARAMETER Experiment Name: Zm_100uM_ABA_P Parameter: Plant Line Value: 35A19
  misc_feature: MA Experiment 108597 PARAMETER Experiment Name: Zm_100uM_ABA_P Parameter: Timepoint (hr) Value: 24
  misc_feature: MA Experiment 108597 PARAMETER Experiment Name: Zm_100uM_ABA_P Parameter: Tissue Value: Aerial
  misc_feature: MA Experiment 108597 PARAMETER Experiment Name: Zm_100uM_ABA_P Parameter: Treatment Value: 100uM ABA vs. No Treatment
  misc_feature: MA Experiment ID: 108687 Result: Down-regulated in Transcription
  misc_feature: MA Experiment 108687 PARAMETER Experiment Name: Zm_Embryos-Flowers__P Parameter: Tissue Value: Embryo vs. Aerial+
  misc_feature: MA Experiment ID: 20000492 Result: Down-regulated in Transcription
  misc_feature: MA Experiment 20000492 PARAMETER Experiment Name: Zm_Hybrid_Seed_Dev_P Parameter: DAP Value: 12
  misc_feature: MA Experiment 20000492 PARAMETER Experiment Name: Zm_Hybrid_Seed_Dev_P Parameter: Organism Value: Zea mays
  misc_feature: MA Experiment 20000492 PARAMETER Experiment Name: Zm_Hybrid_Seed_Dev_P Parameter: Plant Line Value: 35A19
  misc_feature: MA Experiment 20000492 PARAMETER Experiment Name: Zm_Hybrid_Seed_Dev_P Parameter: Tissue Value: Fert Kernel vs. Unfert Floret
  misc_feature: MA Experiment ID: 20000534 Result: Down-regulated in Transcription
  misc_feature: MA Experiment 20000534 PARAMETER Experiment Name: Zm_Hybrid_Pollen_P Parameter: Age (day) Value: 8
  misc_feature: MA Experiment 20000534 PARAMETER Experiment Name: Zm_Hybrid_Pollen_P Parameter: Organism Value: Zea mays
  misc_feature: MA Experiment 20000534 PARAMETER Experiment Name: Zm_Hybrid_Pollen_P Parameter: Plant Line Value: 35A19
  misc_feature: MA Experiment 20000534 PARAMETER Experiment Name: Zm_Hybrid_Pollen_P Parameter: Tissue Value: Pollen vs. Aerial
  misc_feature: MA Experiment ID: 20000535 Result: Down-regulated in Transcription
  misc_feature: MA Experiment 20000535 PARAMETER Experiment Name: Zm_Hybrid_Seed_Dev_P Parameter: DAP Value: 30 vs. 12
  misc_feature: MA Experiment 20000535 PARAMETER Experiment Name: Zm_Hybrid_Seed_Dev_P Parameter: Organism Value: Zea mays
  misc_feature: MA Experiment 20000535 PARAMETER Experiment Name: Zm_Hybrid_Seed_Dev_P Parameter: Plant Line Value: 35A19
  misc_feature: MA Experiment 20000535 PARAMETER Experiment Name: Zm_Hybrid_Seed_Dev_P Parameter: Tissue Value: Embryo vs. Unfert Floret
ggctgccgcatttattatattggtttggtacttggtagtttggtgacgctgaggcctcgtccccgatcagacttgttcggcctcttcgacggcgtgcccgtctccccgggctcattcgccatgcattcctcagcctccgcgagaggaggacgagggctcctcttgccggcggctgcggcggcggttgtggtgctactgttgggtgcagtggcgccagcggcgggttgctatccgcgcgtgttcaacttcggggactctctggcggacacgggcaactacccgttcgtctatggcaacgactcagccaagctccggccaccctacggcgagaccttcttccaccgcgccaccgggcgcgcctccaacgggcgcctcgtggtcgacttcatcgcggacacgctcggcctcccgttcgtgcgaccgtatctgagcggacggagcgcggaggacttcgcgggcggggccaacttcgccgtgggcggcgccacggcgctcagcccggacttcttccgtgcaagggggttccacaacatgggaaaccgagtggacctcgacatggagatgaagtggttccgcggcctgctcgacctactctgccccggcaacctcgccggttgctcggatatgatgaaccaatctctcttcttagttggagaaatcgggggcaatgactacaacggacctcttctttctggagttcccttcgaggaaattcgcgccatcactccgagtgttgttgcgaaaatttcttctacaatcagcgaattgattcagctaggagccaagactcttgtggttccaggaaaccttcctattggatgtgtcccaaaatatctgatgatattcaagagcaataagaaagaggattatgatccacagacaggttgtcttagatggatgaacgagttctcacagtaccacaacaagcttcttgtggagcagctcaagaagcttcgcaggctccatcctggagtaaccatcatctatgctgattactatggagctgctatggaaatattcctttcccctgaacgatatgggatcgaatatcccctagtggcttgctgtggtgcagaaggaccctacggtgtgtccccaactacaagctgtggattgggagaatataagctgtgcgataatccagaaaggtatggatcatgggatggcctccatccaacagaatctgcatacaaggtcatcgctatgggcctgctactaggttcctatacaagaccgccaatcgcttccaccaccacttcatgtccacagcttatggagctcggctcttctgctgaatacaaacgcctctacgacctgtaataatttatgtaattatattttattgtatgtactccctcgcccacttcaataagtcccattttgcgagtacatgtactttgtaacttttaactaataacttatcaaactagctactatatatttgtt

SEQ ID NO: 10676 - protein, 439 aa, Zea mays subsp. mays
  peptide (1)..(439): Ceres Seq. ID no. 13569614
  misc_feature (80)..(216): Pfam Name: GDSL-like Lipase/Acylhydrolase Pfam Description: GDSL-like Lipase/Acylhydrolase
  misc_feature (80)..(216): Pfam Name: GDSL-like Lipase/Acylhydrolase Pfam Description: GDSL-like Lipase/Acylhydrolase
  misc_feature (204)..(439): Homolog of NCBI NO: 34911804 NR Description: lipase-like protein [Oryza sativa (japonica
  misc_feature (60)..(216): Homolog of NCBI NO: 34911804 NR Description: lipase-like protein [Oryza sativa (japonica
  misc_feature (46)..(439): Homolog of NCBI NO: 34911800 NR Description: lipase-like protein [Oryza sativa (japonica
  misc_feature (60)..(413): Homolog of NCBI NO: 10764858 NR Description: F1K23.17 [Arabidopsis thaliana]
  misc_feature (60)..(413): Homolog of NCBI NO: 15218731 NR Description: lipase, putative [Arabidopsis thaliana] At1g28600/F1K23_6 [Arabidopsis thaliana]
  misc_feature (60)..(216): Homolog of NCBI NO: 34911804 NR Description: lipase-like protein [Oryza sativa (japonica
  misc_feature (60)..(413): Homolog of NCBI NO: 10764858 NR Description: F1K23.17 [Arabidopsis thaliana]
  misc_feature (53)..(413): Homolog of NCBI NO: 12322540 NR Description: unknown protein [Arabidopsis thaliana]
  misc_feature (62)..(413): Homolog of NCBI NO: 15225872 NR Description: lipase, putative [Arabidopsis thaliana]
  misc_feature (65)..(413): Homolog of NCBI NO: 15218728 NR Description: lipase, putative [Arabidopsis thaliana]
  misc_feature (65)..(413): Homolog of NCBI NO: 10764858 NR Description: F1K23.17 [Arabidopsis thaliana]
  misc_feature (60)..(413): Homolog of NCBI NO: 21593234 NR Description: lipase, putative [Arabidopsis thaliana]
  misc_feature (60)..(413): Homolog of NCBI NO: 15218731 NR Description: lipase, putative [Arabidopsis thaliana] At1g28600/F1K23_6 [Arabidopsis thaliana]
  misc_feature (46)..(439): Homolog of NCBI NO: 34911800 NR Description: lipase-like protein [Oryza sativa (japonica
  misc_feature (204)..(439): Homolog of NCBI NO: 34911804 NR Description: lipase-like protein [Oryza sativa (japonica
  misc_feature (60)..(413): Homolog of NCBI NO: 21593234 NR Description: lipase, putative [Arabidopsis thaliana]
  misc_feature (65)..(413): Homolog of NCBI NO: 10764858 NR Description: F1K23.17 [Arabidopsis thaliana]
  misc_feature (65)..(413): Homolog of NCBI NO: 15218728 NR Description: lipase, putative [Arabidopsis thaliana]
  misc_feature (62)..(413): Homolog of NCBI NO: 15225872 NR Description: lipase, putative [Arabidopsis thaliana]
  misc_feature (53)..(413): Homolog of NCBI NO: 12322540 NR Description: unknown protein [Arabidopsis thaliana]
GCRIYYIGLVLGSLVTLRPRPRSDLFGLFDGVPVSPGSFAMHSSASARGGRGLLLPAAAAAVVVLLLGAVAPAAGCYPRVFNFGDSLADTGNYPFVYGNDSAKLRPPYGETFFHRATGRASNGRLVVDFIADTLGLPFVRPYLSGRSAEDFAGGANFAVGGATALSPDFFRARGFHNMGNRVDLDMEMKWFRGLLDLLCPGNLAGCSDMMNQSLFLVGEIGGNDYNGPLLSGVPFEEIRAITPSVVAKISSTISELIQLGAKTLVVPGNLPIGCVPKYLMIFKSNKKEDYDPQTGCLRWMNEFSQYHNKLLVEQLKKLRRLHPGVTIIYADYYGAAMEIFLSPERYGIEYPLVACCGAEGPYGVSPTTSCGLGEYKLCDNPERYGSWDGLHPTESAYKVIAMGLLLGSYTRPPIASTTTSCPQLMELGSSAEYKRLYDL

SEQ ID NO: 10677 - protein, 399 aa, Zea mays subsp. mays
  peptide (1)..(399): Ceres Seq. ID no. 13569615
  misc_feature (40)..(176): Pfam Name: GDSL-like Lipase/Acylhydrolase Pfam Description: GDSL-like Lipase/Acylhydrolase
  misc_feature (40)..(176): Pfam Name: GDSL-like Lipase/Acylhydrolase Pfam Description: GDSL-like Lipase/Acylhydrolase
  misc_feature (164)..(399): Homolog of NCBI NO: 34911804 NR Description: lipase-like protein [Oryza sativa (japonica
  misc_feature (20)..(176): Homolog of NCBI NO: 34911804 NR Description: lipase-like protein [Oryza sativa (japonica
  misc_feature (6)..(399): Homolog of NCBI NO: 34911800 NR Description: lipase-like protein [Oryza sativa (japonica
  misc_feature (20)..(373): Homolog of NCBI NO: 10764858 NR Description: F1K23.17 [Arabidopsis thaliana]
  misc_feature (20)..(373): Homolog of NCBI NO: 15218731 NR Description: lipase, putative [Arabidopsis thaliana] At1g28600/F1K23_6 [Arabidopsis thaliana]
  misc_feature (20)..(176): Homolog of NCBI NO: 34911804 NR Description: lipase-like protein [Oryza sativa (japonica
  misc_feature (20)..(373): Homolog of NCBI NO: 10764858 NR Description: F1K23.17 [Arabidopsis thaliana]
  misc_feature (13)..(373): Homolog of NCBI NO: 12322540 NR Description: unknown protein [Arabidopsis thaliana]
  misc_feature (22)..(373): Homolog of NCBI NO: 15225872 NR Description: lipase, putative [Arabidopsis thaliana]
  misc_feature (25)..(373): Homolog of NCBI NO: 15218728 NR Description: lipase, putative [Arabidopsis thaliana]
  misc_feature (25)..(373): Homolog of NCBI NO: 10764858 NR Description: F1K23.17 [Arabidopsis thaliana]
  misc_feature (20)..(373): Homolog of NCBI NO: 21593234 NR Description: lipase, putative [Arabidopsis thaliana]
  misc_feature (20)..(373): Homolog of NCBI NO: 15218731 NR Description: lipase, putative [Arabidopsis thaliana] At1g28600/F1K23_6 [Arabidopsis thaliana]
  misc_feature (6)..(399): Homolog of NCBI NO: 34911800 NR Description: lipase-like protein [Oryza sativa (japonica
  misc_feature (164)..(399): Homolog of NCBI NO: 34911804 NR Description: lipase-like protein [Oryza sativa (japonica
  misc_feature (20)..(373): Homolog of NCBI NO: 21593234 NR Description: lipase, putative [Arabidopsis thaliana]
  misc_feature (25)..(373): Homolog of NCBI NO: 10764858 NR Description: F1K23.17 [Arabidopsis thaliana]
  misc_feature (25)..(373): Homolog of NCBI NO: 15218728 NR Description: lipase, putative [Arabidopsis thaliana]
  misc_feature (22)..(373): Homolog of NCBI NO: 15225872 NR Description: lipase, putative [Arabidopsis thaliana]
  misc_feature (13)..(373): Homolog of NCBI NO: 12322540 NR Description: unknown protein [Arabidopsis thaliana]
MHSSASARGGRGLLLPAAAAAVVVLLLGAVAPAAGCYPRVFNFGDSLADTGNYPFVYGNDSAKLRPPYGETFFHRATGRASNGRLVVDFIADTLGLPFVRPYLSGRSAEDFAGGANFAVGGATALSPDFFRARGFHNMGNRVDLDMEMKWFRGLLDLLCPGNLAGCSDMMNQSLFLVGEIGGNDYNGPLLSGVPFEEIRAITPSVVAKISSTISELIQLGAKTLVVPGNLPIGCVPKYLMIFKSNKKEDYDPQTGCLRWMNEFSQYHNKLLVEQLKKLRRLHPGVTIIYADYYGAAMEIFLSPERYGIEYPLVACCGAEGPYGVSPTTSCGLGEYKLCDNPERYGSWDGLHPTESAYKVIAMGLLLGSYTRPPIASTTTSCPQLMELGSSAEYKRLYDL

SEQ ID NO: 10678 - protein, 262 aa, Zea mays subsp. mays
  peptide (1)..(262): Ceres Seq. ID no. 13569616
  misc_feature (27)..(227): Pfam Name: GDSL-like Lipase/Acylhydrolase Pfam Description: GDSL-like Lipase/Acylhydrolase
  misc_feature (27)..(227): Pfam Name: GDSL-like Lipase/Acylhydrolase Pfam Description: GDSL-like Lipase/Acylhydrolase
  misc_feature (1)..(262): Homolog of NCBI NO: 34911800 NR Description: lipase-like protein [Oryza sativa (japonica
  misc_feature (1)..(236): Homolog of NCBI NO: 10764858 NR Description: F1K23.17 [Arabidopsis thaliana]
  misc_feature (1)..(236): Homolog of NCBI NO: 15218731 NR Description: lipase, putative [Arabidopsis thaliana] At1g28600/F1K23_6 [Arabidopsis thaliana]
  misc_feature (1)..(236): Homolog of NCBI NO: 21593234 NR Description: lipase, putative [Arabidopsis thaliana]
  misc_feature (27)..(262): Homolog of NCBI NO: 34911804 NR Description: lipase-like protein [Oryza sativa (japonica
  misc_feature (1)..(39): Homolog of NCBI NO: 34911804 NR Description: lipase-like protein [Oryza sativa (japonica
  misc_feature (1)..(236): Homolog of NCBI NO: 10764858 NR Description: F1K23.17 [Arabidopsis thaliana]
  misc_feature (1)..(236): Homolog of NCBI NO: 12322540 NR Description: unknown protein [Arabidopsis thaliana]
  misc_feature (1)..(236): Homolog of NCBI NO: 15225872 NR Description: lipase, putative [Arabidopsis thaliana]
  misc_feature (1)..(236): Homolog of NCBI NO: 15218728 NR Description: lipase, putative [Arabidopsis thaliana]
  misc_feature (1)..(236): Homolog of NCBI NO: 10764858 NR Description: F1K23.17 [Arabidopsis thaliana]
  misc_feature (1)..(236): Homolog of NCBI NO: 21593234 NR Description: lipase, putative [Arabidopsis thaliana]
  misc_feature (1)..(236): Homolog of NCBI NO: 15218731 NR Description: lipase, putative [Arabidopsis thaliana] At1g28600/F1K23_6 [Arabidopsis thaliana]
  misc_feature (1)..(262): Homolog of NCBI NO: 34911800 NR Description: lipase-like protein [Oryza sativa (japonica
  misc_feature (27)..(262): Homolog of NCBI NO: 34911804 NR Description: lipase-like protein [Oryza sativa (japonica
  misc_feature (1)..(39): Homolog of NCBI NO: 34911804 NR Description: lipase-like protein [Oryza sativa (japonica
  misc_feature (1)..(236): Homolog of NCBI NO: 10764858 NR Description: F1K23.17 [Arabidopsis thaliana]
  misc_feature (1)..(236): Homolog of NCBI NO: 15218728 NR Description: lipase, putative [Arabidopsis thaliana]
  misc_feature (1)..(236): Homolog of NCBI NO: 15225872 NR Description: lipase, putative [Arabidopsis thaliana]
  misc_feature (1)..(236): Homolog of NCBI NO: 12322540 NR Description: unknown protein [Arabidopsis thaliana]
MGNRVDLDMEMKWFRGLLDLLCPGNLAGCSDMMNQSLFLVGEIGGNDYNGPLLSGVPFEEIRAITPSVVAKISSTISELIQLGAKTLVVPGNLPIGCVPKYLMIFKSNKKEDYDPQTGCLRWMNEFSQYHNKLLVEQLKKLRRLHPGVTIIYADYYGAAMEIFLSPERYGIEYPLVACCGAEGPYGVSPTTSCGLGEYKLCDNPERYGSWDGLHPTESAYKVIAMGLLLGSYTRPPIASTTTSCPQLMELGSSAEYKRLYDL

SEQ ID NO: 10679 - DNA, 1957 bp, Zea mays subsp. mays
  misc_feature (1)..(1957): Ceres Seq. ID no. 13494733
  misc_feature: MA Experiment ID: 108528 Result: Up-regulated in Transcription
  misc_feature: MA Experiment 108528 PARAMETER Experiment Name: Zm_Imbibed_Seeds_P Parameter: Age (day) Value: 5 vs. 2
  misc_feature: MA Experiment 108528 PARAMETER Experiment Name: Zm_Imbibed_Seeds_P Parameter: Organism Value: Zea mays
  misc_feature: MA Experiment 108528 PARAMETER Experiment Name: Zm_Imbibed_Seeds_P Parameter: Plant Line Value: 35A19
  misc_feature: MA Experiment 108528 PARAMETER Experiment Name: Zm_Imbibed_Seeds_P Parameter: Tissue Value: Aerial vs. Embryo
  misc_feature: MA Experiment ID: 108529 Result: Down-regulated in Transcription
  misc_feature: MA Experiment 108529 PARAMETER Experiment Name: Zm_Imbibed_Seeds_P Parameter: Age (day) Value: 5 vs. 2
  misc_feature: MA Experiment 108529 PARAMETER Experiment Name: Zm_Imbibed_Seeds_P Parameter: Organism Value: Zea mays
  misc_feature: MA Experiment 108529 PARAMETER Experiment Name: Zm_Imbibed_Seeds_P Parameter: Plant Line Value: 35A19
  misc_feature: MA Experiment 108529 PARAMETER Experiment Name: Zm_Imbibed_Seeds_P Parameter: Tissue Value: Roots vs. Embryo
  misc_feature: MA Experiment ID: 108530 Result: Up-regulated in Transcription
  misc_feature: MA Experiment 108530 PARAMETER Experiment Name: Zm_Imbibed_Seeds_P Parameter: Age (day) Value: 6 vs. 2
  misc_feature: MA Experiment 108530 PARAMETER Experiment Name: Zm_Imbibed_Seeds_P Parameter: Organism Value: Zea mays
  misc_feature: MA Experiment 108530 PARAMETER Experiment Name: Zm_Imbibed_Seeds_P Parameter: Plant Line Value: 35A19
  misc_feature: MA Experiment 108530 PARAMETER Experiment Name: Zm_Imbibed_Seeds_P Parameter: Tissue Value: Aerial vs. Embryo
  misc_feature: MA Experiment ID: 108534 Result: Down-regulated in Transcription
  misc_feature: MA Experiment 108534 PARAMETER Experiment Name: Zm_4deg_Cold_P Parameter: Age (hr) Value: 8
  misc_feature: MA Experiment 108534 PARAMETER Experiment Name: Zm_4deg_Cold_P Parameter: Organism Value: Zea mays
  misc_feature: MA Experiment 108534 PARAMETER Experiment Name: Zm_4deg_Cold_P Parameter: Plant Line Value: 35A19
  misc_feature: MA Experiment 108534 PARAMETER Experiment Name: Zm_4deg_Cold_P Parameter: Temperature (deg C) Value: 4 vs. 22
  misc_feature: MA Experiment 108534 PARAMETER Experiment Name: Zm_4deg_Cold_P Parameter: Timepoint (hr) Value: 6
  misc_feature: MA Experiment 108534 PARAMETER Experiment Name: Zm_4deg_Cold_P Parameter: Tissue Value: Aerial
  misc_feature: MA Experiment ID: 108544 Result: Down-regulated in Transcription
  misc_feature: MA Experiment ID: 108556 Result: Down-regulated in Transcription
  misc_feature: MA Experiment 108556 PARAMETER Experiment Name: Zm_Drought_P Parameter: Age (day) Value: 9
  misc_feature: MA Experiment 108556 PARAMETER Experiment Name: Zm_Drought_P Parameter: Organism Value: Zea mays
  misc_feature: MA Experiment 108556 PARAMETER Experiment Name: Zm_Drought_P Parameter: Plant Line Value: 35A19
  misc_feature: MA Experiment 108556 PARAMETER Experiment Name: Zm_Drought_P Parameter: Timepoint (hr) Value: 24
  misc_feature: MA Experiment 108556 PARAMETER Experiment Name: Zm_Drought_P Parameter: Tissue Value: Aerial
  misc_feature: MA Experiment 108556 PARAMETER Experiment Name: Zm_Drought_P Parameter: Treatment Value: Drought vs. No Drought
  misc_feature: MA Experiment ID: 108689 Result: Down-regulated in Transcription
  misc_feature: MA Experiment 108689 PARAMETER Experiment Name: Zm_Drought_Roots_P Parameter: Age (day) Value: 9
  misc_feature: MA Experiment 108689 PARAMETER Experiment Name: Zm_Drought_Roots_P Parameter: Organism Value: Zea mays
  misc_feature: MA Experiment 108689 PARAMETER Experiment Name: Zm_Drought_Roots_P Parameter: Plant Line Value: 35A19
  misc_feature: MA Experiment 108689 PARAMETER Experiment Name: Zm_Drought_Roots_P Parameter: Timepoint (hr) Value: 24
  misc_feature: MA Experiment 108689 PARAMETER Experiment Name: Zm_Drought_Roots_P Parameter: Tissue Value: Roots
  misc_feature: MA Experiment 108689 PARAMETER Experiment Name: Zm_Drought_Roots_P Parameter: Treatment Value: Drought vs. No Drought
  misc_feature: MA Experiment ID: 20000477 Result: Down-regulated in Transcription
  misc_feature: MA Experiment 20000477 PARAMETER Experiment Name: Zm_5mM_SA_P Parameter: Age (day) Value: 10
  misc_feature: MA Experiment 20000477 PARAMETER Experiment Name: Zm_5mM_SA_P Parameter: Organism Value: Zea mays
  misc_feature: MA Experiment 20000477 PARAMETER Experiment Name: Zm_5mM_SA_P Parameter: Plant Line Value: 35A19
  misc_feature: MA Experiment 20000477 PARAMETER Experiment Name: Zm_5mM_SA_P Parameter: Timepoint (hr) Value: 48
  misc_feature: MA Experiment 20000477 PARAMETER Experiment Name: Zm_5mM_SA_P Parameter: Tissue Value: Aerial
  misc_feature: MA Experiment 20000477 PARAMETER Experiment Name: Zm_5mM_SA_P Parameter: Treatment Value: 5mM SA vs. No Treatment
  misc_feature: MA Experiment ID: 20000478 Result: Down-regulated in Transcription
  misc_feature: MA Experiment 20000478 PARAMETER Experiment Name: Zm_5mM_SA_P Parameter: Age (day) Value: 11
  misc_feature: MA Experiment 20000478 PARAMETER Experiment Name: Zm_5mM_SA_P Parameter: Organism Value: Zea mays
  misc_feature: MA Experiment 20000478 PARAMETER Experiment Name: Zm_5mM_SA_P Parameter: Plant Line Value: 35A19
  misc_feature: MA Experiment 20000478 PARAMETER Experiment Name: Zm_5mM_SA_P Parameter: Timepoint (hr) Value: 72
  misc_feature: MA Experiment 20000478 PARAMETER Experiment Name: Zm_5mM_SA_P Parameter: Tissue Value: Aerial
  misc_feature: MA Experiment 20000478 PARAMETER Experiment Name: Zm_5mM_SA_P Parameter: Treatment Value: 5mM SA vs. No Treatment
  misc_feature: MA Experiment ID: 20000480 Result: Down-regulated in Transcription
  misc_feature: MA Experiment 20000480 PARAMETER Experiment Name: Zm_Drought_P Parameter: Age (day) Value: 11
  misc_feature: MA Experiment 20000480 PARAMETER Experiment Name: Zm_Drought_P Parameter: Organism Value: Zea mays
  misc_feature: MA Experiment 20000480 PARAMETER Experiment Name: Zm_Drought_P Parameter: Plant Line Value: 35A19
  misc_feature: MA Experiment 20000480 PARAMETER Experiment Name: Zm_Drought_P Parameter: Timepoint (hr) Value: 72
  misc_feature: MA Experiment 20000480 PARAMETER Experiment Name: Zm_Drought_P Parameter: Tissue Value: Aerial
  misc_feature: MA Experiment 20000480 PARAMETER Experiment Name: Zm_Drought_P Parameter: Treatment Value: Drought vs. No Drought
  misc_feature: MA Experiment ID: 20000534 Result: Down-regulated in Transcription
  misc_feature: MA Experiment 20000534 PARAMETER Experiment Name: Zm_Hybrid_Pollen_P Parameter: Age (day) Value: 8
  misc_feature: MA Experiment 20000534 PARAMETER Experiment Name: Zm_Hybrid_Pollen_P Parameter: Organism Value: Zea mays
  misc_feature: MA Experiment 20000534 PARAMETER Experiment Name: Zm_Hybrid_Pollen_P Parameter: Plant Line Value: 35A19
  misc_feature: MA Experiment 20000534 PARAMETER Experiment Name: Zm_Hybrid_Pollen_P Parameter: Tissue Value: Pollen vs. Aerial
aggcctccactcattcctgcccccgacactcccactgccaccagtcctctcaccgccaggcgcggcacaatgcagccgcctacccttctcccgctaggcgccgtcgtggtcgccatcctcctgctcgccaccgccccgagccccgccgtctcccgccaccgccactcgtccgccgcggacacggagacgctcgatgtagccgcctcgctctcccgcgcccgcgccgcgctctccaccgacgccgtctcggntgcaccagtccgcggccgccgccgccgccggggcgaagcgctccccgcgagcgcgggagggcggcctcacgctgcggctccactcccgggacttcctgcccgaggagcaggggcggcacgagacgtaccgctcgctcgtgctctcccgcctccgccgcgactcggcgcgcgccgctgcggtgtcggcccgcgcgacgctggcggcggacggcgtgacccggctggacctgcgccccgcgaacgggtcggcggtgttcgcggcgtcggcggcggcggcggcgatccagggtcccgtggtgtccggcgtcgggcagggcagcggcgagtacttctcccgcgtgggcatcggcagccccgcgcggcagctgtacatggtgctggacaccggcagcgacgtcacctgggtgcagtgccagccctgcgccgactgctaccagcagtccgacccggtgttcgacccgtccctctccgcctcctacgccgccgtctcctgcgactcccagcgctgccgggacctggacaccgcggcgtgccgcaacgccacgggcgcctgcctctacgaggtggcctacggcgacggctcctacaccgtgggcgacttcgccaccgagacgctcacgctgggggactccaccccggtcggcaacgtcgccatcgggtgcggccacgacaacgagggcctcttcgtcggcgccgcggggctgctggcgctgggcggcgggccgctctccttcccgtcccagatctccgcgtccaccttctcctactgcctcgtggaccgcgactccccggccgcgtccacgctccagttcggcgacggcgccgccgaggcgggcaccgtgacggcgcctctcgtgcgcagcccgcgcacgagcaccttctactacgtggcgctttcgggcatctcggtgggcgggcagccgctgtccatcccggcatccgccttcgccatggacgccacgtcgggctcgggcggcgtcatcgtggactccggcaccgccgtgacgcggctccagtccgccgcgtacgcggcgctccgcgacgccttcgtccagggcgcgccgtcgctgccccggacctccggggtgtcgctgttcgacacgtgctacgacctgtcggaccggacgagcgtggaggtgcccgcggtgtcgctgcggttcgagggcggcggcgcgctgcggctgccggcgaagaactacctgatccccgtggacggagccggcacctactgcctggcgttcgcgccgacgaacgcggccgtgtccatcatcgggaacgtgcagcagcagggcacccgcgtcagcttcgacaccgccaggggcgccgtcggcttcacccccaacaagtgctagcctagcctagcctaagcctgccttctggctaaccgtgccctgttagccacggttgtcagtagtaatgacaagccggtgtttaattagcgggagaatgattagatggggggtaattaagcggtgggccctgccgggtctggggaggagcgaaaggcaaaggcgaggacagatgatgccattgccatgccagcctgtgtccggcgcgatgggtccagctccagcagtgtttctctctttctctcgagtatgcgtgcgtggagccttgtcatgacgaattagatcgtgggggctcccaagttaagagtatttatttttattttatttgctatgtcaagaaaatggaagtttccatcc

SEQ ID NO: 10680 - protein, 535 aa, Zea mays subsp. mays
  peptide (1)..(535): Ceres Seq. ID no. 13494734
  misc_feature (24)..(198): Homolog of NCBI NO: 34895664 NR Description: nucleoid DNA-binding protein cnd41-like protein
  misc_feature (84)..(84): Xaa is any aa, unknown or other
RPPLIPAPDTPTATSPLTARRGTMQPPTLLPLGAVVVAILLLATAPSPAVSRHRHSSAADTETLDVAASLSRARAALSTDAVSXAPVRGRRRRRGEALPASAGGRPHAAAPLPGLPARGAGAARDVPLARALPPPPRLGARRCGVGPRDAGGGRRDPAGPAPRERVGGVRGVGGGGGDPGSRGVRRRAGQRRVLLPRGHRQPRAAAVHGAGHRQRRHLGAVPALRRLLPAVRPGVRPVPLRLLRRRLLRLPALPGPGHRGVPQRHGRLPLRGGLRRRLLHRGRLRHRDAHAGGLHPGRQRRHRVRPRQRGPLRRRRGAAGAGRRAALLPVPDLRVHLLLLPRGPRLPGRVHAPVRRRRRRGGHRDGASRAQPAHEHLLLRGAFGHLGGRAAAVHPGIRLRHGRHVGLGRRHRGLRHRRDAAPVRRVRGAPRRLRPGRAVAAPDLRGVAVRHVLRPVGPDERGGARGVAAVRGRRRAAAAGEELPDPRGRSRHLLPGVRADERGRVHHRERAAAGHPRQLRHRQGRRRLHPQQVLA

SEQ ID NO: 10681 - protein, 512 aa, Zea mays subsp. mays
  peptide (1)..(512): Ceres Seq. ID no. 13494735
  misc_feature (1)..(175): Homolog of NCBI NO: 34895664 NR Description: nucleoid DNA-binding protein cnd41-like protein
  misc_feature (61)..(61): Xaa is any aa, unknown or other
MQPPTLLPLGAVVVAILLLATAPSPAVSRHRHSSAADTETLDVAASLSRARAALSTDAVSXAPVRGRRRRRGEALPASAGGRPHAAAPLPGLPARGAGAARDVPLARALPPPPRLGARRCGVGPRDAGGGRRDPAGPAPRERVGGVRGVGGGGGDPGSRGVRRRAGQRRVLLPRGHRQPRAAAVHGAGHRQRRHLGAVPALRRLLPAVRPGVRPVPLRLLRRRLLRLPALPGPGHRGVPQRHGRLPLRGGLRRRLLHRGRLRHRDAHAGGLHPGRQRRHRVRPRQRGPLRRRRGAAGAGRRAALLPVPDLRVHLLLLPRGPRLPGRVHAPVRRRRRRGGHRDGASRAQPAHEHLLLRGAFGHLGGRAAAVHPGIRLRHGRHVGLGRRHRGLRHRRDAAPVRRVRGAPRRLRPGRAVAAPDLRGVAVRHVLRPVGPDERGGARGVAAVRGRRRAAAAGEELPDPRGRSRHLLPGVRADERGRVHHRERAAAGHPRQLRHRQGRRRLHPQQVLA

SEQ ID NO: 10682 - protein, 326 aa, Zea mays subsp. mays
  peptide (1)..(326): Ceres Seq. ID no. 13494736
  misc_feature (1)..(324): Pfam Name: Eukaryotic aspartyl protease Pfam Description: Eukaryotic aspartyl protease
  misc_feature (1)..(326): Homolog of NCBI NO: 34895664 NR Description: nucleoid DNA-binding protein cnd41-like protein
  misc_feature (1)..(326): Homolog of NCBI NO: 15222611 NR Description: expressed protein [Arabidopsis thaliana]
  misc_feature (1)..(326): Homolog of NCBI NO: 15229656 NR Description: chloroplast nucleoid DNA-binding protein -related thaliana] >gi|11994113|dbj|BAB01116.1| CND41, chloroplast
  misc_feature (1)..(326): Homolog of NCBI NO: 19424106 NR Description: putative chloroplast nucleoid DNA-binding protein
  misc_feature (1)..(326): Homolog of NCBI NO: 15290061 NR Description: nucleoid DNA-binding protein cnd41-like protein
  misc_feature (1)..(326): Homolog of NCBI NO: 28392860 NR Description: unknown protein [Arabidopsis thaliana]
  misc_feature (1)..(326): Homolog of NCBI NO: 15231010 NR Description: expressed protein [Arabidopsis thaliana]
  misc_feature (1)..(326): Homolog of NCBI NO: 15223368 NR Description: chloroplast nucleoid DNA binding protein -related
  misc_feature (1)..(326): Homolog of NCBI NO: 21594980 NR Description: chloroplast nucleoid DNA binding protein,
  misc_feature (1)..(326): Homolog of NCBI NO: 15228618 NR Description: expressed protein [Arabidopsis thaliana]
MVLDTGSDVTWVQCQPCADCYQQSDPVFDPSLSASYAAVSCDSQRCRDLDTAACRNATGACLYEVAYGDGSYTVGDFATETLTLGDSTPVGNVAIGCGHDNEGLFVGAAGLLALGGGPLSFPSQISASTFSYCLVDRDSPAASTLQFGDGAAEAGTVTAPLVRSPRTSTFYYVALSGISVGGQPLSIPASAFAMDATSGSGGVIVDSGTAVTRLQSAAYAALRDAFVQGAPSLPRTSGVSLFDTCYDLSDRTSVEVPAVSLRFEGGGALRLPAKNYLIPVDGAGTYCLAFAPTNAAVSIIGNVQQQGTRVSFDTARGAVGFTPNKC

SEQ ID NO: 10683 - DNA, 1499 bp, Zea mays subsp. mays
  misc_feature (1)..(1499): Ceres Seq. ID no. 13580175
  misc_feature: MA Experiment ID: 108529 Result: Down-regulated in Transcription
  misc_feature: MA Experiment 108529 PARAMETER Experiment Name: Zm_Imbibed_Seeds_P Parameter: Age (day) Value: 5 vs. 2
  misc_feature: MA Experiment 108529 PARAMETER Experiment Name: Zm_Imbibed_Seeds_P Parameter: Organism Value: Zea mays
  misc_feature: MA Experiment 108529 PARAMETER Experiment Name: Zm_Imbibed_Seeds_P Parameter: Plant Line Value: 35A19
  misc_feature: MA Experiment 108529 PARAMETER Experiment Name: Zm_Imbibed_Seeds_P Parameter: Tissue Value: Roots vs. Embryo
  misc_feature: MA Experiment ID: 108530 Result: Down-regulated in Transcription
  misc_feature: MA Experiment 108530 PARAMETER Experiment Name: Zm_Imbibed_Seeds_P Parameter: Age (day) Value: 6 vs. 2
  misc_feature: MA Experiment 108530 PARAMETER Experiment Name: Zm_Imbibed_Seeds_P Parameter: Organism Value: Zea mays
  misc_feature: MA Experiment 108530 PARAMETER Experiment Name: Zm_Imbibed_Seeds_P Parameter: Plant Line Value: 35A19
  misc_feature: MA Experiment 108530 PARAMETER Experiment Name: Zm_Imbibed_Seeds_P Parameter: Tissue Value: Aerial vs. Embryo
  misc_feature: MA Experiment ID: 108535 Result: Up-regulated in Transcription
  misc_feature: MA Experiment 108535 PARAMETER Experiment Name: Zm_Meristem_P Parameter: Age (day) Value: 8
  misc_feature: MA Experiment 108535 PARAMETER Experiment Name: Zm_Meristem_P Parameter: Organism Value: Zea mays
  misc_feature: MA Experiment 108535 PARAMETER Experiment Name: Zm_Meristem_P Parameter: Plant Line Value: 35A19
  misc_feature: MA Experiment 108535 PARAMETER Experiment Name: Zm_Meristem_P Parameter: Tissue Value: Root Meristem vs. Above Root Meristem
  misc_feature: MA Experiment ID: 20000487 Result: Up-regulated in Transcription
  misc_feature: MA Experiment 20000487 PARAMETER Experiment Name: Zm_50mM_NH4NO3_L_to_H_P Parameter: Organism Value: Zea mays
  misc_feature: MA Experiment 20000487 PARAMETER Experiment Name: Zm_50mM_NH4NO3_L_to_H_P Parameter: Timepoint (hr) Value: 4
  misc_feature: MA Experiment 20000487 PARAMETER Experiment Name: Zm_50mM_NH4NO3_L_to_H_P Parameter: Tissue Value: Leaves
  misc_feature: MA Experiment 20000487 PARAMETER Experiment Name: Zm_50mM_NH4NO3_L_to_H_P Parameter: Treatment Value: 50mM NH4NO3 vs. 100mM Mannitol
  misc_feature: MA Experiment ID: 20000492 Result: Up-regulated in Transcription
  misc_feature: MA Experiment 20000492 PARAMETER Experiment Name: Zm_Hybrid_Seed_Dev_P Parameter: DAP Value: 12
  misc_feature: MA Experiment 20000492 PARAMETER Experiment Name: Zm_Hybrid_Seed_Dev_P Parameter: Organism Value: Zea mays
  misc_feature: MA Experiment 20000492 PARAMETER Experiment Name: Zm_Hybrid_Seed_Dev_P Parameter: Plant Line Value: 35A19
  misc_feature: MA Experiment 20000492 PARAMETER Experiment Name: Zm_Hybrid_Seed_Dev_P Parameter: Tissue Value: Fert Kernel vs. Unfert Floret
  misc_feature: MA Experiment ID: 20001606 Result: Up-regulated in Transcription
  misc_feature: MA Experiment 20001606 PARAMETER Experiment Name: Zm_50ppm_KNO3_L-to-H_P Parameter: Age (day) Value: 19
  misc_feature: MA Experiment 20001606 PARAMETER Experiment Name: Zm_50ppm_KNO3_L-to-H_P Parameter: Organism Value: Zea mays
  misc_feature: MA Experiment 20001606 PARAMETER Experiment Name: Zm_50ppm_KNO3_L-to-H_P Parameter: Plant Line Value: 35A19
  misc_feature: MA Experiment 20001606 PARAMETER Experiment Name: Zm_50ppm_KNO3_L-to-H_P Parameter: Timepoint (hr) Value: 8
  misc_feature: MA Experiment 20001606 PARAMETER Experiment Name: Zm_50ppm_KNO3_L-to-H_P Parameter: Tissue Value: Shoots
  misc_feature: MA Experiment 20001606 PARAMETER Experiment Name: Zm_50ppm_KNO3_L-to-H_P Parameter: Treatment Value: 50ppm KNO3 vs. 50ppm KCl
acaccacacctacatgtttctttaccctaacggcctaacctttctgctctagcgaaggcacagccgccgctgtttcttcatcttccttgcagcgccggcgctccatcttactctccctcccttactagcgcttgacacgcaggtgacgggcggcagcgacggcgctcagactcgggcttttagtgacggcatcagcggtttcccctcccgcctcttgccagtcccatcgcgccctcgcctcgggtcctctgcacaccgtccagtgaccttgcgtgatggactggataaagttttgcagcgattttaccgcaagtgatgggaaacagcatgcattgcttgataatcttaatcaggaattgtcccagaagtctgtactattgggtgatggttttaaactgtcagctgctgataatgatgtgtttgcaactgttcatccttttgtgatccgtgttagtgacagcgagttgcagaaatatccacatgtactgcggtggatggactacattcagaacactgttggtgctggtacaactttgcaaaagataaatgtgaccaagtctgactttgatccaccttctcatccaaggaaagctgataaaaaagatgctgaatcaagttcaaagaaagccatttccgtacagaagactgctgacaagtcaaatggaagtgctgactcaaagaaatccacaagagagcctcctgaaaataaggagaatcctactgctgcggggaacagcaaaacctctggggagaaaaagaaagtgcaagagaagtcagcaggaaaaacaacagagaaagctccagagaaaattgcagacaaggaatcagagtgcgatatcagtatcctgaatatacaggttggccttatccgtaaagcatggaagcatccatctgctgacagccttttagttgaggagatagatttgggagatggtaatgtgcgtcaagttgttagtggtcttgcaaagtattgcagcccagatgatcttactaatcggcatgttgtcttgatcacgaatgtgaagcctggaaagctgcgagatgtaatgtctgctggattggtcctttgtgcttcaactgaagatcatgctgctgtggagcctttgattcctccagaaggagccaagattggagaacgcatttcatttgctgggtttgatgggaagcctgaagatgttctaaatccaaagaaaaagcagctggacaagattaccccgcatcttcgtaccgacgagaatggaattgcaatgttcaaaggtgttccctttactacatcagctggcccatgtagatcttcgattcacaacggaaatgttaagtgagcagctcattagacatggttgcatagattgacatcaaacttatgcaggctgtctgtgtaccattttgtcatacatcatgttttgcccatatttagcgttgcaaaatttgaacagagttacactatctgtaagcaattttctactaatggttggcccagagtttgcttttgagtatgc

SEQ ID NO: 10684 - protein, 348 aa, Zea mays subsp. mays
  peptide (1)..(348): Ceres Seq. ID no. 13580176
  misc_feature (193)..(288): Pfam Name: Putative tRNA binding domain Pfam Description: Putative tRNA binding domain
  misc_feature (193)..(288): Pfam Name: Putative tRNA binding domain Pfam Description: Putative tRNA binding domain
  misc_feature (1)..(348): Homolog of NCBI NO: 34907808 NR Description: similar to methionyl-tRNA synthetase [Oryza
  misc_feature (1)..(348): Homolog of NCBI NO: 18405465 NR Description: methionyl-tRNA synthetase -related [Arabidopsis
  misc_feature (1)..(348): Homolog of NCBI NO: 25408718 NR Description: probable methionyl-tRNA synthetase [imported] -
  misc_feature (96)..(348): Homolog of NCBI NO: 15236350 NR Description: methionyl-tRNA synthetase - like protein
  misc_feature (16)..(347): Homolog of NCBI NO: 4140277 NR Description: aminoacyl-tRNA synthetase cofactor [Euplotes
  misc_feature (1)..(348): Homolog of NCBI NO: 18405465 NR Description: methionyl-tRNA synthetase -related [Arabidopsis
  misc_feature (96)..(348): Homolog of NCBI NO: 15236350 NR Description: methionyl-tRNA synthetase - like protein
  misc_feature (157)..(348): Homolog of NCBI NO: 26352830 NR Description: unnamed protein product [Mus musculus]
  misc_feature (19)..(327): Homolog of NCBI NO: 19115568 NR Description: putative Cofactor for methionyl-and glutamyl-tRNA and G4 quadruplex nucleic acid binding protein by similarity to G4P1 [Schizosaccharomyces pombe] >gi|7768495|emb|CAB90791.1| G4P1
  misc_feature (121)..(348): Homolog of NCBI NO: 34860578 NR Description: endothelial monocyte activating polypeptide 2
  misc_feature (117)..(338): Homolog of NCBI NO: 28302254 NR Description: Similar to small inducible cytokine subfamily E,
  misc_feature (89)..(348): Homolog of NCBI NO: 12230649 NR Description: Probable methionyl-tRNA synthetase
  misc_feature (16)..(347): Homolog of NCBI NO: 4140277 NR Description: aminoacyl-tRNA synthetase cofactor [Euplotes
  misc_feature (1)..(348): Homolog of NCBI NO: 25408718 NR Description: probable methionyl-tRNA synthetase [imported] -
  misc_feature (1)..(348): Homolog of NCBI NO: 34907808 NR Description: similar to methionyl-tRNA synthetase [Oryza
  misc_feature (89)..(348): Homolog of NCBI NO: 12230649 NR Description: Probable methionyl-tRNA synthetase
  misc_feature (117)..(338): Homolog of NCBI NO: 28302254 NR Description: Similar to small inducible cytokine subfamily E,
  misc_feature (121)..(348): Homolog of NCBI NO: 34860578 NR Description: endothelial monocyte activating polypeptide 2
  misc_feature (19)..(327): Homolog of NCBI NO: 19115568 NR Description: putative Cofactor for methionyl-and glutamyl-tRNA and G4 quadruplex nucleic acid binding protein by similarity to G4P1 [Schizosaccharomyces pombe] >gi|7768495|emb|CAB90791.1| G4P1
  misc_feature (157)..(348): Homolog of NCBI NO: 26352830 NR Description: unnamed protein product [Mus musculus]
MDWIKFCSDFTASDGKQHALLDNLNQELSQKSVLLGDGFKLSAADNDVFATVHPFVIRVSDSELQKYPHVLRWMDYIQNTVGAGTTLQKINVTKSDFDPPSHPRKADKKDAESSSKKAISVQKTADKSNGSADSKKSTREPPENKENPTAAGNSKTSGEKKKVQEKSAGKTTEKAPEKIADKESECDISILNIQVGLIRKAWKHPSADSLLVEEIDLGDGNVRQVVSGLAKYCSPDDLTNRHVVLITNVKPGKLRDVMSAGLVLCASTEDHAAVEPLIPPEGAKIGERISFAGFDGKPEDVLNPKKKQLDKITPHLRTDENGIAMFKGVPFTTSAGPCRSSIHNGNVK

SEQ ID NO: 10685 - protein, 275 aa, Zea mays subsp. mays
  peptide (1)..(275): Ceres Seq. ID no. 13580177
  misc_feature (120)..(215): Pfam Name: Putative tRNA binding domain Pfam Description: Putative tRNA binding domain
  misc_feature (120)..(215): Pfam Name: Putative tRNA binding domain Pfam Description: Putative tRNA binding domain
  misc_feature (1)..(275): Homolog of NCBI NO: 34907808 NR Description: similar to methionyl-tRNA synthetase [Oryza
  misc_feature (1)..(275): Homolog of NCBI NO: 18405465 NR Description: methionyl-tRNA synthetase -related [Arabidopsis
  misc_feature (1)..(275): Homolog of NCBI NO: 25408718 NR Description: probable methionyl-tRNA synthetase [imported] -
  misc_feature (23)..(275): Homolog of NCBI NO: 15236350 NR Description: methionyl-tRNA synthetase - like protein
  misc_feature (1)..(274): Homolog of NCBI NO: 4140277 NR Description: aminoacyl-tRNA synthetase cofactor [Euplotes
  misc_feature (1)..(275): Homolog of NCBI NO: 18405465 NR Description: methionyl-tRNA synthetase -related [Arabidopsis
  misc_feature (23)..(275): Homolog of NCBI NO: 15236350 NR Description: methionyl-tRNA synthetase - like protein
  misc_feature (84)..(275): Homolog of NCBI NO: 26352830 NR Description: unnamed protein product [Mus musculus]
  misc_feature (1)..(254): Homolog of NCBI NO: 19115568 NR Description: putative Cofactor for methionyl-and glutamyl-tRNA and G4 quadruplex nucleic acid binding protein by similarity to G4P1 [Schizosaccharomyces pombe] >gi|7768495|emb|CAB90791.1| G4P1
  misc_feature (48)..(275): Homolog of NCBI NO: 34860578 NR Description: endothelial monocyte activating polypeptide 2
  misc_feature (44)..(265): Homolog of NCBI NO: 28302254 NR Description: Similar to small inducible cytokine subfamily E,
  misc_feature (16)..(275): Homolog of NCBI NO: 12230649 NR Description: Probable methionyl-tRNA synthetase
  misc_feature (1)..(274): Homolog of NCBI NO: 4140277 NR Description: aminoacyl-tRNA synthetase cofactor [Euplotes
  misc_feature (1)..(275): Homolog of NCBI NO: 25408718 NR Description: probable methionyl-tRNA synthetase [imported] -
  misc_feature (1)..(275): Homolog of NCBI NO: 34907808 NR Description: similar to methionyl-tRNA synthetase [Oryza
  misc_feature (16)..(275): Homolog of NCBI NO: 12230649 NR Description: Probable methionyl-tRNA synthetase
  misc_feature (44)..(265): Homolog of NCBI NO: 28302254 NR Description: Similar to small inducible cytokine subfamily E,
  misc_feature (48)..(275): Homolog of NCBI NO: 34860578 NR Description: endothelial monocyte activating polypeptide 2
  misc_feature (1)..(254): Homolog of NCBI NO: 19115568 NR Description: putative Cofactor for methionyl-and glutamyl-tRNA and G4 quadruplex nucleic acid binding protein by similarity to G4P1 [Schizosaccharomyces pombe] >gi|7768495|emb|CAB90791.1| G4P1
  misc_feature (84)..(275): Homolog of NCBI NO: 26352830 NR Description: unnamed protein product [Mus musculus]
MDYIQNTVGAGTTLQKINVTKSDFDPPSHPRKADKKDAESSSKKAISVQKTADKSNGSADSKKSTREPPENKENPTAAGNSKTSGEKKKVQEKSAGKTTEKAPEKIADKESECDISILNIQVGLIRKAWKHPSADSLLVEEIDLGDGNVRQVVSGLAKYCSPDDLTNRHVVLITNVKPGKLRDVMSAGLVLCASTEDHAAVEPLIPPEGAKIGERISFAGFDGKPEDVLNPKKKQLDKITPHLRTDENGIAMFKGVPFTTSAGPCRSSIHNGNVK

SEQ ID NO: 10686 - DNA, 1466 bp, Zea mays subsp. mays
  misc_feature (1)..(1466): Ceres Seq. ID no. 12374177
  misc_feature: MA Experiment ID: 108527 Result: Up-regulated in Transcription
  misc_feature: MA Experiment 108527 PARAMETER Experiment Name: Zm_5mM_NO_P Parameter: Age (day) Value: 8
  misc_feature: MA Experiment 108527 PARAMETER Experiment Name: Zm_5mM_NO_P Parameter: Organism Value: Zea mays
  misc_feature: MA Experiment 108527 PARAMETER Experiment Name: Zm_5mM_NO_P Parameter: Plant Line Value: 35A19
  misc_feature: MA Experiment 108527 PARAMETER Experiment Name: Zm_5mM_NO_P Parameter: Timepoint (hr) Value: 6
  misc_feature: MA Experiment 108527 PARAMETER Experiment Name: Zm_5mM_NO_P Parameter: Tissue Value: Aerial
  misc_feature: MA Experiment 108527 PARAMETER Experiment Name: Zm_5mM_NO_P Parameter: Treatment Value: 5mM NO vs. No Treatment
  misc_feature: MA Experiment ID: 108534 Result: Up-regulated in Transcription
  misc_feature: MA Experiment 108534 PARAMETER Experiment Name: Zm_4deg_Cold_P Parameter: Age (hr) Value: 8
  misc_feature: MA Experiment 108534 PARAMETER Experiment Name: Zm_4deg_Cold_P Parameter: Organism Value: Zea mays
  misc_feature: MA Experiment 108534 PARAMETER Experiment Name: Zm_4deg_Cold_P Parameter: Plant Line Value: 35A19
  misc_feature: MA Experiment 108534 PARAMETER Experiment Name: Zm_4deg_Cold_P Parameter: Temperature (deg C) Value: 4 vs. 22
  misc_feature: MA Experiment 108534 PARAMETER Experiment Name: Zm_4deg_Cold_P Parameter: Timepoint (hr) Value: 6
  misc_feature: MA Experiment 108534 PARAMETER Experiment Name: Zm_4deg_Cold_P Parameter: Tissue Value: Aerial
  misc_feature: MA Experiment ID: 20000626 Result: Down-regulated in Transcription
  misc_feature: MA Experiment 20000626 PARAMETER Experiment Name: Zm_Herbicide-Treatments_P Parameter: Timepoint (hr) Value: 12
  misc_feature: MA Experiment 20000626 PARAMETER Experiment Name: Zm_Herbicide-Treatments_P Parameter: Tissue Value: Aerial
  misc_feature: MA Experiment 20000626 PARAMETER Experiment Name: Zm_Herbicide-Treatments_P Parameter: Treatment Value: Roundup vs. No Treatment
ctctcgctctaggcccctacccataagaaacttcgtcacggtctactctttctccgtcctagcaaaatcctccccgtactgagagccaaagaaacaacaaaggcaggaggccggcgaactacgcgaggaaaatttcgtttcccgggaggaagtcgggagtcgagacacgcgcgggtcaaaatcgcctccgtcgctgctgttgctgtcggaggcgagcaggaaggggaaagaacgagcttggaaccttggacagctcaagaagaggggacggggaggcggcagcctgtgagaaggcacgtgacacgtgaaggagcccgagggtagggaggaaccgaatcgagacatggactcggagcactggatctcgcgccctggccgccgccaagcgttactacgcggcgcagctcggccacgtcgacgatgtgcccgggatagggacggaggaggtggagatggagattgaggacgacgggggcttggagatggagatggagatggcgctggggctcggggacgcgacgtggccggaggtcgcctgcccctactgctacgaggaccatgacgtcgcgtccctctgcgtccacctcgaggaggaccacccctatgagccccacgccgcgccctgccccatttgctcccaaagggttacaagagatatgcttaaccatatgaccatgcagcatggttacctgttcaagaacggtcacaggtctcgcagatacattattcccgagagccatgcaatttctgcattgagccgagatctacggggtactcatttacgggctcttctagggggtggtcatggccacagatcaagcaatgcagtgactacaaacatttccagcgatcctcttctttcgtcgtttggcctgggcttctcaccatcagatgcaccagaaccatcaaaatcggcgtcttctattccagatggcgcctcaatacgtaaggagacaccggttcagccttgggagtcgagtattgattcatctctcacaagcgaggaaagggagcaaaagcggaaacaggccaccggcagagcaacctttgtgcaaggcctagtgctctccactctatttggagactgatcgttcgaaacagctctaggttcttgcacatgctagttcggcgcttactcctgcctggtccgcatagtcagatagtgctccacccggtttggtgcatctaactctgatggcgggaaagttcgcctcaggaaacttagccgcgttcttctttgtttcagaaaagcgcgcagttgattctatcgtgatatagcttgatttaagctagctgttgtaccgttgtctttaccaatttatcagccagtaattcttatctgttagctcactggcagatcgtgtttgcaccaacatacataatagcctgtaacatgtacttacacaaagcaagaaaggcgcttgtttgagcgcacattcttcttgttgtaagaccagttaaggcct

SEQ ID NO: 10687 - protein, 211 aa, Zea mays subsp. mays
  peptide (1)..(211): Ceres Seq. ID no. 12374178
  misc_feature (26)..(208): Pfam Name: Drought induced 19 protein (Di19) Pfam Description: Drought induced 19 protein (Di19)
  misc_feature (26)..(211): Homolog of NCBI NO: 18377875 NR Description: AT3g06760/F3E22_10 [Arabidopsis thaliana]
  misc_feature (26)..(211): Homolog of NCBI NO: 28393233 NR Description: unknown protein [Arabidopsis thaliana]
  misc_feature (26)..(211): Homolog of NCBI NO: 25992529 NR Description: fiber protein Fb2 [Gossypium barbadense]
  misc_feature (26)..(211): Homolog of NCBI NO: 15240426 NR Description: drought-induced protein - like; protein id:
  misc_feature (26)..(211): Homolog of NCBI NO: 15230782 NR Description: unknown protein; protein id: At3g06760.1 thaliana] >gi|7549637|gb|AAF63822.1| unknown protein [Arabidopsis
  misc_feature (9)..(211): Homolog of NCBI NO: 15028023 NR Description: unknown protein [Arabidopsis thaliana]
  misc_feature (9)..(211): Homolog of NCBI NO: 1076316 NR Description: drought-induced protein Di19 - Arabidopsis
  misc_feature (1)..(211): Homolog of NCBI NO: 7485240 NR Description: hypothetical protein A_IG002P16.10 - Arabidopsis >gi|2191171|gb|AAB61057.1| similar to A. thaliana DI19 mRNA
  misc_feature (26)..(193): Homolog of NCBI NO: 13937216 NR Description: AT5g49230/K21P3_11 [Arabidopsis thaliana]
  misc_feature (26)..(193): Homolog of NCBI NO: 15239827 NR Description: drought-induced protein Di19-like protein; id: At5g49230.1, supported by cDNA: gi_13937215 [Arabidopsis
MEIEDDGGLEMEMEMALGLGDATWPEVACPYCYEDHDVASLCVHLEEDHPYEPHAAPCPICSQRVTRDMLNHMTMQHGYLFKNGHRSRRYIIPESHAISALSRDLRGTHLRALLGGGHGHRSSNAVTTNISSDPLLSSFGLGFSPSDAPEPSKSASSIPDGASIRKETPVQPWESSIDSSLTSEEREQKRKQATGRATFVQGLVLSTLFGD

SEQ ID NO: 10688 - protein, 201 aa, Zea mays subsp. mays
  peptide (1)..(201): Ceres Seq. ID no. 12374179
  misc_feature (16)..(198): Pfam Name: Drought induced 19 protein (Di19) Pfam Description: Drought induced 19 protein (Di19)
  misc_feature (16)..(201): Homolog of NCBI NO: 18377875 NR Description: AT3g06760/F3E22_10 [Arabidopsis thaliana]
  misc_feature (16)..(201): Homolog of NCBI NO: 28393233 NR Description: unknown protein [Arabidopsis thaliana]
  misc_feature (16)..(201): Homolog of NCBI NO: 25992529 NR Description: fiber protein Fb2 [Gossypium barbadense]
  misc_feature (16)..(201): Homolog of NCBI NO: 15240426 NR Description: drought-induced protein - like; protein id:
  misc_feature (16)..(201): Homolog of NCBI NO: 15230782 NR Description: unknown protein; protein id: At3g06760.1 thaliana] >gi|7549637|gb|AAF63822.1| unknown protein [Arabidopsis
  misc_feature (1)..(201): Homolog of NCBI NO: 15028023 NR Description: unknown protein [Arabidopsis thaliana]
  misc_feature (1)..(201): Homolog of NCBI NO: 1076316 NR Description: drought-induced protein Di19 - Arabidopsis
  misc_feature (1)..(201): Homolog of NCBI NO: 7485240 NR Description: hypothetical protein A_IG002P16.10 - Arabidopsis >gi|2191171|gb|AAB61057.1| similar to A. thaliana DI19 mRNA
  misc_feature (16)..(183): Homolog of NCBI NO: 13937216 NR Description: AT5g49230/K21P3_11 [Arabidopsis thaliana]
  misc_feature (16)..(183): Homolog of NCBI NO: 15239827 NR Description: drought-induced protein Di19-like protein; id: At5g49230.1, supported by cDNA: gi_13937215 [Arabidopsis
MEMEMALGLGDATWPEVACPYCYEDHDVASLCVHLEEDHPYEPHAAPCPICSQRVTRDMLNHMTMQHGYLFKNGHRSRRYIIPESHAISALSRDLRGTHLRALLGGGHGHRSSNAVTTNISSDPLLSSFGLGFSPSDAPEPSKSASSIPDGASIRKETPVQPWESSIDSSLTSEEREQKRKQATGRATFVQGLVLSTLFGD

SEQ ID NO: 10689 - protein, 199 aa, Zea mays subsp. mays
  peptide (1)..(199): Ceres Seq. ID no. 12374180
  misc_feature (14)..(196): Pfam Name: Drought induced 19 protein (Di19) Pfam Description: Drought induced 19 protein (Di19)
  misc_feature (14)..(199): Homolog of NCBI NO: 18377875 NR Description: AT3g06760/F3E22_10 [Arabidopsis thaliana]
  misc_feature (14)..(199): Homolog of NCBI NO: 28393233 NR Description: unknown protein [Arabidopsis thaliana]
  misc_feature (14)..(199): Homolog of NCBI NO: 25992529 NR Description: fiber protein Fb2 [Gossypium barbadense]
  misc_feature (14)..(199): Homolog of NCBI NO: 15240426 NR Description: drought-induced protein - like; protein id:
  misc_feature (14)..(199): Homolog of NCBI NO: 15230782 NR Description: unknown protein; protein id: At3g06760.1 thaliana] >gi|7549637|gb|AAF63822.1| unknown protein [Arabidopsis
  misc_feature (1)..(199): Homolog of NCBI NO: 15028023 NR Description: unknown protein [Arabidopsis thaliana]
  misc_feature (1)..(199): Homolog of NCBI NO: 1076316 NR Description: drought-induced protein Di19 - Arabidopsis
  misc_feature (1)..(199): Homolog of NCBI NO: 7485240 NR Description: hypothetical protein A_IG002P16.10 - Arabidopsis >gi|2191171|gb|AAB61057.1| similar to A. thaliana DI19 mRNA
  misc_feature (14)..(181): Homolog of NCBI NO: 13937216 NR Description: AT5g49230/K21P3_11 [Arabidopsis thaliana]
  misc_feature (14)..(181): Homolog of NCBI NO: 15239827 NR Description: drought-induced protein Di19-like protein; id: At5g49230.1, supported by cDNA: gi_13937215 [Arabidopsis
MEMALGLGDATWPEVACPYCYEDHDVASLCVHLEEDHPYEPHAAPCPICSQRVTRDMLNHMTMQHGYLFKNGHRSRRYIIPESHAISALSRDLRGTHLRALLGGGHGHRSSNAVTTNISSDPLLSSFGLGFSPSDAPEPSKSASSIPDGASIRKETPVQPWESSIDSSLTSEEREQKRKQATGRATFVQGLVLSTLFGD

SEQ ID NO: 10690 - DNA, 1151 bp, Zea mays subsp. mays
  misc_feature (1)..(1151): Ceres Seq. ID no. 12362748
  misc_feature: MA Experiment ID: 108528 Result: Up-regulated in Transcription
  misc_feature: MA Experiment 108528 PARAMETER Experiment Name: Zm_Imbibed_Seeds_P Parameter: Age (day) Value: 5 vs. 2
  misc_feature: MA Experiment 108528 PARAMETER Experiment Name: Zm_Imbibed_Seeds_P Parameter: Organism Value: Zea mays
  misc_feature: MA Experiment 108528 PARAMETER Experiment Name: Zm_Imbibed_Seeds_P Parameter: Plant Line Value: 35A19
  misc_feature: MA Experiment 108528 PARAMETER Experiment Name: Zm_Imbibed_Seeds_P Parameter: Tissue Value: Aerial vs. Embryo
  misc_feature: MA Experiment ID: 108530 Result: Up-regulated in Transcription
  misc_feature: MA Experiment 108530 PARAMETER Experiment Name: Zm_Imbibed_Seeds_P Parameter: Age (day) Value: 6 vs. 2
  misc_feature: MA Experiment 108530 PARAMETER Experiment Name: Zm_Imbibed_Seeds_P Parameter: Organism Value: Zea mays
  misc_feature: MA Experiment 108530 PARAMETER Experiment Name: Zm_Imbibed_Seeds_P Parameter: Plant Line Value: 35A19
  misc_feature: MA Experiment 108530 PARAMETER Experiment Name: Zm_Imbibed_Seeds_P Parameter: Tissue Value: Aerial vs. Embryo
  misc_feature: MA Experiment ID: 108545 Result: Up-regulated in Transcription
  misc_feature: MA Experiment 108545 PARAMETER Experiment Name: Zm_Imbibed_Seeds_P Parameter: Age (day) Value: 3 vs. 2
  misc_feature: MA Experiment 108545 PARAMETER Experiment Name: Zm_Imbibed_Seeds_P Parameter: Organism Value: Zea mays
  misc_feature: MA Experiment 108545 PARAMETER Experiment Name: Zm_Imbibed_Seeds_P Parameter: Plant Line Value: 35A19
  misc_feature: MA Experiment 108545 PARAMETER Experiment Name: Zm_Imbibed_Seeds_P Parameter: Tissue Value: Aerial vs. Embryo
  misc_feature: MA Experiment ID: 108547 Result: Up-regulated in Transcription
  misc_feature: MA Experiment 108547 PARAMETER Experiment Name: Zm_Imbibed_Seeds_P Parameter: Age (day) Value: 4 vs. 2
  misc_feature: MA Experiment 108547 PARAMETER Experiment Name: Zm_Imbibed_Seeds_P Parameter: Organism Value: Zea mays
  misc_feature: MA Experiment 108547 PARAMETER Experiment Name: Zm_Imbibed_Seeds_P Parameter: Plant Line Value: 35A19
  misc_feature: MA Experiment 108547 PARAMETER Experiment Name: Zm_Imbibed_Seeds_P Parameter: Tissue Value: Aerial vs. Embryo
  misc_feature: MA Experiment ID: 20000480 Result: Down-regulated in Transcription
  misc_feature: MA Experiment 20000480 PARAMETER Experiment Name: Zm_Drought_P Parameter: Age (day) Value: 11
  misc_feature: MA Experiment 20000480 PARAMETER Experiment Name: Zm_Drought_P Parameter: Organism Value: Zea mays
  misc_feature: MA Experiment 20000480 PARAMETER Experiment Name: Zm_Drought_P Parameter: Plant Line Value: 35A19
  misc_feature: MA Experiment 20000480 PARAMETER Experiment Name: Zm_Drought_P Parameter: Timepoint (hr) Value: 72
  misc_feature: MA Experiment 20000480 PARAMETER Experiment Name: Zm_Drought_P Parameter: Tissue Value: Aerial
  misc_feature: MA Experiment 20000480 PARAMETER Experiment Name: Zm_Drought_P Parameter: Treatment Value: Drought vs. No Drought
cccaggccccctccccacctccacctccaggcaccactggtcccacctcctcacctgcgaggatgctgctcgtgagtcaggcagcgaacggctccctctccgcgcggcggctgccgtcgaagccgccggggccgtccaccaccaacccctacccgctcttcgccaaccctcgcctcctgcgccgccgcctggcgctctccggcgctggcgccgaccaagccccgcgccgcgccgcgccgaccccagccgccgcgggcgagggcccctccgcctcctccaccgaggacccggtccttgtccgcgtcgccgacgacggcgtgccgctcgagggcgtcatccagattgagaagcccggggatgcggccgccgagtccaagctcgtctcctacgcgaagctgggtcttctggccggcggggacgtgttctgccttctgctgttctctgcgattggaaggttcagccatggcctgcccgtcctcgacgccgagacgttcaagacggccgaccccttcattgctgggtggctgctgagcgcctaccttcttggcggatttggcgatgatgccaaagggcgcaatggcgtcggaagcgcggttatcaccgcagctaaatcatgggctgttgggataccgttgggacttgctatccgagcagtgacgtctggtcatcttccaccaactccttttatcttggtaaccatgggaagtacaggggtcttgttaactgcatggcgtgctttggtatcacaactgttttccaaccagcaaaagcagcaggatgatgtctaccggcgtggaagtccttttgagctttttgagctactcacatcgctggtgcggaggtggtgacatctgaaggctgaagcctatagaaggtaagaagggcattgttccgctctggtatccgcaatcatcaggttcagccatctgtgtctattgtgtaagtacaattttgaaggtgaagaagagcaggctaaaacctagtttggagcatttgccgaacccaaaaaatgtttggcaataacacgcccgcgatgttggtttagtatattatattatattcataagatgtactcatattcctgatcttccacttgtaaaattgtatccagcttaacaaatcctaatcgataagaccgttgcctcttgttc

SEQ ID NO: 10691 - protein, 281 aa, Zea mays subsp. mays
  peptide (1)..(281): Ceres Seq. ID no. 12362749
  misc_feature (22)..(281): Homolog of NCBI NO: 18401414 NR Description: expressed protein; protein id: At1g44920.1, by cDNA: gi_13878106, supported by cDNA: gi_17104772 [Arabidopsis >gi|8656004|gb|AAF78277.1|AC020576_21 Contains similarity to
  misc_feature (22)..(279): Homolog of NCBI NO: 25405875 NR Description: protein F27F5.3 [imported] - Arabidopsis thaliana
  misc_feature (127)..(244): Homolog of NCBI NO: 22970530 NR Description: hypothetical protein [Chloroflexus aurantiacus]
  misc_feature (21)..(281): Homolog of NCBI NO: 28273393 NR Description: unknown protein [Oryza sativa (japonica
QAPSPPPPPGTTGPTSSPARMLLVSQAANGSLSARRLPSKPPGPSTTNPYPLFANPRLLRRRLALSGAGADQAPRRAAPTPAAAGEGPSASSTEDPVLVRVADDGVPLEGVIQIEKPGDAAAESKLVSYAKLGLLAGGDVFCLLLFSAIGRFSHGLPVLDAETFKTADPFIAGWLLSAYLLGGFGDDAKGRNGVGSAVITAAKSWAVGIPLGLAIRAVTSGHLPPTPFILVTMGSTGVLLTAWRALVSQLFSNQQKQQDDVYRRGSPFELFELLTSLVRRW

SEQ ID NO: 10692 - protein, 261 aa, Zea mays subsp. mays
  peptide (1)..(261): Ceres Seq. ID no. 12362750
  misc_feature (1)..(261): Homolog of NCBI NO: 28273393 NR Description: unknown protein [Oryza sativa (japonica
  misc_feature (2)..(261): Homolog of NCBI NO: 18401414 NR Description: expressed protein; protein id: At1g44920.1, by cDNA: gi_13878106, supported by cDNA: gi_17104772 [Arabidopsis >gi|8656004|gb|AAF78277.1|AC020576_21 Contains similarity to
  misc_feature (2)..(259): Homolog of NCBI NO: 25405875 NR Description: protein F27F5.3 [imported] - Arabidopsis thaliana
  misc_feature (107)..(224): Homolog of NCBI NO: 22970530 NR Description: hypothetical protein [Chloroflexus aurantiacus]
MLLVSQAANGSLSARRLPSKPPGPSTTNPYPLFANPRLLRRRLALSGAGADQAPRRAAPTPAAAGEGPSASSTEDPVLVRVADDGVPLEGVIQIEKPGDAAAESKLVSYAKLGLLAGGDVFCLLLFSAIGRFSHGLPVLDAETFKTADPFIAGWLLSAYLLGGFGDDAKGRNGVGSAVITAAKSWAVGIPLGLAIRAVTSGHLPPTPFILVTMGSTGVLLTAWRALVSQLFSNQQKQQDDVYRRGSPFELFELLTSLVRRW

SEQ ID NO: 10693 - DNA, 1362 bp, Zea mays subsp. mays
  misc_feature (1)..(1362): Ceres Seq. ID no. 13492731
  misc_feature: MA Experiment ID: 108522 Result: Up-regulated in Transcription
  misc_feature: MA Experiment 108522 PARAMETER Experiment Name: Zm_42deg_Heat_P Parameter: Age (day) Value: 8
  misc_feature: MA Experiment 108522 PARAMETER Experiment Name: Zm_42deg_Heat_P Parameter: Organism Value: Zea mays
  misc_feature: MA Experiment 108522 PARAMETER Experiment Name: Zm_42deg_Heat_P Parameter: Plant Line Value: 35A19
  misc_feature: MA Experiment 108522 PARAMETER Experiment Name: Zm_42deg_Heat_P Parameter: Temperature (deg C) Value: 42 vs. 22
  misc_feature: MA Experiment 108522 PARAMETER Experiment Name: Zm_42deg_Heat_P Parameter: Timepoint (hr) Value: 1
  misc_feature: MA Experiment 108522 PARAMETER Experiment Name: Zm_42deg_Heat_P Parameter: Tissue Value: Aerial
  misc_feature: MA Experiment ID: 108523 Result: Up-regulated in Transcription
  misc_feature: MA Experiment 108523 PARAMETER Experiment Name: Zm_42deg_Heat_P Parameter: Age (day) Value: 8
  misc_feature: MA Experiment 108523 PARAMETER Experiment Name: Zm_42deg_Heat_P Parameter: Organism Value: Zea mays
  misc_feature: MA Experiment 108523 PARAMETER Experiment Name: Zm_42deg_Heat_P Parameter: Plant Line Value: 35A19
  misc_feature: MA Experiment 108523 PARAMETER Experiment Name: Zm_42deg_Heat_P Parameter: Temperature (deg C) Value: 42 vs. 22
  misc_feature: MA Experiment 108523 PARAMETER Experiment Name: Zm_42deg_Heat_P Parameter: Timepoint (hr) Value: 6
  misc_feature: MA Experiment 108523 PARAMETER Experiment Name: Zm_42deg_Heat_P Parameter: Tissue Value: Aerial
  misc_feature: MA Experiment ID: 108527 Result: Up-regulated in Transcription
  misc_feature: MA Experiment 108527 PARAMETER Experiment Name: Zm_5mM_NO_P Parameter: Age (day) Value: 8
  misc_feature: MA Experiment 108527 PARAMETER Experiment Name: Zm_5mM_NO_P Parameter: Organism Value: Zea mays
  misc_feature: MA Experiment 108527 PARAMETER Experiment Name: Zm_5mM_NO_P Parameter: Plant Line Value: 35A19
  misc_feature: MA Experiment 108527 PARAMETER Experiment Name: Zm_5mM_NO_P Parameter: Timepoint (hr) Value: 6
  misc_feature: MA Experiment 108527 PARAMETER Experiment Name: Zm_5mM_NO_P Parameter: Tissue Value: Aerial
  misc_feature: MA Experiment 108527 PARAMETER Experiment Name: Zm_5mM_NO_P Parameter: Treatment Value: 5mM NO vs. No Treatment
  misc_feature: MA Experiment ID: 108536 Result: Up-regulated in Transcription
  misc_feature: MA Experiment 108536 PARAMETER Experiment Name: Zm_Meristem_P Parameter: Age (day) Value: 8
  misc_feature: MA Experiment 108536 PARAMETER Experiment Name: Zm_Meristem_P Parameter: Organism Value: Zea mays
  misc_feature: MA Experiment 108536 PARAMETER Experiment Name: Zm_Meristem_P Parameter: Plant Line Value: 35A19
  misc_feature: MA Experiment 108536 PARAMETER Experiment Name: Zm_Meristem_P Parameter: Tissue Value: Shoot Meristem vs. Above Shoot Meristem
  misc_feature: MA Experiment ID: 108543 Result: Down-regulated in Transcription
  misc_feature: MA Experiment ID: 108547 Result: Down-regulated in Transcription
  misc_feature: MA Experiment 108547 PARAMETER Experiment Name: Zm_Imbibed_Seeds_P Parameter: Age (day) Value: 4 vs. 2
  misc_feature: MA Experiment 108547 PARAMETER Experiment Name: Zm_Imbibed_Seeds_P Parameter: Organism Value: Zea mays
  misc_feature: MA Experiment 108547 PARAMETER Experiment Name: Zm_Imbibed_Seeds_P Parameter: Plant Line Value: 35A19
  misc_feature: MA Experiment 108547 PARAMETER Experiment Name: Zm_Imbibed_Seeds_P Parameter: Tissue Value: Aerial vs. Embryo
  misc_feature: MA Experiment ID: 108559 Result: Up-regulated in Transcription
  misc_feature: MA Experiment 108559 PARAMETER Experiment Name: Zm_5mM_NO_P Parameter: Age (day) Value: 8
  misc_feature: MA Experiment 108559 PARAMETER Experiment Name: Zm_5mM_NO_P Parameter: Organism Value: Zea mays
  misc_feature: MA Experiment 108559 PARAMETER Experiment Name: Zm_5mM_NO_P Parameter: Plant Line Value: 35A19
  misc_feature: MA Experiment 108559 PARAMETER Experiment Name: Zm_5mM_NO_P Parameter: Timepoint (hr) Value: 12
  misc_feature: MA Experiment 108559 PARAMETER Experiment Name: Zm_5mM_NO_P Parameter: Tissue Value: Aerial
  misc_feature: MA Experiment 108559 PARAMETER Experiment Name: Zm_5mM_NO_P Parameter: Treatment Value: 5mM NO vs. No Treatment
  misc_feature: MA Experiment ID: 20000477 Result: Down-regulated in Transcription
  misc_feature: MA Experiment 20000477 PARAMETER Experiment Name: Zm_5mM_SA_P Parameter: Age (day) Value: 10
  misc_feature: MA Experiment 20000477 PARAMETER Experiment Name: Zm_5mM_SA_P Parameter: Organism Value: Zea mays
  misc_feature: MA Experiment 20000477 PARAMETER Experiment Name: Zm_5mM_SA_P Parameter: Plant Line Value: 35A19
  misc_feature: MA Experiment 20000477 PARAMETER Experiment Name: Zm_5mM_SA_P Parameter: Timepoint (hr) Value: 48
  misc_feature: MA Experiment 20000477 PARAMETER Experiment Name: Zm_5mM_SA_P Parameter: Tissue Value: Aerial
  misc_feature: MA Experiment 20000477 PARAMETER Experiment Name: Zm_5mM_SA_P Parameter: Treatment Value: 5mM SA vs. No Treatment
  misc_feature: MA Experiment ID: 20000478 Result: Down-regulated in Transcription
  misc_feature: MA Experiment 20000478 PARAMETER Experiment Name: Zm_5mM_SA_P Parameter: Age (day) Value: 11
  misc_feature: MA Experiment 20000478 PARAMETER Experiment Name: Zm_5mM_SA_P Parameter: Organism Value: Zea mays
  misc_feature: MA Experiment 20000478 PARAMETER Experiment Name: Zm_5mM_SA_P Parameter: Plant Line Value: 35A19
  misc_feature: MA Experiment 20000478 PARAMETER Experiment Name: Zm_5mM_SA_P Parameter: Timepoint (hr) Value: 72
  misc_feature: MA Experiment 20000478 PARAMETER Experiment Name: Zm_5mM_SA_P Parameter: Tissue Value: Aerial
  misc_feature: MA Experiment 20000478 PARAMETER Experiment Name: Zm_5mM_SA_P Parameter: Treatment Value: 5mM SA vs. No Treatment
  misc_feature: MA Experiment ID: 20000535 Result: Down-regulated in Transcription
  misc_feature: MA Experiment 20000535 PARAMETER Experiment Name: Zm_Hybrid_Seed_Dev_P Parameter: DAP Value: 30 vs. 12
  misc_feature: MA Experiment 20000535 PARAMETER Experiment Name: Zm_Hybrid_Seed_Dev_P Parameter: Organism Value: Zea mays
  misc_feature: MA Experiment 20000535 PARAMETER Experiment Name: Zm_Hybrid_Seed_Dev_P Parameter: Plant Line Value: 35A19
  misc_feature: MA Experiment 20000535 PARAMETER Experiment Name: Zm_Hybrid_Seed_Dev_P Parameter: Tissue Value: Embryo vs. Unfert Floret
  misc_feature: MA Experiment ID: 20000627 Result: Down-regulated in Transcription
  misc_feature: MA Experiment 20000627 PARAMETER Experiment Name: Zm_Herbicide-Treatments_P Parameter: Timepoint (hr) Value: 12
  misc_feature: MA Experiment 20000627 PARAMETER Experiment Name: Zm_Herbicide-Treatments_P Parameter: Tissue Value: Aerial
  misc_feature: MA Experiment 20000627 PARAMETER Experiment Name: Zm_Herbicide-Treatments_P Parameter: Treatment Value: Finale vs. No Treatment
  misc_feature: MA Experiment ID: 20000629 Result: Down-regulated in Transcription
  misc_feature: MA Experiment 20000629 PARAMETER Experiment Name: Zm_Herbicide-Treatments_P Parameter: Timepoint (hr) Value: 12
  misc_feature: MA Experiment 20000629 PARAMETER Experiment Name: Zm_Herbicide-Treatments_P Parameter: Tissue Value: Aerial
  misc_feature: MA Experiment 20000629 PARAMETER Experiment Name: Zm_Herbicide-Treatments_P Parameter: Treatment Value: Trimec vs. No Treatment
  misc_feature: MA Experiment ID: 20000630 Result: Up-regulated in Transcription
  misc_feature: MA Experiment 20000630 PARAMETER Experiment Name: Zm_Herbicide-Treatments_P Parameter: Timepoint (hr) Value: 4
  misc_feature: MA Experiment 20000630 PARAMETER Experiment Name: Zm_Herbicide-Treatments_P Parameter: Tissue Value: Aerial
  misc_feature: MA Experiment 20000630 PARAMETER Experiment Name: Zm_Herbicide-Treatments_P Parameter: Treatment Value: Roundup vs. No Treatment
caacaacttgggcgcgcgcgcggccgggtagcaaaagctcgcgatctgtgcgcccaccaccgggaggagcgaagatgcggatgagctgcaatggctgccgcgtcctgcgcaagggctgcggcgacgcctgcaccatccgcccctgcctgcagtggatcgaggcccccgaggcgcaggccaacgccaccgtcttcctcgcaaagttctacggccgggcgggcctgctcaacctgctcgccgccgcgcccgacgacggcgtccgccccgcggtcttccgctccctgctctacgaggcgtgcggccgcatcgtcaacccggtctacggctccgtcggcctgctctggtcgcgccagtggcacaggtgcgccgacgccgtcgaggccgtgctcaggggggaccccgtcgtgcaggtcgacgccgggtccgacgccgccgctgccccgccgctgctcgccggcgncaggccgccgccgccggccgccttcgacatccgccacgtccccagggatcccgacgccaccgccgccgacctcctccgcgccggccgcaagaggttcaagcgcgcgggttcgtcttccaacgcctccaaggcgaagcccctgcccctcgagctcgagggcaaggccggcaacaacgaacgcgcgtcgcccagccctcnnccgacgnnacaactgagaggcggaggagctgcagccggtgccgatggtcgtcgagccagaacacggcgaggagtccgccggcagccacgaccaccacctgcagctgcaggggtggtcggaggaggacaccgacgtggaggcggcctcacacgtgagccaagccgaggctgagccgccagccagcagccagagccaggtgctggtagcggatcaggaggaagaggaggttgggctcgagctcacgcttgggttcgagcctgtcgtcaggcagcagccgaggtcgtcgcgctgcgacaagagcggcttgagcgcggcatcgagcctcatcggcctgcggctgcagctgccggccgcctaagcacaggcacagctcgcacctaaacgaatagagcagttttgcgaccctgcgcctgcggtgtttgcttaaaaataagcttttggacccccgggtgccaggagacacacagtagccaacttcaaattttctaggttttgtttatctttttcaatttttcttcttgtctttaactgtaaaagttgatggactgcacaattactcaggtagagggggtttggttccccgatcaaagagggcgtttggttactcggtttagttcttatatcgaatgtttaaatgccagttataagtattatatgtagtatatttaaaaattaattatataaatgaagactaaacattagt

SEQ ID NO: 10694 - protein, 275 aa, Zea mays subsp. mays
  peptide (1)..(275): Ceres Seq. ID no. 13492732
  misc_feature (28)..(134): Pfam Name: Protein of unknown function DUF260 Pfam Description: Protein of unknown function DUF260
  misc_feature (25)..(223): Homolog of NCBI NO: 34914608 NR Description: P0520B06.17 [Oryza sativa (japonica
  misc_feature (25)..(215): Homolog of NCBI NO: 18396229 NR Description: lateral organ boundaries (LOB) domain protein 41 [Arabidopsis thaliana] >gi|27805498|sp|Q9M886|LB41_ARATH LOB protein 41 >gi|6957718|gb|AAF32462.1| unknown protein
  misc_feature (25)..(215): Homolog of NCBI NO: 21554191 NR Description: unknown [Arabidopsis thaliana]
  misc_feature (25)..(195): Homolog of NCBI NO: 34895540 NR Description: unnamed protein product [Oryza sativa (japonica group)] >gi|9558469|dbj|BAB03390.1| unnamed protein product
  misc_feature (25)..(203): Homolog of NCBI NO: 15219829 NR Description: lateral organ boundaries (LOB) domain family
  misc_feature (25)..(221): Homolog of NCBI NO: 15221429 NR Description: lateral organ boundaries (LOB) domain protein 42 [Arabidopsis thaliana] >gi|29427986|sp|Q9CA30|LB42_ARATH LOB
  misc_feature (27)..(231): Homolog of NCBI NO: 40539088 NR Description: expressed protein [Oryza sativa (japonica
  misc_feature (27)..(150): Homolog of NCBI NO: 15235604 NR Description: lateral organ boundaries (LOB) domain family
  misc_feature (27)..(150): Homolog of NCBI NO: 21592894 NR Description: unknown [Arabidopsis thaliana]
  misc_feature (27)..(147): Homolog of NCBI NO: 15229644 NR Description: lateral organ boundaries (LOB) domain protein, [Arabidopsis thaliana] >gi|29428046|sp|Q9SN23|LB38_ARATH LOB
  misc_feature (153)..(153): Xaa is any aa, unknown or other
  misc_feature (219)..(219): Xaa is any aa, unknown or other
  misc_feature (222)..(222): Xaa is any aa, unknown or other
TTWARARPGSKSSRSVRPPPGGAKMRMSCNGCRVLRKGCGDACTIRPCLQWIEAPEAQANATVFLAKFYGRAGLLNLLAAAPDDGVRPAVFRSLLYEACGRIVNPVYGSVGLLWSRQWHRCADAVEAVLRGDPVVQVDAGSDAAAAPPLLAGXRPPPPAAFDIRHVPRDPDATAADLLRAGRKRFKRAGSSSNASKAKPLPLELEGKAGNNERASPSPXPTXQLRGGGAAAGADGRRARTRRGVRRQPRPPPAAAGVVGGGHRRGGGLTREPSRG

SEQ ID NO: 10695 - protein, 251 aa, Zea mays subsp. mays
  peptide (1)..(251): Ceres Seq. ID no. 13492733
  misc_feature (4)..(110): Pfam Name: Protein of unknown function DUF260 Pfam Description: Protein of unknown function DUF260
  misc_feature (1)..(199): Homolog of NCBI NO: 34914608 NR Description: P0520B06.17 [Oryza sativa (japonica
  misc_feature (1)..(191): Homolog of NCBI NO: 18396229 NR Description: lateral organ boundaries (LOB) domain protein 41 [Arabidopsis thaliana] >gi|27805498|sp|Q9M886|LB41_ARATH LOB protein 41 >gi|6957718|gb|AAF32462.1| unknown protein
  misc_feature (1)..(191): Homolog of NCBI NO: 21554191 NR Description: unknown [Arabidopsis thaliana]
  misc_feature (1)..(171): Homolog of NCBI NO: 34895540 NR Description: unnamed protein product [Oryza sativa (japonica group)] >gi|9558469|dbj|BAB03390.1| unnamed protein product
  misc_feature (1)..(179): Homolog of NCBI NO: 15219829 NR Description: lateral organ boundaries (LOB) domain family
  misc_feature (1)..(197): Homolog of NCBI NO: 15221429 NR Description: lateral organ boundaries (LOB) domain protein 42 [Arabidopsis thaliana] >gi|29427986|sp|Q9CA30|LB42_ARATH LOB
  misc_feature (3)..(207): Homolog of NCBI NO: 40539088 NR Description: expressed protein [Oryza sativa (japonica
  misc_feature (3)..(126): Homolog of NCBI NO: 15235604 NR Description: lateral organ boundaries (LOB) domain family
  misc_feature (3)..(126): Homolog of NCBI NO: 21592894 NR Description: unknown [Arabidopsis thaliana]
  misc_feature (3)..(123): Homolog of NCBI NO: 15229644 NR Description: lateral organ boundaries (LOB) domain protein, [Arabidopsis thaliana] >gi|29428046|sp|Q9SN23|LB38_ARATH LOB
  misc_feature (129)..(129): Xaa is any aa, unknown or other
  misc_feature (195)..(195): Xaa is any aa, unknown or other
  misc_feature (198)..(198): Xaa is any aa, unknown or other
MRMSCNGCRVLRKGCGDACTIRPCLQWIEAPEAQANATVFLAKFYGRAGLLNLLAAAPDDGVRPAVFRSLLYEACGRIVNPVYGSVGLLWSRQWHRCADAVEAVLRGDPVVQVDAGSDAAAAPPLLAGXRPPPPAAFDIRHVPRDPDATAADLLRAGRKRFKRAGSSSNASKAKPLPLELEGKAGNNERASPSPXPTXQLRGGGAAAGADGRRARTRRGVRRQPRPPPAAAGVVGGGHRRGGGLTREPSRG

SEQ ID NO: 10696 - protein, 249 aa, Zea mays subsp. mays
  peptide (1)..(249): Ceres Seq. ID no. 13492734
  misc_feature (2)..(108): Pfam Name: Protein of unknown function DUF260 Pfam Description: Protein of unknown function DUF260
  misc_feature (1)..(197): Homolog of NCBI NO: 34914608 NR Description: P0520B06.17 [Oryza sativa (japonica
  misc_feature (1)..(189): Homolog of NCBI NO: 18396229 NR Description: lateral organ boundaries (LOB) domain protein 41 [Arabidopsis thaliana] >gi|27805498|sp|Q9M886|LB41_ARATH LOB protein 41 >gi|6957718|gb|AAF32462.1| unknown protein
  misc_feature (1)..(189): Homolog of NCBI NO: 21554191 NR Description: unknown [Arabidopsis thaliana]
  misc_feature (1)..(169): Homolog of NCBI NO: 34895540 NR Description: unnamed protein product [Oryza sativa (japonica group)] >gi|9558469|dbj|BAB03390.1| unnamed protein product
  misc_feature (1)..(177): Homolog of NCBI NO: 15219829 NR Description: lateral organ boundaries (LOB) domain family
  misc_feature (1)..(195): Homolog of NCBI NO: 15221429 NR Description: lateral organ boundaries (LOB) domain protein 42 [Arabidopsis thaliana] >gi|29427986|sp|Q9CA30|LB42_ARATH LOB
  misc_feature (1)..(205): Homolog of NCBI NO: 40539088 NR Description: expressed protein [Oryza sativa (japonica
  misc_feature (1)..(124): Homolog of NCBI NO: 15235604 NR Description: lateral organ boundaries (LOB) domain family
  misc_feature (1)..(124): Homolog of NCBI NO: 21592894 NR Description: unknown [Arabidopsis thaliana]
  misc_feature (1)..(121): Homolog of NCBI NO: 15229644 NR Description: lateral organ boundaries (LOB) domain protein, [Arabidopsis thaliana] >gi|29428046|sp|Q9SN23|LB38_ARATH LOB
  misc_feature (127)..(127): Xaa is any aa, unknown or other
  misc_feature (193)..(193): Xaa is any aa, unknown or other
  misc_feature (196)..(196): Xaa is any aa, unknown or other
MSCNGCRVLRKGCGDACTIRPCLQWIEAPEAQANATVFLAKFYGRAGLLNLLAAAPDDGVRPAVFRSLLYEACGRIVNPVYGSVGLLWSRQWHRCADAVEAVLRGDPVVQVDAGSDAAAAPPLLAGXRPPPPAAFDIRHVPRDPDATAADLLRAGRKRFKRAGSSSNASKAKPLPLELEGKAGNNERASPSPXPTXQLRGGGAAAGADGRRARTRRGVRRQPRPPPAAAGVVGGGHRRGGGLTREPSRG

SEQ ID NO: 10697 - DNA, 1175 bp, Zea mays subsp. mays; identical to SEQ ID NO: 1897
  misc_feature (1)..(1175): Ceres Seq. ID no. 12566396
  misc_feature: MA Experiment ID: 108527 Result: Down-regulated in Transcription
  misc_feature: MA Experiment 108527 PARAMETER Experiment Name: Zm_5mM_NO_P Parameter: Age (day) Value: 8
  misc_feature: MA Experiment 108527 PARAMETER Experiment Name: Zm_5mM_NO_P Parameter: Organism Value: Zea mays
  misc_feature: MA Experiment 108527 PARAMETER Experiment Name: Zm_5mM_NO_P Parameter: Plant Line Value: 35A19
  misc_feature: MA Experiment 108527 PARAMETER Experiment Name: Zm_5mM_NO_P Parameter: Timepoint (hr) Value: 6
  misc_feature: MA Experiment 108527 PARAMETER Experiment Name: Zm_5mM_NO_P Parameter: Tissue Value: Aerial
  misc_feature: MA Experiment 108527 PARAMETER Experiment Name: Zm_5mM_NO_P Parameter: Treatment Value: 5mM NO vs. No Treatment
  misc_feature: MA Experiment ID: 108535 Result: Up-regulated in Transcription
  misc_feature: MA Experiment 108535 PARAMETER Experiment Name: Zm_Meristem_P Parameter: Age (day) Value: 8
  misc_feature: MA Experiment 108535 PARAMETER Experiment Name: Zm_Meristem_P Parameter: Organism Value: Zea mays
  misc_feature: MA Experiment 108535 PARAMETER Experiment Name: Zm_Meristem_P Parameter: Plant Line Value: 35A19
  misc_feature: MA Experiment 108535 PARAMETER Experiment Name: Zm_Meristem_P Parameter: Tissue Value: Root Meristem vs. Above Root Meristem
  misc_feature: MA Experiment ID: 108544 Result: Down-regulated in Transcription
  misc_feature: MA Experiment ID: 108559 Result: Down-regulated in Transcription
  misc_feature: MA Experiment 108559 PARAMETER Experiment Name: Zm_5mM_NO_P Parameter: Age (day) Value: 8
  misc_feature: MA Experiment 108559 PARAMETER Experiment Name: Zm_5mM_NO_P Parameter: Organism Value: Zea mays
  misc_feature: MA Experiment 108559 PARAMETER Experiment Name: Zm_5mM_NO_P Parameter: Plant Line Value: 35A19
  misc_feature: MA Experiment 108559 PARAMETER Experiment Name: Zm_5mM_NO_P Parameter: Timepoint (hr) Value: 12
  misc_feature: MA Experiment 108559 PARAMETER Experiment Name: Zm_5mM_NO_P Parameter: Tissue Value: Aerial
  misc_feature: MA Experiment 108559 PARAMETER Experiment Name: Zm_5mM_NO_P Parameter: Treatment Value: 5mM NO vs. No Treatment

SEQ ID NO: 10698 - protein, 283 aa, Zea mays subsp. mays; identical to SEQ ID NO: 1898
  peptide (1)..(283): Ceres Seq. ID no. 12566397
  misc_feature (69)..(273): Pfam Name: ER lumen protein retaining receptor Pfam Description: ER lumen protein retaining receptor
  misc_feature (69)..(283): Homolog of NCBI NO: 6685428 NR Description: ER lumen protein retaining receptor (HDEL (PGP169- 12) >gi|4105782|gb|AAD02548.1| PGPS/D6 [Petunia x
  misc_feature (69)..(283): Homolog of NCBI NO: 21592401 NR Description: ER lumen retaining receptor (HDEL receptor),
  misc_feature (69)..(283): Homolog of NCBI NO: 18404390 NR Description: ER lumen retaining receptor (HDEL receptor), protein id: At3g25040.1, supported by cDNA: 23341., supported by gi_17380929 [Arabidopsis thaliana] >gi|17380930|gb|AAL36277.1|
  misc_feature (69)..(283): Homolog of NCBI NO: 9293986 NR Description: ER lumen protein-retaining receptor-like protein
  misc_feature (69)..(283): Homolog of NCBI NO: 18397049 NR Description: ER lumen protein retaining receptor; protein id: supported by cDNA: gi_20260681 [Arabidopsis thaliana]
  misc_feature (69)..(283): Homolog of NCBI NO: 14285310 NR Description: ERD2 protein [Scherffelia dubia]
  misc_feature (69)..(282): Homolog of NCBI NO: 22656361 NR Description: endoplasmic reticulum retention receptor
  misc_feature (69)..(283): Homolog of NCBI NO: 17137442 NR Description: KDEL receptor CG5183-PA [Drosophila melanogaster]
  misc_feature (69)..(283): Homolog of NCBI NO: 17551392 NR Description: Yeast Endoplasmic Reticulum retention Defective
  misc_feature (69)..(270): Homolog of NCBI NO: 34870419 NR Description: similar to KDEL (Lys-Asp-Glu-Leu) endoplasmic

SEQ ID NO: 10699 - protein, 215 aa, Zea mays subsp. mays; identical to SEQ ID NO: 1899
  peptide (1)..(215): Ceres Seq. ID no. 12566398
  misc_feature (1)..(205): Pfam Name: ER lumen protein retaining receptor Pfam Description: ER lumen protein retaining receptor
  misc_feature (1)..(215): Homolog of NCBI NO: 6685428 NR Description: ER lumen protein retaining receptor (HDEL (PGP169- 12) >gi|4105782|gb|AAD02548.1| PGPS/D6 [Petunia x
  misc_feature (1)..(215): Homolog of NCBI NO: 21592401 NR Description: ER lumen retaining receptor (HDEL receptor),
  misc_feature (1)..(215): Homolog of NCBI NO: 18404390 NR Description: ER lumen retaining receptor (HDEL receptor), protein id: At3g25040.1, supported by cDNA: 23341., supported by gi_17380929 [Arabidopsis thaliana] >gi|17380930|gb|AAL36277.1|
  misc_feature (1)..(215): Homolog of NCBI NO: 9293986 NR Description: ER lumen protein-retaining receptor-like protein
  misc_feature (1)..(215): Homolog of NCBI NO: 18397049 NR Description: ER lumen protein retaining receptor; protein id: supported by cDNA: gi_20260681 [Arabidopsis thaliana]
  misc_feature (1)..(215): Homolog of NCBI NO: 14285310 NR Description: ERD2 protein [Scherffelia dubia]
  misc_feature (1)..(214): Homolog of NCBI NO: 22656361 NR Description: endoplasmic reticulum retention receptor
  misc_feature (1)..(215): Homolog of NCBI NO: 17137442 NR Description: KDEL receptor CG5183-PA [Drosophila melanogaster]
  misc_feature (1)..(215): Homolog of NCBI NO: 17551392 NR Description: Yeast Endoplasmic Reticulum retention Defective
  misc_feature (1)..(202): Homolog of NCBI NO: 34870419 NR Description: similar to KDEL (Lys-Asp-Glu-Leu) endoplasmic

SEQ ID NO: 10700 - protein, 206 aa, Zea mays subsp. mays; identical to SEQ ID NO: 1900
  peptide (1)..(206): Ceres Seq. ID no. 12566399
  misc_feature (1)..(196): Pfam Name: ER lumen protein retaining receptor Pfam Description: ER lumen protein retaining receptor
  misc_feature (1)..(206): Homolog of NCBI NO: 6685428 NR Description: ER lumen protein retaining receptor (HDEL (PGP169- 12) >gi|4105782|gb|AAD02548.1| PGPS/D6 [Petunia x
  misc_feature (1)..(206): Homolog of NCBI NO: 21592401 NR Description: ER lumen retaining receptor (HDEL receptor),
  misc_feature (1)..(206): Homolog of NCBI NO: 18404390 NR Description: ER lumen retaining receptor (HDEL receptor), protein id: At3g25040.1, supported by cDNA: 23341., supported by gi_17380929 [Arabidopsis thaliana] >gi|17380930|gb|AAL36277.1|
  misc_feature (1)..(206): Homolog of NCBI NO: 9293986 NR Description: ER lumen protein-retaining receptor-like protein
  misc_feature (1)..(206): Homolog of NCBI NO: 18397049 NR Description: ER lumen protein retaining receptor; protein id: supported by cDNA: gi_20260681 [Arabidopsis thaliana]
  misc_feature (1)..(206): Homolog of NCBI NO: 14285310 NR Description: ERD2 protein [Scherffelia dubia]
  misc_feature (1)..(205): Homolog of NCBI NO: 22656361 NR Description: endoplasmic reticulum retention receptor
  misc_feature (1)..(206): Homolog of NCBI NO: 17137442 NR Description: KDEL receptor CG5183-PA [Drosophila melanogaster]
  misc_feature (1)..(206): Homolog of NCBI NO: 17551392 NR Description: Yeast Endoplasmic Reticulum retention Defective
  misc_feature (1)..(193): Homolog of NCBI NO: 34870419 NR Description: similar to KDEL (Lys-Asp-Glu-Leu) endoplasmic

SEQ ID NO: 10701 - DNA, 1733 bp, Zea mays subsp. mays
  misc_feature (1)..(1733): Ceres Seq. ID no. 12374173
  misc_feature: MA Experiment ID: 108522 Result: Down-regulated in Transcription
  misc_feature: MA Experiment 108522 PARAMETER Experiment Name: Zm_42deg_Heat_P Parameter: Age (day) Value: 8
  misc_feature: MA Experiment 108522 PARAMETER Experiment Name: Zm_42deg_Heat_P Parameter: Organism Value: Zea mays
  misc_feature: MA Experiment 108522 PARAMETER Experiment Name: Zm_42deg_Heat_P Parameter: Plant Line Value: 35A19
  misc_feature: MA Experiment 108522 PARAMETER Experiment Name: Zm_42deg_Heat_P Parameter: Temperature (deg C) Value: 42 vs. 22
  misc_feature: MA Experiment 108522 PARAMETER Experiment Name: Zm_42deg_Heat_P Parameter: Timepoint (hr) Value: 1
  misc_feature: MA Experiment 108522 PARAMETER Experiment Name: Zm_42deg_Heat_P Parameter: Tissue Value: Aerial
gatacaaaccctaatccccaccgccgcccgaccccgcagcctcattccaggcgcatcgacagcgacggcacgcgctggtccatccacggtccaccagtcgacctcgctcacccgcgagccgcgggccttgtcctcgtcgtcgttcataggcagtgcagcctcattcaccggtcgtcctcgtccaccagcgaattgaagttcctcgcccatcagccaacgacgtcgacgcggcctcgttctcgtccagcccacagcccagcgtgctgcacgtcgccttgctgttgctgtgctgctgctgcctatgtttcaaatgtcccaactggacctagccctcggacggaagtgcccaggacctgtcaatatatgccagctgtgcggcgagccagagctgagcggcgtacagatttcttgcccttgatttgatcaagggcaaaagtgtccggccactagctgccaatataataaaataagtcccgccgccattcaccaaatcggccgccagggctccgtcctctagctgctccgtccggtggtccagccagctgcctagctccctccgacggtccggccagcaccgcctcctgctcgtggccttgcccagctcctccgctctccggtgagacgtagatcttggtgcggcagggcgctacggagggggggtggtgctgttgtgcgtgtgctggtggcctggtgctagcaaccaagcctattatgaaatctggtgctagttaactgctgaaaggtacagtactatggatcacgaatgatgtattgtatgcaattcggcccggagcgtcactaaatcctggatccgcattggccgcagcgccagtggccagtgtccagcctgccagctcagcccggcggcaagcgcccagcggctggctcgggcagcggccagtgaccagcagccgactcgtttcttcggcgttctccgccactgccccccagctatgcaccctgttccagtcccctcccagccctttaccgcaactcctgcaaaaaaacttgtttcaaggagcactgctgtgaggaaggccatccattttgtcaacctgcggacagctggaaggtctagtggaaacctggctatgaactccgtaccaaaacccgcccctgggtccgaaacatctgggagggaggattttgctgtgggggataaggatgctgtggtcattgttgatcatgggtcaagacgccaagaatccaatctcatgctaaatgactttgttgagatgttccgggcgaagactagctataggattgttgagcctgctcatatggagctagcggagcctactataaaggatgcttttggaaaatgtgtgcaacaaggagcatctcgagttattattagtccatatttcctttcccctggacgacactggaagcaagacattcctgctttagcagcagaggcatcaaaggagcactcaaatataccctatattgtcactgcccctcttgggctgcatgagcttatggtggatatcatgaatgatcgcatcaagtactgcctgcgacatgttgcgggtgatgtcgatgagtgtacagtgtgtgccggaactggaaagtgccgcatgtactcctgatggagcatacctggtaattgtttcttggtattaccatttattgtgagatctggagaatacgagatctgacgagtgtatagttcattttgtaatcttggactgtccatattctgagcagattgtcagaattagacaagtgcc

SEQ ID NO: 10702 - protein, 212 aa, Zea mays subsp. mays
  peptide (1)..(212): Ceres Seq. ID no. 12374174
  misc_feature (76)..(188): Pfam Name: CbiX Pfam Description: CbiX
  misc_feature (58)..(212): Homolog of NCBI NO: 18402963 NR Description: expressed protein; protein id: At1g50170.1, by cDNA: 96741. [Arabidopsis thaliana] unknown protein [Arabidopsis thaliana]
  misc_feature (58)..(212): Homolog of NCBI NO: 21618095 NR Description: unknown [Arabidopsis thaliana]
  misc_feature (109)..(212): Homolog of NCBI NO: 25405354 NR Description: hypothetical protein F14I3.20 [imported] - thaliana >gi|5734782|gb|AAD50047.1|AC007980_12 Hypothetical
  misc_feature (58)..(110): Homolog of NCBI NO: 25405354 NR Description: hypothetical protein F14I3.20 [imported] - thaliana >gi|5734782|gb|AAD50047.1|AC007980_12 Hypothetical
  misc_feature (70)..(189): Homolog of NCBI NO: 39998091 NR Description: cbiX protein [Geobacter sulfurreducens PCA]
  misc_feature (70)..(189): Homolog of NCBI NO: 23054392 NR Description: hypothetical protein [Geobacter metallireducens]
  misc_feature (73)..(186): Homolog of NCBI NO: 21400014 NR Description: CbiX, CbiX [Bacillus anthracis A2012]
  misc_feature (73)..(186): Homolog of NCBI NO: 30020268 NR Description: CbiX protein [Bacillus cereus ATCC 14579]
  misc_feature (73)..(206): Homolog of NCBI NO: 15614059 NR Description: BH1496~unknown conserved protein [Bacillus
  misc_feature (71)..(185): Homolog of NCBI NO: 40642725 NR Description: ferrochelatase [Bacillus megaterium]
MHPVPVPSQPFTATPAKKLVSRSTAVRKAIHFVNLRTAGRSSGNLAMNSVPKPAPGSETSGREDFAVGDKDAVVIVDHGSRRQESNLMLNDFVEMFRAKTSYRIVEPAHMELAEPTIKDAFGKCVQQGASRVIISPYFLSPGRHWKQDIPALAAEASKEHSNIPYIVTAPLGLHELMVDIMNDRIKYCLRHVAGDVDECTVCAGTGKCRMYS

SEQ ID NO: 10703 - protein, 166 aa, Zea mays subsp. mays
  peptide (1)..(166): Ceres Seq. ID no. 12374175
  misc_feature (30)..(142): Pfam Name: CbiX Pfam Description: CbiX
  misc_feature (12)..(166): Homolog of NCBI NO: 18402963 NR Description: expressed protein; protein id: At1g50170.1, by cDNA: 96741. [Arabidopsis thaliana] unknown protein [Arabidopsis thaliana]
  misc_feature (12)..(166): Homolog of NCBI NO: 21618095 NR Description: unknown [Arabidopsis thaliana]
  misc_feature (63)..(166): Homolog of NCBI NO: 25405354 NR Description: hypothetical protein F14I3.20 [imported] - thaliana >gi|5734782|gb|AAD50047.1|AC007980_12 Hypothetical
  misc_feature (12)..(64): Homolog of NCBI NO: 25405354 NR Description: hypothetical protein F14I3.20 [imported] - thaliana >gi|5734782|gb|AAD50047.1|AC007980_12 Hypothetical
  misc_feature (24)..(143): Homolog of NCBI NO: 39998091 NR Description: cbiX protein [Geobacter sulfurreducens PCA]
  misc_feature (24)..(143): Homolog of NCBI NO: 23054392 NR Description: hypothetical protein [Geobacter metallireducens]
  misc_feature (27)..(140): Homolog of NCBI NO: 21400014 NR Description: CbiX, CbiX [Bacillus anthracis A2012]
  misc_feature (27)..(140): Homolog of NCBI NO: 30020268 NR Description: CbiX protein [Bacillus cereus ATCC 14579]
  misc_feature (27)..(160): Homolog of NCBI NO: 15614059 NR Description: BH1496~unknown conserved protein [Bacillus
  misc_feature (25)..(139): Homolog of NCBI NO: 40642725 NR Description: ferrochelatase [Bacillus megaterium]
MNSVPKPAPGSETSGREDFAVGDKDAVVIVDHGSRRQESNLMLNDFVEMFRAKTSYRIVEPAHMELAEPTIKDAFGKCVQQGASRVIISPYFLSPGRHWKQDIPALAAEASKEHSNIPYIVTAPLGLHELMVDIMNDRIKYCLRHVAGDVDECTVCAGTGKCRMYS

SEQ ID NO: 10704 - protein, 140 aa, Zea mays subsp. mays
  peptide (1)..(140): Ceres Seq. ID no. 12374176
DTNPNPHRRPTPQPHSRRIDSDGTRWSIHGPPVDLAHPRAAGLVLVVVHRQCSLIHRSSSSTSELKFLAHQPTTSTRPRSRPAHSPACCTSPCCCCAAAAYVSNVPTGPSPRTEVPRTCQYMPAVRRARAERRTDFLPLI

SEQ ID NO: 10705 - DNA, 1034 bp, Zea mays subsp. mays
  misc_feature (1)..(1034): Ceres Seq. ID no. 12363023
  misc_feature: MA Experiment ID: 108527 Result: Down-regulated in Transcription
  misc_feature: MA Experiment 108527 PARAMETER Experiment Name: Zm_5mM_NO_P Parameter: Age (day) Value: 8
  misc_feature: MA Experiment 108527 PARAMETER Experiment Name: Zm_5mM_NO_P Parameter: Organism Value: Zea mays
  misc_feature: MA Experiment 108527 PARAMETER Experiment Name: Zm_5mM_NO_P Parameter: Plant Line Value: 35A19
  misc_feature: MA Experiment 108527 PARAMETER Experiment Name: Zm_5mM_NO_P Parameter: Timepoint (hr) Value: 6
  misc_feature: MA Experiment 108527 PARAMETER Experiment Name: Zm_5mM_NO_P Parameter: Tissue Value: Aerial
  misc_feature: MA Experiment 108527 PARAMETER Experiment Name: Zm_5mM_NO_P Parameter: Treatment Value: 5mM NO vs. No Treatment
  misc_feature: MA Experiment ID: 108547 Result: Up-regulated in Transcription
  misc_feature: MA Experiment 108547 PARAMETER Experiment Name: Zm_Imbibed_Seeds_P Parameter: Age (day) Value: 4 vs. 2
  misc_feature: MA Experiment 108547 PARAMETER Experiment Name: Zm_Imbibed_Seeds_P Parameter: Organism Value: Zea mays
  misc_feature: MA Experiment 108547 PARAMETER Experiment Name: Zm_Imbibed_Seeds_P Parameter: Plant Line Value: 35A19
  misc_feature: MA Experiment 108547 PARAMETER Experiment Name: Zm_Imbibed_Seeds_P Parameter: Tissue Value: Aerial vs. Embryo
  misc_feature: MA Experiment ID: 20000492 Result: Up-regulated in Transcription
  misc_feature: MA Experiment 20000492 PARAMETER Experiment Name: Zm_Hybrid_Seed_Dev_P Parameter: DAP Value: 12
  misc_feature: MA Experiment 20000492 PARAMETER Experiment Name: Zm_Hybrid_Seed_Dev_P Parameter: Organism Value: Zea mays
  misc_feature: MA Experiment 20000492 PARAMETER Experiment Name: Zm_Hybrid_Seed_Dev_P Parameter: Plant Line Value: 35A19
  misc_feature: MA Experiment 20000492 PARAMETER Experiment Name: Zm_Hybrid_Seed_Dev_P Parameter: Tissue Value: Fert Kernel vs. Unfert Floret
acgcgaggtcacgagatatggcggacggcaagcgaggggaggattcggccgtggcgttgaagacctcgccgtcgtcggcggtgatggctgggggtttacgcggcgttagcaaccctctggaggagtggagcgggcgcgtgaaggcgattgaggccgggttccgcgcgtggatggcgaagcaacccatccaaatcgaggccgcggtgaccacggccgtgggggcggtgcagggcggggctctgggtgggctcatgggctcgctcacagctgacggcgggtcgccgttccccatcccgcagccgccgcccaacgccaacccagaggccatggcgtcgttcaagcaggcccaggctttagctggtggacccttggtgcaagcccggaactttgcagtcatgaccggcgcaaacgcaggcatatcttgtgtcatgagaaggatacgagggaaagaggatatccagggcagcatggcagctgctttcggttctggtgctcttttctccatagtgagcggaatgggaactcctaatccagtagcaaatgcagttacaactggtgttgcttttgcagtatttcaaggtggctttttcatgatcgggcagaaattctcaaagccaccaagtgaagatacatactactctcggacaagaagcatgctgcacaaactgggtcttgaaaagtatgagaagaatttcaagaggggtctcctcaatgatcaaacattaccactccttacggacagtgctctgagagatgtgaagatccctcctggacccagacttctcatactcgaccaaattaaaagggaccccgagctggttcgagcaaagtagcagtcacaattgtcgacagctggttctttctgggttgcatagggtttgaaagcgatgccgtctctagtttcttaataaactttctaggcaagcaagcaagaatttagttgtgctgtagttaattgttttttggccgatcagtttgcatcgatcctattaaattctgaacaacaggtatttatatgcatcttattcaaattt

SEQ ID NO: 10706 - protein, 276 aa, Zea mays subsp. mays
  peptide (1)..(276): Ceres Seq. ID no. 12363024
  misc_feature (55)..(202): Pfam Name: Tim17/Tim22/Tim23 family Pfam Description: Tim17/Tim22/Tim23 family
  misc_feature (33)..(268): Homolog of NCBI NO: 32487911 NR Description: OJ000315_02.15 [Oryza sativa (japonica
  misc_feature (9)..(272): Homolog of NCBI NO: 15238598 NR Description: putative protein; protein id: At5g24650.1, by cDNA: 5684., supported by cDNA: gi_17979478 [Arabidopsis >gi|10177865|dbj|BAB11217.1|
  misc_feature (26)..(272): Homolog of NCBI NO: 21593899 NR Description: unknown [Arabidopsis thaliana]
  misc_feature (20)..(272): Homolog of NCBI NO: 15229167 NR Description: putative protein; protein id: At3g49560.1, by cDNA: 15698., supported by cDNA: gi_13430557 [Arabidopsis
ARSRDMADGKRGEDSAVALKTSPSSAVMAGGLRGVSNPLEEWSGRVKAIEAGFRAWMAKQPIQIEAAVTTAVGAVQGGALGGLMGSLTADGGSPFPIPQPPPNANPEAMASFKQAQALAGGPLVQARNFAVMTGANAGISCVMRRIRGKEDIQGSMAAAFGSGALFSIVSGMGTPNPVANAVTTGVAFAVFQGGFFMIGQKFSKPPSEDTYYSRTRSMLHKLGLEKYEKNFKRGLLNDQTLPLLTDSALRDVKIPPGPRLLILDQIKRDPELVRAK

SEQ ID NO: 10707 - protein, 271 aa, Zea mays subsp. mays
  peptide (1)..(271): Ceres Seq. ID no. 12363025
  misc_feature (50)..(197): Pfam Name: Tim17/Tim22/Tim23 family Pfam Description: Tim17/Tim22/Tim23 family
  misc_feature (28)..(263): Homolog of NCBI NO: 32487911 NR Description: OJ000315_02.15 [Oryza sativa (japonica
  misc_feature (4)..(267): Homolog of NCBI NO: 15238598 NR Description: putative protein; protein id: At5g24650.1, by cDNA: 5684., supported by cDNA: gi_17979478 [Arabidopsis >gi|10177865|dbj|BAB11217.1|
  misc_feature (21)..(267): Homolog of NCBI NO: 21593899 NR Description: unknown [Arabidopsis thaliana]
  misc_feature (15)..(267): Homolog of NCBI NO: 15229167 NR Description: putative protein; protein id: At3g49560.1, by cDNA: 15698., supported by cDNA: gi_13430557 [Arabidopsis
MADGKRGEDSAVALKTSPSSAVMAGGLRGVSNPLEEWSGRVKAIEAGFRAWMAKQPIQIEAAVTTAVGAVQGGALGGLMGSLTADGGSPFPIPQPPPNANPEAMASFKQAQALAGGPLVQARNFAVMTGANAGISCVMRRIRGKEDIQGSMAAAFGSGALFSIVSGMGTPNPVANAVTTGVAFAVFQGGFFMIGQKFSKPPSEDTYYSRTRSMLHKLGLEKYEKNFKRGLLNDQTLPLLTDSALRDVKIPPGPRLLILDQIKRDPELVRAK

SEQ ID NO: 10708 - protein, 249 aa, Zea mays subsp. mays
  peptide (1)..(249): Ceres Seq. ID no. 12363026
  misc_feature (28)..(175): Pfam Name: Tim17/Tim22/Tim23 family Pfam Description: Tim17/Tim22/Tim23 family
  misc_feature (1)..(245): Homolog of NCBI NO: 15238598 NR Description: putative protein; protein id: At5g24650.1, by cDNA: 5684., supported by cDNA: gi_17979478 [Arabidopsis >gi|10177865|dbj|BAB11217.1|
  misc_feature (1)..(245): Homolog of NCBI NO: 21593899 NR Description: unknown [Arabidopsis thaliana]
  misc_feature (6)..(241): Homolog of NCBI NO: 32487911 NR Description: OJ000315_02.15 [Oryza sativa (japonica
  misc_feature (1)..(245): Homolog of NCBI NO: 15229167 NR Description: putative protein; protein id: At3g49560.1, by cDNA: 15698., supported by cDNA: gi_13430557 [Arabidopsis
MAGGLRGVSNPLEEWSGRVKAIEAGFRAWMAKQPIQIEAAVTTAVGAVQGGALGGLMGSLTADGGSPFPIPQPPPNANPEAMASFKQAQALAGGPLVQARNFAVMTGANAGISCVMRRIRGKEDIQGSMAAAFGSGALFSIVSGMGTPNPVANAVTTGVAFAVFQGGFFMIGQKFSKPPSEDTYYSRTRSMLHKLGLEKYEKNFKRGLLNDQTLPLLTDSALRDVKIPPGPRLLILDQIKRDPELVRAK

SEQ ID NO: 10709 - DNA, 1092 bp, Zea mays subsp. mays
  misc_feature (1)..(1092): Ceres Seq. ID no. 12372425
  misc_feature: MA Experiment ID: 108544 Result: Up-regulated in Transcription
ctcatccggagtcgtcgccaagaaccacagccaccgcgatggcgcagatcatcgatggcaaggccatcgccgccgacgtccgccgcgaggtcgccgccgatgtggccgcgctctcgtcagcccacggactcgtgccggggctggccgtggtcatcgtggggagcaggaaggactcgcagacgtacgtgaacatgaagcgcaaggcgtgcgccgaggtcggcatctgctccatcgacgtcgacctcccggaggacatctccgagaccgcgctcgtcgccgaggttcatcgcctcaacgctgaccccgcagtgcacgggatccttgtccagcttccacttcctaagcatatcaacgaagagaagatactgagcgagatttccatcgagaaagatgtggatggcttccatcctctcaacattggcaagcttgcaatgaaaggcagagagccactgttcgtaccatgtacgccaaaggggtgcatggagctcttgtcaaggagcggagtcactgttaaaggtaagcgggcagttgtggttggtcgcagcaacatcgtcgggctacctgtatccctgctccttctgaaggcagatgcgaccgtatctgttgtgcactcgcggacccctgatcctgaaagcattgtacgcgaagctgacatagtcatcgcggcagctgggcaggctatgatgatcaaaggtgactggatcaagccaggtgctgcggtcatcgatgtcgggacgaactccatcgatgaccctacccggaagtccgggtaccggctcgtcggcgatgtggatttcgcagcagcgagcaaggttgctgggtacctgactccggttcccggaggcgttggcccaatgacggtggcaatgctgctgaagaacacggtggatggggcaaagcgggggatagtcgagtagctacgttcatctcacttctcgttgctgtacggcctgtgttgcaaggatgtgagctgactcgaaaagcgtgtgttggttggtgtaacaatctgtttcccaagaataagaatgatagtcacagctgttttcctgtttaataaatgcaatgaagaaagaattttggctttgctgctgt

SEQ ID NO: 10710 - protein, 304 aa, Zea mays subsp. mays
  peptide (1)..(304): Ceres Seq. ID no. 12372426
  misc_feature (134)..(302): Pfam Name: Tetrahydrofolate dehydrogenase/cyclohydrolase, Pfam Description: Tetrahydrofolate dehydrogenase/cyclohydrolase,
  misc_feature (13)..(304): Homolog of NCBI NO: 12083525 NR Description: similar to Pisum sativum
  misc_feature (14)..(300): Homolog of NCBI NO: 21553669 NR Description: 5,10-methylenetetrahydrofolate methenyltetrahydrofolate cyclohydrolase, putative [Arabidopsis
  misc_feature (14)..(300): Homolog of NCBI NO: 15230449 NR Description: 5,10-methylenetetrahydrofolate methenyltetrahydrofolate cyclohydrolase, putative; protein id: supported by cDNA: 156450. [Arabidopsis thaliana]
  misc_feature (13)..(302): Homolog of NCBI NO: 11252953 NR Description: methylenetetrahydrofolate dehydrogenase (NADP)
  misc_feature (5)..(300): Homolog of NCBI NO: 15236888 NR Description: putative tetrahydrofolate synthase; protein id: supported by cDNA: gi_16649148 [Arabidopsis thaliana]
  misc_feature (16)..(300): Homolog of NCBI NO: 25284864 NR Description: methylenetetrahydrofolate dehydrogenase - Arabidopsis thaliana >gi|3786006|gb|AAC67352.1|
  misc_feature (16)..(300): Homolog of NCBI NO: 30687594 NR Description: tetrahydrofolate dehydrogenase/cyclohydrolase,
  misc_feature (13)..(300): Homolog of NCBI NO: 9992889 NR Description: C1-THFS protein [Yarrowia lipolytica]
  misc_feature (13)..(300): Homolog of NCBI NO: 23001349 NR Description: hypothetical protein [Magnetococcus sp. MC-1]
  misc_feature (4)..(300): Homolog of NCBI NO: 17988855 NR Description: METHYLENETETRAHYDROFOLATE DEHYDROGENASE / CYCLOHYDROLASE [Brucella melitensis] >gi|25284865|pir||AE3573
HPESSPRTTATAMAQIIDGKAIAADVRREVAADVAALSSAHGLVPGLAVVIVGSRKDSQTYVNMKRKACAEVGICSIDVDLPEDISETALVAEVHRLNADPAVHGILVQLPLPKHINEEKILSEISIEKDVDGFHPLNIGKLAMKGREPLFVPCTPKGCMELLSRSGVTVKGKRAVVVGRSNIVGLPVSLLLLKADATVSVVHSRTPDPESIVREADIVIAAAGQAMMIKGDWIKPGAAVIDVGTNSIDDPTRKSGYRLVGDVDFAAASKVAGYLTPVPGGVGPMTVAMLLKNTVDGAKRGIVE

SEQ ID NO: 10711 - protein, 292 aa, Zea mays subsp. mays
  peptide (1)..(292): Ceres Seq. ID no. 12372427
  misc_feature (122)..(290): Pfam Name: Tetrahydrofolate dehydrogenase/cyclohydrolase, Pfam Description: Tetrahydrofolate dehydrogenase/cyclohydrolase,
  misc_feature (1)..(292): Homolog of NCBI NO: 12083525 NR Description: similar to Pisum sativum
  misc_feature (2)..(288): Homolog of NCBI NO: 21553669 NR Description: 5,10-methylenetetrahydrofolate methenyltetrahydrofolate cyclohydrolase, putative [Arabidopsis
  misc_feature (2)..(288): Homolog of NCBI NO: 15230449 NR Description: 5,10-methylenetetrahydrofolate methenyltetrahydrofolate cyclohydrolase, putative; protein id: supported by cDNA: 156450. [Arabidopsis thaliana]
  misc_feature (1)..(290): Homolog of NCBI NO: 11252953 NR Description: methylenetetrahydrofolate dehydrogenase (NADP)
  misc_feature (1)..(288): Homolog of NCBI NO: 15236888 NR Description: putative tetrahydrofolate synthase; protein id: supported by cDNA: gi_16649148 [Arabidopsis thaliana]
  misc_feature (4)..(288): Homolog of NCBI NO: 25284864 NR Description: methylenetetrahydrofolate dehydrogenase - Arabidopsis thaliana >gi|3786006|gb|AAC67352.1|
  misc_feature (4)..(288): Homolog of NCBI NO: 30687594 NR Description: tetrahydrofolate dehydrogenase/cyclohydrolase,
  misc_feature (1)..(288): Homolog of NCBI NO: 9992889 NR Description: C1-THFS protein [Yarrowia lipolytica]
  misc_feature (1)..(288): Homolog of NCBI NO: 23001349 NR Description: hypothetical protein [Magnetococcus sp. MC-1]
  misc_feature (1)..(288): Homolog of NCBI NO: 17988855 NR Description: METHYLENETETRAHYDROFOLATE DEHYDROGENASE / CYCLOHYDROLASE [Brucella melitensis] >gi|25284865|pir||AE3573
MAQIIDGKAIAADVRREVAADVAALSSAHGLVPGLAVVIVGSRKDSQTYVNMKRKACAEVGICSIDVDLPEDISETALVAEVHRLNADPAVHGILVQLPLPKHINEEKILSEISIEKDVDGFHPLNIGKLAMKGREPLFVPCTPKGCMELLSRSGVTVKGKRAVVVGRSNIVGLPVSLLLLKADATVSVVHSRTPDPESIVREADIVIAAAGQAMMIKGDWIKPGAAVIDVGTNSIDDPTRKSGYRLVGDVDFAAASKVAGYLTPVPGGVGPMTVAMLLKNTVDGAKRGIVE

SEQ ID NO: 10712 - protein, 241 aa, Zea mays subsp. mays
  peptide (1)..(241): Ceres Seq. ID no. 12372428
  misc_feature (71)..(239): Pfam Name: Tetrahydrofolate dehydrogenase/cyclohydrolase, Pfam Description: Tetrahydrofolate dehydrogenase/cyclohydrolase,
  misc_feature (1)..(241): Homolog of NCBI NO: 12083525 NR Description: similar to Pisum sativum
  misc_feature (1)..(237): Homolog of NCBI NO: 21553669 NR Description: 5,10-methylenetetrahydrofolate methenyltetrahydrofolate cyclohydrolase, putative [Arabidopsis
  misc_feature (1)..(237): Homolog of NCBI NO: 15230449 NR Description: 5,10-methylenetetrahydrofolate methenyltetrahydrofolate cyclohydrolase, putative; protein id: supported by cDNA: 156450. [Arabidopsis thaliana]
  misc_feature (1)..(239): Homolog of NCBI NO: 11252953 NR Description: methylenetetrahydrofolate dehydrogenase (NADP)
  misc_feature (1)..(237): Homolog of NCBI NO: 15236888 NR Description: putative tetrahydrofolate synthase; protein id: supported by cDNA: gi_16649148 [Arabidopsis thaliana]
  misc_feature (1)..(237): Homolog of NCBI NO: 25284864 NR Description: methylenetetrahydrofolate dehydrogenase - Arabidopsis thaliana >gi|3786006|gb|AAC67352.1|
  misc_feature (1)..(237): Homolog of NCBI NO: 30687594 NR Description: tetrahydrofolate dehydrogenase/cyclohydrolase,
  misc_feature (1)..(237): Homolog of NCBI NO: 9992889 NR Description: C1-THFS protein [Yarrowia lipolytica]
  misc_feature (1)..(237): Homolog of NCBI NO: 23001349 NR Description: hypothetical protein [Magnetococcus sp. MC-1]
  misc_feature (1)..(237): Homolog of NCBI NO: 17988855 NR Description: METHYLENETETRAHYDROFOLATE DEHYDROGENASE / CYCLOHYDROLASE [Brucella melitensis] >gi|25284865|pir||AE3573
MKRKACAEVGICSIDVDLPEDISETALVAEVHRLNADPAVHGILVQLPLPKHINEEKILSEISIEKDVDGFHPLNIGKLAMKGREPLFVPCTPKGCMELLSRSGVTVKGKRAVVVGRSNIVGLPVSLLLLKADATVSVVHSRTPDPESIVREADIVIAAAGQAMMIKGDWIKPGAAVIDVGTNSIDDPTRKSGYRLVGDVDFAAASKVAGYLTPVPGGVGPMTVAMLLKNTVDGAKRGIVE

SEQ ID NO: 10713 - DNA, 1132 bp, Zea mays subsp. mays
  misc_feature (1)..(1132): Ceres Seq. ID no. 12368827
  misc_feature: MA Experiment ID: 108515 Result: Up-regulated in Transcription
  misc_feature: MA Experiment 108515 PARAMETER Experiment Name: Zm_2mM_SA_P Parameter: Age (day) Value: 8
  misc_feature: MA Experiment 108515 PARAMETER Experiment Name: Zm_2mM_SA_P Parameter: Organism Value: Zea mays
  misc_feature: MA Experiment 108515 PARAMETER Experiment Name: Zm_2mM_SA_P Parameter: Plant Line Value: 35A19
  misc_feature: MA Experiment 108515 PARAMETER Experiment Name: Zm_2mM_SA_P Parameter: Timepoint (hr) Value: 12
  misc_feature: MA Experiment 108515 PARAMETER Experiment Name: Zm_2mM_SA_P Parameter: Tissue Value: Aerial
  misc_feature: MA Experiment 108515 PARAMETER Experiment Name: Zm_2mM_SA_P Parameter: Treatment Value: 2mM SA vs. No Treatment
  misc_feature: MA Experiment ID: 108522 Result: Up-regulated in Transcription
  misc_feature: MA Experiment 108522 PARAMETER Experiment Name: Zm_42deg_Heat_P Parameter: Age (day) Value: 8
  misc_feature: MA Experiment 108522 PARAMETER Experiment Name: Zm_42deg_Heat_P Parameter: Organism Value: Zea mays
  misc_feature: MA Experiment 108522 PARAMETER Experiment Name: Zm_42deg_Heat_P Parameter: Plant Line Value: 35A19
  misc_feature: MA Experiment 108522 PARAMETER Experiment Name: Zm_42deg_Heat_P Parameter: Temperature (deg C) Value: 42 vs. 22
  misc_feature: MA Experiment 108522 PARAMETER Experiment Name: Zm_42deg_Heat_P Parameter: Timepoint (hr) Value: 1
  misc_feature: MA Experiment 108522 PARAMETER Experiment Name: Zm_42deg_Heat_P Parameter: Tissue Value: Aerial
  misc_feature: MA Experiment ID: 108527 Result: Up-regulated in Transcription
  misc_feature: MA Experiment 108527 PARAMETER Experiment Name: Zm_5mM_NO_P Parameter: Age (day) Value: 8
  misc_feature: MA Experiment 108527 PARAMETER Experiment Name: Zm_5mM_NO_P Parameter: Organism Value: Zea mays
  misc_feature: MA Experiment 108527 PARAMETER Experiment Name: Zm_5mM_NO_P Parameter: Plant Line Value: 35A19
  misc_feature: MA Experiment 108527 PARAMETER Experiment Name: Zm_5mM_NO_P Parameter: Timepoint (hr) Value: 6
  misc_feature: MA Experiment 108527 PARAMETER Experiment Name: Zm_5mM_NO_P Parameter: Tissue Value: Aerial
  misc_feature: MA Experiment 108527 PARAMETER Experiment Name: Zm_5mM_NO_P Parameter: Treatment Value: 5mM NO vs. No Treatment
  misc_feature: MA Experiment ID: 108530 Result: Up-regulated in Transcription
  misc_feature: MA Experiment 108530 PARAMETER Experiment Name: Zm_Imbibed_Seeds_P Parameter: Age (day) Value: 6 vs. 2
  misc_feature: MA Experiment 108530 PARAMETER Experiment Name: Zm_Imbibed_Seeds_P Parameter: Organism Value: Zea mays
  misc_feature: MA Experiment 108530 PARAMETER Experiment Name: Zm_Imbibed_Seeds_P Parameter: Plant Line Value: 35A19
  misc_feature: MA Experiment 108530 PARAMETER Experiment Name: Zm_Imbibed_Seeds_P Parameter: Tissue Value: Aerial vs. Embryo
  misc_feature: MA Experiment ID: 108535 Result: Down-regulated in Transcription
  misc_feature: MA Experiment 108535 PARAMETER Experiment Name: Zm_Meristem_P Parameter: Age (day) Value: 8
  misc_feature: MA Experiment 108535 PARAMETER Experiment Name: Zm_Meristem_P Parameter: Organism Value: Zea mays
  misc_feature: MA Experiment 108535 PARAMETER Experiment Name: Zm_Meristem_P Parameter: Plant Line Value: 35A19
  misc_feature: MA Experiment 108535 PARAMETER Experiment Name: Zm_Meristem_P Parameter: Tissue Value: Root Meristem vs. Above Root Meristem
  misc_feature: MA Experiment ID: 108545 Result: Down-regulated in Transcription
  misc_feature: MA Experiment 108545 PARAMETER Experiment Name: Zm_Imbibed_Seeds_P Parameter: Age (day) Value: 3 vs. 2
  misc_feature: MA Experiment 108545 PARAMETER Experiment Name: Zm_Imbibed_Seeds_P Parameter: Organism Value: Zea mays
  misc_feature: MA Experiment 108545 PARAMETER Experiment Name: Zm_Imbibed_Seeds_P Parameter: Plant Line Value: 35A19
  misc_feature: MA Experiment 108545 PARAMETER Experiment Name: Zm_Imbibed_Seeds_P Parameter: Tissue Value: Aerial vs. Embryo
  misc_feature: MA Experiment ID: 108547 Result: Down-regulated in Transcription
  misc_feature: MA Experiment 108547 PARAMETER Experiment Name: Zm_Imbibed_Seeds_P Parameter: Age (day) Value: 4 vs. 2
  misc_feature: MA Experiment 108547 PARAMETER Experiment Name: Zm_Imbibed_Seeds_P Parameter: Organism Value: Zea mays
  misc_feature: MA Experiment 108547 PARAMETER Experiment Name: Zm_Imbibed_Seeds_P Parameter: Plant Line Value: 35A19
  misc_feature: MA Experiment 108547 PARAMETER Experiment Name: Zm_Imbibed_Seeds_P Parameter: Tissue Value: Aerial vs. Embryo
  misc_feature: MA Experiment ID: 108556 Result: Up-regulated in Transcription
  misc_feature: MA Experiment 108556 PARAMETER Experiment Name: Zm_Drought_P Parameter: Age (day) Value: 9
  misc_feature: MA Experiment 108556 PARAMETER Experiment Name: Zm_Drought_P Parameter: Organism Value: Zea mays
  misc_feature: MA Experiment 108556 PARAMETER Experiment Name: Zm_Drought_P Parameter: Plant Line Value: 35A19
  misc_feature: MA Experiment 108556 PARAMETER Experiment Name: Zm_Drought_P Parameter: Timepoint (hr) Value: 24
  misc_feature: MA Experiment 108556 PARAMETER Experiment Name: Zm_Drought_P Parameter: Tissue Value: Aerial
  misc_feature: MA Experiment 108556 PARAMETER Experiment Name: Zm_Drought_P Parameter: Treatment Value: Drought vs. No Drought
  misc_feature: MA Experiment ID: 108597 Result: Up-regulated in Transcription
  misc_feature: MA Experiment 108597 PARAMETER Experiment Name: Zm_100uM_ABA_P Parameter: Age (day) Value: 9
  misc_feature: MA Experiment 108597 PARAMETER Experiment Name: Zm_100uM_ABA_P Parameter: Organism Value: Zea mays
  misc_feature: MA Experiment 108597 PARAMETER Experiment Name: Zm_100uM_ABA_P Parameter: Plant Line Value: 35A19
  misc_feature: MA Experiment 108597 PARAMETER Experiment Name: Zm_100uM_ABA_P Parameter: Timepoint (hr) Value: 24
  misc_feature: MA Experiment 108597 PARAMETER Experiment Name: Zm_100uM_ABA_P Parameter: Tissue Value: Aerial
  misc_feature: MA Experiment 108597 PARAMETER Experiment Name: Zm_100uM_ABA_P Parameter: Treatment Value: 100uM ABA vs. No Treatment
  misc_feature: MA Experiment ID: 108689 Result: Up-regulated in Transcription
  misc_feature: MA Experiment 108689 PARAMETER Experiment Name: Zm_Drought_Roots_P Parameter: Age (day) Value: 9
  misc_feature: MA Experiment 108689 PARAMETER Experiment Name: Zm_Drought_Roots_P Parameter: Organism Value: Zea mays
  misc_feature: MA Experiment 108689 PARAMETER Experiment Name: Zm_Drought_Roots_P Parameter: Plant Line Value: 35A19
  misc_feature: MA Experiment 108689 PARAMETER Experiment Name: Zm_Drought_Roots_P Parameter: Timepoint (hr) Value: 24
  misc_feature: MA Experiment 108689 PARAMETER Experiment Name: Zm_Drought_Roots_P Parameter: Tissue Value: Roots
  misc_feature: MA Experiment 108689 PARAMETER Experiment Name: Zm_Drought_Roots_P Parameter: Treatment Value: Drought vs. No Drought
  misc_feature: MA Experiment ID: 20000108 Result: Down-regulated in Transcription
  misc_feature: MA Experiment 20000108 PARAMETER Experiment Name: Zm_Root-Tips_P Parameter: Age (day) Value: 12
  misc_feature: MA Experiment 20000108 PARAMETER Experiment Name: Zm_Root-Tips_P Parameter: Organism Value: Zea mays
  misc_feature: MA Experiment 20000108 PARAMETER Experiment Name: Zm_Root-Tips_P Parameter: Tissue Value: Root tips vs. Root mid region    35
  misc_feature: MA Experiment 20000108 PARAMETER Experiment Name: Zm_Root-Tips_P Parameter: Tissue Value: Root tips vs. Root mid region   Sequence Listing-Misc Features (4)
  misc_feature: MA Experiment ID: 20000478 Result: Up-regulated in Transcription
  misc_feature: MA Experiment 20000478 PARAMETER Experiment Name: Zm_5mM_SA_P Parameter: Age (day) Value: 11
  misc_feature: MA Experiment 20000478 PARAMETER Experiment Name: Zm_5mM_SA_P Parameter: Organism Value: Zea mays
  misc_feature: MA Experiment 20000478 PARAMETER Experiment Name: Zm_5mM_SA_P Parameter: Plant Line Value: 35A19
  misc_feature: MA Experiment 20000478 PARAMETER Experiment Name: Zm_5mM_SA_P Parameter: Timepoint (hr) Value: 72
  misc_feature: MA Experiment 20000478 PARAMETER Experiment Name: Zm_5mM_SA_P Parameter: Tissue Value: Aerial
  misc_feature: MA Experiment 20000478 PARAMETER Experiment Name: Zm_5mM_SA_P Parameter: Treatment Value: 5mM SA vs. No Treatment
  misc_feature: MA Experiment ID: 20000535 Result: Down-regulated in Transcription
  misc_feature: MA Experiment 20000535 PARAMETER Experiment Name: Zm_Hybrid_Seed_Dev_P Parameter: DAP Value: 30 vs. 12
  misc_feature: MA Experiment 20000535 PARAMETER Experiment Name: Zm_Hybrid_Seed_Dev_P Parameter: Organism Value: Zea mays
  misc_feature: MA Experiment 20000535 PARAMETER Experiment Name: Zm_Hybrid_Seed_Dev_P Parameter: Plant Line Value: 35A19
  misc_feature: MA Experiment 20000535 PARAMETER Experiment Name: Zm_Hybrid_Seed_Dev_P Parameter: Tissue Value: Embryo vs. Unfert Floret
  misc_feature: MA Experiment ID: 20000626 Result: Up-regulated in Transcription
  misc_feature: MA Experiment 20000626 PARAMETER Experiment Name: Zm_Herbicide-Treatments_P Parameter: Timepoint (hr) Value: 12
  misc_feature: MA Experiment 20000626 PARAMETER Experiment Name: Zm_Herbicide-Treatments_P Parameter: Tissue Value: Aerial
  misc_feature: MA Experiment 20000626 PARAMETER Experiment Name: Zm_Herbicide-Treatments_P Parameter: Treatment Value: Roundup vs. No Treatment
  misc_feature: MA Experiment ID: 20000627 Result: Up-regulated in Transcription
  misc_feature: MA Experiment 20000627 PARAMETER Experiment Name: Zm_Herbicide-Treatments_P Parameter: Timepoint (hr) Value: 12
  misc_feature: MA Experiment 20000627 PARAMETER Experiment Name: Zm_Herbicide-Treatments_P Parameter: Tissue Value: Aerial
  misc_feature: MA Experiment 20000627 PARAMETER Experiment Name: Zm_Herbicide-Treatments_P Parameter: Treatment Value: Finale vs. No Treatment
  misc_feature: MA Experiment ID: 20001612 Result: Up-regulated in Transcription
  misc_feature: MA Experiment 20001612 PARAMETER Experiment Name: Zm_50ppm_KNO3_L-to-H_P Parameter: Age (day) Value: 19
  misc_feature: MA Experiment 20001612 PARAMETER Experiment Name: Zm_50ppm_KNO3_L-to-H_P Parameter: Organism Value: Zea mays
  misc_feature: MA Experiment 20001612 PARAMETER Experiment Name: Zm_50ppm_KNO3_L-to-H_P Parameter: Plant Line Value: 35A19
  misc_feature: MA Experiment 20001612 PARAMETER Experiment Name: Zm_50ppm_KNO3_L-to-H_P Parameter: Timepoint (hr) Value: 8
  misc_feature: MA Experiment 20001612 PARAMETER Experiment Name: Zm_50ppm_KNO3_L-to-H_P Parameter: Tissue Value: Roots
  misc_feature: MA Experiment 20001612 PARAMETER Experiment Name: Zm_50ppm_KNO3_L-to-H_P Parameter: Treatment Value: 50ppm KNO3 vs. 50ppm KCl
agctcaccgccacctccacgctcgaagctcctcccgaaccggccgcatcgtcgccatggcagccgccgcttctgcaagctccgtgaaggaagtgctgccgtctcccctgacctccgcctccgagccccctccccttttcgatggcaccaccaggttgtacgtggcctatctttgcccgttcgcgcagcgcgcttggattgctagaaactacaagggtctgcaggacaagattaagatagttgccatcgatctcgctgacaggccagcgtggtacaaggagaaggtttatccagaaaacaaggtgccttctctagagcacgacaaccaggtgaaaggagagagcttggatttggttaagtacatcgacaacaacttcgaaggtccatcgttgctccccgaggatcatgcaaagcagcagttcgctgaggagctgctcggatacactgacgcattcaacaaagcattttactcatgtttagtcgacagggaagatgtgtctgaggaagccgttgctgccttggacaaaatagaagacgccctggggaaattcaacgacggcccgttcttccttggccagttcagtctggtggacgttgcgtatgtaccgttcatcgagaggtttcagatactctattccaatataaagaactatgacatcacaaagggcagacccagccttcagaaattcatcgaggaagtgaacaagatcgatgcgtacacacagactaaactggacccgcagtttttgcttgagcaaacaaagaagcggcttgggattgcttaaagcctgtgaccaaggacgagactttcgccagaagcaccagcgtagtagatcggagctcgttttagtaggttgtgtgcttggatattacgtctggtcttcaataaggcatggccttctttaatggctgtgcttctgaaaataaataaactagttgtccaggtattatcgttgctttggtgacgtgtcgatgtcactgtatatatatgaatgggtgggaaagaatgatgatgtgcagtgtgttctgtgcaaatattgccgagatgaaggatcagtatccatgtagacattcatatattgctcatattgtgacacggcgcatgaaagacatggtttcggcccctaccacgc

SEQ ID NO: 10714 - protein, 260 aa, Zea mays subsp. mays
  peptide (1)..(260): Ceres Seq. ID no. 12368828
  misc_feature (17)..(260): Homolog of NCBI NO: 24796806 NR Description: putative glutathione S-transferase [Oryza sativa
  misc_feature (20)..(260): Homolog of NCBI NO: 7939638 NR Description: XIG [Oryza sativa]
  misc_feature (20)..(260): Homolog of NCBI NO: 7489703 NR Description: safener-induced In2.1-like protein - wheat
  misc_feature (20)..(260): Homolog of NCBI NO: 24796810 NR Description: putative glutathione S-transferase [Oryza sativa
  misc_feature (19)..(260): Homolog of NCBI NO: 1352460 NR Description: IN2-1 PROTEIN >gi|100896|pir||S17743 In2-1
AHRHLHARSSSRTGRIVAMAAAASASSVKEVLPSPLTSASEPPPLFDGTTRLYVAYLCPFAQRAWIARNYKGLQDKIKIVAIDLADRPAWYKEKVYPENKVPSLEHDNQVKGESLDLVKYIDNNFEGPSLLPEDHAKQQFAEELLGYTDAFNKAFYSCLVDREDVSEEAVAALDKIEDALGKFNDGPFFLGQFSLVDVAYVPFIERFQILYSNIKNYDITKGRPSLQKFIEEVNKIDAYTQTKLDPQFLLEQTKKRLGIA

SEQ ID NO: 10715 - protein, 242 aa, Zea mays subsp. mays
  peptide (1)..(242): Ceres Seq. ID no. 12368829
  misc_feature (1)..(242): Homolog of NCBI NO: 24796806 NR Description: putative glutathione S-transferase [Oryza sativa
  misc_feature (2)..(242): Homolog of NCBI NO: 7939638 NR Description: XIG [Oryza sativa]
  misc_feature (2)..(242): Homolog of NCBI NO: 7489703 NR Description: safener-induced In2.1-like protein - wheat
  misc_feature (2)..(242): Homolog of NCBI NO: 24796810 NR Description: putative glutathione S-transferase [Oryza sativa
  misc_feature (1)..(242): Homolog of NCBI NO: 1352460 NR Description: IN2-1 PROTEIN >gi|100896|pir||S17743 In2-1
MAAAASASSVKEVLPSPLTSASEPPPLFDGTTRLYVAYLCPFAQRAWIARNYKGLQDKIKIVAIDLADRPAWYKEKVYPENKVPSLEHDNQVKGESLDLVKYIDNNFEGPSLLPEDHAKQQFAEELLGYTDAFNKAFYSCLVDREDVSEEAVAALDKIEDALGKFNDGPFFLGQFSLVDVAYVPFIERFQILYSNIKNYDITKGRPSLQKFIEEVNKIDAYTQTKLDPQFLLEQTKKRLGIA

SEQ ID NO: 10716 - DNA, 1341 bp, Zea mays subsp. mays
  misc_feature (1)..(1341): Ceres Seq. ID no. 12351670
  misc_feature: MA Experiment ID: 108527 Result: Down-regulated in Transcription
  misc_feature: MA Experiment 108527 PARAMETER Experiment Name: Zm_5mM_NO_P Parameter: Age (day) Value: 8
  misc_feature: MA Experiment 108527 PARAMETER Experiment Name: Zm_5mM_NO_P Parameter: Organism Value: Zea mays
  misc_feature: MA Experiment 108527 PARAMETER Experiment Name: Zm_5mM_NO_P Parameter: Plant Line Value: 35A19
  misc_feature: MA Experiment 108527 PARAMETER Experiment Name: Zm_5mM_NO_P Parameter: Timepoint (hr) Value: 6
  misc_feature: MA Experiment 108527 PARAMETER Experiment Name: Zm_5mM_NO_P Parameter: Tissue Value: Aerial
  misc_feature: MA Experiment 108527 PARAMETER Experiment Name: Zm_5mM_NO_P Parameter: Treatment Value: 5mM NO vs. No Treatment
  misc_feature: MA Experiment ID: 108528 Result: Down-regulated in Transcription
  misc_feature: MA Experiment 108528 PARAMETER Experiment Name: Zm_Imbibed_Seeds_P Parameter: Age (day) Value: 5 vs. 2
  misc_feature: MA Experiment 108528 PARAMETER Experiment Name: Zm_Imbibed_Seeds_P Parameter: Organism Value: Zea mays
  misc_feature: MA Experiment 108528 PARAMETER Experiment Name: Zm_Imbibed_Seeds_P Parameter: Plant Line Value: 35A19
  misc_feature: MA Experiment 108528 PARAMETER Experiment Name: Zm_Imbibed_Seeds_P Parameter: Tissue Value: Aerial vs. Embryo
  misc_feature: MA Experiment ID: 108530 Result: Down-regulated in Transcription
  misc_feature: MA Experiment 108530 PARAMETER Experiment Name: Zm_Imbibed_Seeds_P Parameter: Age (day) Value: 6 vs. 2
  misc_feature: MA Experiment 108530 PARAMETER Experiment Name: Zm_Imbibed_Seeds_P Parameter: Organism Value: Zea mays
  misc_feature: MA Experiment 108530 PARAMETER Experiment Name: Zm_Imbibed_Seeds_P Parameter: Plant Line Value: 35A19
  misc_feature: MA Experiment 108530 PARAMETER Experiment Name: Zm_Imbibed_Seeds_P Parameter: Tissue Value: Aerial vs. Embryo
  misc_feature: MA Experiment ID: 108535 Result: Down-regulated in Transcription
  misc_feature: MA Experiment 108535 PARAMETER Experiment Name: Zm_Meristem_P Parameter: Age (day) Value: 8
  misc_feature: MA Experiment 108535 PARAMETER Experiment Name: Zm_Meristem_P Parameter: Organism Value: Zea mays
  misc_feature: MA Experiment 108535 PARAMETER Experiment Name: Zm_Meristem_P Parameter: Plant Line Value: 35A19
  misc_feature: MA Experiment 108535 PARAMETER Experiment Name: Zm_Meristem_P Parameter: Tissue Value: Root Meristem vs. Above Root Meristem
  misc_feature: MA Experiment ID: 108542 Result: Up-regulated in Transcription
  misc_feature: MA Experiment 108542 PARAMETER Experiment Name: Zm_150mM_NaCl_P Parameter: Age (day) Value: 8
  misc_feature: MA Experiment 108542 PARAMETER Experiment Name: Zm_150mM_NaCl_P Parameter: Organism Value: Zea mays
  misc_feature: MA Experiment 108542 PARAMETER Experiment Name: Zm_150mM_NaCl_P Parameter: Plant Line Value: 35A19
  misc_feature: MA Experiment 108542 PARAMETER Experiment Name: Zm_150mM_NaCl_P Parameter: Timepoint (hr) Value: 6
  misc_feature: MA Experiment 108542 PARAMETER Experiment Name: Zm_150mM_NaCl_P Parameter: Tissue Value: Aerial
  misc_feature: MA Experiment 108542 PARAMETER Experiment Name: Zm_150mM_NaCl_P Parameter: Treatment Value: 150mM NaCl vs. No Treatment
  misc_feature: MA Experiment ID: 108544 Result: Up-regulated in Transcription
  misc_feature: MA Experiment ID: 108545 Result: Down-regulated in Transcription
  misc_feature: MA Experiment 108545 PARAMETER Experiment Name: Zm_Imbibed_Seeds_P Parameter: Age (day) Value: 3 vs. 2
  misc_feature: MA Experiment 108545 PARAMETER Experiment Name: Zm_Imbibed_Seeds_P Parameter: Organism Value: Zea mays
  misc_feature: MA Experiment 108545 PARAMETER Experiment Name: Zm_Imbibed_Seeds_P Parameter: Plant Line Value: 35A19
  misc_feature: MA Experiment 108545 PARAMETER Experiment Name: Zm_Imbibed_Seeds_P Parameter: Tissue Value: Aerial vs. Embryo
  misc_feature: MA Experiment ID: 108547 Result: Down-regulated in Transcription
  misc_feature: MA Experiment 108547 PARAMETER Experiment Name: Zm_Imbibed_Seeds_P Parameter: Age (day) Value: 4 vs. 2
  misc_feature: MA Experiment 108547 PARAMETER Experiment Name: Zm_Imbibed_Seeds_P Parameter: Organism Value: Zea mays
  misc_feature: MA Experiment 108547 PARAMETER Experiment Name: Zm_Imbibed_Seeds_P Parameter: Plant Line Value: 35A19
  misc_feature: MA Experiment 108547 PARAMETER Experiment Name: Zm_Imbibed_Seeds_P Parameter: Tissue Value: Aerial vs. Embryo
  misc_feature: MA Experiment ID: 108556 Result: Up-regulated in Transcription
  misc_feature: MA Experiment 108556 PARAMETER Experiment Name: Zm_Drought_P Parameter: Age (day) Value: 9
  misc_feature: MA Experiment 108556 PARAMETER Experiment Name: Zm_Drought_P Parameter: Organism Value: Zea mays
  misc_feature: MA Experiment 108556 PARAMETER Experiment Name: Zm_Drought_P Parameter: Plant Line Value: 35A19
  misc_feature: MA Experiment 108556 PARAMETER Experiment Name: Zm_Drought_P Parameter: Timepoint (hr) Value: 24
  misc_feature: MA Experiment 108556 PARAMETER Experiment Name: Zm_Drought_P Parameter: Tissue Value: Aerial
  misc_feature: MA Experiment 108556 PARAMETER Experiment Name: Zm_Drought_P Parameter: Treatment Value: Drought vs. No Drought
  misc_feature: MA Experiment ID: 108689 Result: Up-regulated in Transcription
  misc_feature: MA Experiment 108689 PARAMETER Experiment Name: Zm_Drought_Roots_P Parameter: Age (day) Value: 9
  misc_feature: MA Experiment 108689 PARAMETER Experiment Name: Zm_Drought_Roots_P Parameter: Organism Value: Zea mays
  misc_feature: MA Experiment 108689 PARAMETER Experiment Name: Zm_Drought_Roots_P Parameter: Plant Line Value: 35A19
  misc_feature: MA Experiment 108689 PARAMETER Experiment Name: Zm_Drought_Roots_P Parameter: Timepoint (hr) Value: 24
  misc_feature: MA Experiment 108689 PARAMETER Experiment Name: Zm_Drought_Roots_P Parameter: Tissue Value: Roots
  misc_feature: MA Experiment 108689 PARAMETER Experiment Name: Zm_Drought_Roots_P Parameter: Treatment Value: Drought vs. No Drought
  misc_feature: MA Experiment ID: 20000535 Result: Down-regulated in Transcription
  misc_feature: MA Experiment 20000535 PARAMETER Experiment Name: Zm_Hybrid_Seed_Dev_P Parameter: DAP Value: 30 vs. 12
  misc_feature: MA Experiment 20000535 PARAMETER Experiment Name: Zm_Hybrid_Seed_Dev_P Parameter: Organism Value: Zea mays
  misc_feature: MA Experiment 20000535 PARAMETER Experiment Name: Zm_Hybrid_Seed_Dev_P Parameter: Plant Line Value: 35A19
  misc_feature: MA Experiment 20000535 PARAMETER Experiment Name: Zm_Hybrid_Seed_Dev_P Parameter: Tissue Value: Embryo vs. Unfert Floret
atcactcaccaagaaccagagaggagcttcatcagctcattcaattctcgttccatccctcgtctcttgtgtcccgcctccgttccataattcaccagcgtcgtcctacccatatctcccatcgtcttctccctcgcgccatcagcttccccaagccagcggcgaccatgatctccccggacaccatccgcacggccatcggcgtcatcggcaatggaactgcactcgtgctcttcctctccccagtgcctacgttcatccgcatctggaagaaagggtcggtggagcagtactcgccgatcccgtacgtggcgacgctgctgaactgcatgatgtgggtgctgtacgggctgccggcggtgcacccgcacagcatgctggtgatcaccatcaacggcaccggcatggcgatccagctgacctacgtggcgctcttcctcctctactccgcgggggcggccggcgcaaggtggtcctgctgctggccgccgaggtgggcttcgtcggcgccgtcgccgcgctggtgctcagcctggcgcacacgcacgagcgcaggtccatggtggtcggcatcctctgcgtcctcttcggcaccggcatgtacgccgccccgctctccgtcaaaaatggtgatccagacaaagagcgtggagtacatgcccctgttcctgtcgctggcttccctcgtgaatggcatctgctggactgcttacgcgctcatccgcttcgacctctacattactatccccaacgggctgggcgtgctgttcgcggtggcgcagctggtgctgtacgccatctactacaagtccacccaggagatcatcgaggcgcgcaagcgcaaggccgaccagatcgccatgaccggggtggtcgtcgacggcggcaagaccaacaaccaagccgccgcgggccaatactgaccgacgatcaagtgacgatcgacaccaatatgctcatgcaagaagccagcggcaaatcaattatgtcgccgctgggttttatgtattttgtgattctatctgcacgctgcttgtccgtcccaatggaaaaaaaagggggggaagaaaaaggtttgtcggtatatgtgttctcgccgaataactctcgcgcatagctagctggtggggctgagtcactgccttcgctatatgtatacgtgcaaaaattagaggtggagggttgttttagctaatcccaccttaattccaaggcagagtgacctttttttttttctccttctgtttcctaggattttgctataattgagcaatttagcgcgacttgttattggtgttggtgtgtctcaatcaaatagtaaaatgttcattttactctttc

SEQ ID NO: 10717 - protein, 371 aa, Zea mays subsp. mays
  peptide (1)..(371): Ceres Seq. ID no. 12351671
  misc_feature (151)..(207): Homolog of NCBI NO: 431154 NR Description: ORF [Lilium longiflorum]
  misc_feature (154)..(207): Homolog of NCBI NO: 34912462 NR Description: MtN3-like protein [Oryza sativa (japonica
  misc_feature (154)..(207): Homolog of NCBI NO: 34912454 NR Description: P0681B11.31 [Oryza sativa (japonica
  misc_feature (153)..(207): Homolog of NCBI NO: 18413388 NR Description: putative protein; protein id: At4g10850.1, by cDNA: 33161. [Arabidopsis thaliana] contains similarity to Medicago truncatula MtN3 (GB:Y08726)
  misc_feature (156)..(207): Homolog of NCBI NO: 18405611 NR Description: Expressed protein; protein id: At3g28007.1, by cDNA: 22745., supported by cDNA: gi_16226221 [Arabidopsis >gi|16226222|gb|AAL16107.1|AF428275_1 unknown protein
  misc_feature (156)..(207): Homolog of NCBI NO: 21592355 NR Description: contains similarity to nodulin MtN3 protein
  misc_feature (153)..(207): Homolog of NCBI NO: 7486709 NR Description: hypothetical protein F8M12.20 - Arabidopsis >gi|3513744|gb|AAC33960.1| contains similarity to Medicago
  misc_feature (154)..(207): Homolog of NCBI NO: 15219732 NR Description: hypothetical protein; protein id: At1g66770.1 thaliana] >gi|12597757|gb|AAG60070.1|AC013288_4 hypothetical
  misc_feature (156)..(207): Homolog of NCBI NO: 11994120 NR Description: contains similarity to nodulin MtN3
  misc_feature (153)..(227): Homolog of NCBI NO: 7486148 NR Description: hypothetical protein F25I24.60 - Arabidopsis >gi|4539359|emb|CAB40053.1| putative protein [Arabidopsis >gi|7267783|emb|CAB81186.1| putative protein [Arabidopsis
SLTKNQRGASSAHSILVPSLVSCVPPPFHNSPASSYPYLPSSSPSRHQLPQASGDHDLPGHHPHGHRRHRQWNCTRALPLPSAYVHPHLEERVGGAVLADPVRGDAAELHDVGAVRAAGGAPAQHAGDHHQRHRHGDPADLRGALPPLLRGGGRRKVVLLLAAEVGFVGAVAALVLSLAHTHERRSMVVGILCVLFGTGMYAAPLSVKNGDPDKERGVHAPVPVAGFPREWHLLDCLRAHPLRPLHYYPQRAGRAVRGGAAGAVRHLLQVHPGDHRGAQAQGRPDRHDRGGRRRRQDQQPSRRGPILTDDQVTIDTNMLMQEASGKSIMSPLGFMYFVILSARCLSVPMEKKGGEEKGLSVYVFSPNNSRA

SEQ ID NO: 10718 - protein, 306 aa, Zea mays subsp. mays
  peptide (1)..(306): Ceres Seq. ID no. 12351672
  misc_feature (203)..(272): Pfam Name: MtN3/saliva family Pfam Description: MtN3/saliva family
  misc_feature (203)..(306): Homolog of NCBI NO: 431154 NR Description: ORF [Lilium longiflorum]
  misc_feature (94)..(156): Homolog of NCBI NO: 431154 NR Description: ORF [Lilium longiflorum]
  misc_feature (210)..(304): Homolog of NCBI NO: 34912462 NR Description: MtN3-like protein [Oryza sativa (japonica
  misc_feature (56)..(149): Homolog of NCBI NO: 34912462 NR Description: MtN3-like protein [Oryza sativa (japonica
  misc_feature (56)..(149): Homolog of NCBI NO: 34912454 NR Description: P0681B11.31 [Oryza sativa (japonica
  misc_feature (210)..(279): Homolog of NCBI NO: 34912454 NR Description: P0681B11.31 [Oryza sativa (japonica
  misc_feature (203)..(299): Homolog of NCBI NO: 18413388 NR Description: putative protein; protein id: At4g10850.1, by cDNA: 33161. [Arabidopsis thaliana] contains similarity to Medicago truncatula MtN3 (GB:Y08726)
  misc_feature (62)..(148): Homolog of NCBI NO: 18413388 NR Description: putative protein; protein id: At4g10850.1, by cDNA: 33161. [Arabidopsis thaliana] contains similarity to Medicago truncatula MtN3 (GB:Y08726)
  misc_feature (56)..(149): Homolog of NCBI NO: 18405611 NR Description: Expressed protein; protein id: At3g28007.1, by cDNA: 22745., supported by cDNA: gi_16226221 [Arabidopsis >gi|16226222|gb|AAL16107.1|AF428275_1 unknown protein
  misc_feature (203)..(271): Homolog of NCBI NO: 18405611 NR Description: Expressed protein; protein id: At3g28007.1, by cDNA: 22745., supported by cDNA: gi_16226221 [Arabidopsis >gi|16226222|gb|AAL16107.1|AF428275_1 unknown protein
HSPRTREELHQLIQFSFHPSSLVSRLRSIIHQRRPTHISHRLLPRAISFPKPAATMISPDTIRTAIGVIGNGTALVLFLSPVPTFIRIWKKGSVEQYSPIPYVATLLNCMMWVLYGLPAVHPHSMLVITINGTGMAIQLTYVALFLLYSAGAAGARWSCCWPPRWASSAPSPRWCSAWRTRTSAGPWWSASSASSSAPACTPPRSPSKMVIQTKSVEYMPLFLSLASLVNGICWTAYALIRFDLYITIPNGLGVLFAVAQLVLYAIYYKSTQEIIEARKRKADQIAMTGVVVDGGKTNNQAAAGQY

SEQ ID NO: 10719 - protein, 251 aa, Zea mays subsp. mays
  peptide (1)..(251): Ceres Seq. ID no. 12351673
  misc_feature (148)..(217): Pfam Name: MtN3/saliva family Pfam Description: MtN3/saliva family
  misc_feature (148)..(251): Homolog of NCBI NO: 431154 NR Description: ORF [Lilium longiflorum]
  misc_feature (39)..(101): Homolog of NCBI NO: 431154 NR Description: ORF [Lilium longiflorum]
  misc_feature (155)..(249): Homolog of NCBI NO: 34912462 NR Description: MtN3-like protein [Oryza sativa (japonica
  misc_feature (1)..(94): Homolog of NCBI NO: 34912462 NR Description: MtN3-like protein [Oryza sativa (japonica
  misc_feature (1)..(94): Homolog of NCBI NO: 34912454 NR Description: P0681B11.31 [Oryza sativa (japonica
  misc_feature (155)..(224): Homolog of NCBI NO: 34912454 NR Description: P0681B11.31 [Oryza sativa (japonica
  misc_feature (148)..(244): Homolog of NCBI NO: 18413388 NR Description: putative protein; protein id: At4g10850.1, by cDNA: 33161. [Arabidopsis thaliana] contains similarity to Medicago truncatula MtN3 (GB:Y08726)
  misc_feature (7)..(93): Homolog of NCBI NO: 18413388 NR Description: putative protein; protein id: At4g10850.1, by cDNA: 33161. [Arabidopsis thaliana] contains similarity to Medicago truncatula MtN3 (GB:Y08726)
  misc_feature (1)..(94): Homolog of NCBI NO: 18405611 NR Description: Expressed protein; protein id: At3g28007.1, by cDNA: 22745., supported by cDNA: gi_16226221 [Arabidopsis >gi|16226222|gb|AAL16107.1|AF428275_1 unknown protein
  misc_feature (148)..(216): Homolog of NCBI NO: 18405611 NR Description: Expressed protein; protein id: At3g28007.1, by cDNA: 22745., supported by cDNA: gi_16226221 [Arabidopsis >gi|16226222|gb|AAL16107.1|AF428275_1 unknown protein
MISPDTIRTAIGVIGNGTALVLFLSPVPTFIRIWKKGSVEQYSPIPYVATLLNCMMWVLYGLPAVHPHSMLVITINGTGMAIQLTYVALFLLYSAGAAGARWSCCWPPRWASSAPSPRWCSAWRTRTSAGPWWSASSASSSAPACTPPRSPSKMVIQTKSVEYMPLFLSLASLVNGICWTAYALIRFDLYITIPNGLGVLFAVAQLVLYAIYYKSTQEIIEARKRKADQIAMTGVVVDGGKTNNQAAAGQY

SEQ ID NO: 10720 - DNA, 1075 bp, Zea mays subsp. mays
  misc_feature (1)..(1075): Ceres Seq. ID no. 12364946
  misc_feature: MA Experiment ID: 108527 Result: Down-regulated in Transcription
  misc_feature: MA Experiment 108527 PARAMETER Experiment Name: Zm_5mM_NO_P Parameter: Age (day) Value: 8
  misc_feature: MA Experiment 108527 PARAMETER Experiment Name: Zm_5mM_NO_P Parameter: Organism Value: Zea mays
  misc_feature: MA Experiment 108527 PARAMETER Experiment Name: Zm_5mM_NO_P Parameter: Plant Line Value: 35A19
  misc_feature: MA Experiment 108527 PARAMETER Experiment Name: Zm_5mM_NO_P Parameter: Timepoint (hr) Value: 6
  misc_feature: MA Experiment 108527 PARAMETER Experiment Name: Zm_5mM_NO_P Parameter: Tissue Value: Aerial
  misc_feature: MA Experiment 108527 PARAMETER Experiment Name: Zm_5mM_NO_P Parameter: Treatment Value: 5mM NO vs. No Treatment
  misc_feature: MA Experiment ID: 108540 Result: Down-regulated in Transcription
  misc_feature: MA Experiment 108540 PARAMETER Experiment Name: Zm_20percent_PEG_P Parameter: Age (day) Value: 8
  misc_feature: MA Experiment 108540 PARAMETER Experiment Name: Zm_20percent_PEG_P Parameter: Organism Value: Zea mays
  misc_feature: MA Experiment 108540 PARAMETER Experiment Name: Zm_20percent_PEG_P Parameter: Plant Line Value: 35A19
  misc_feature: MA Experiment 108540 PARAMETER Experiment Name: Zm_20percent_PEG_P Parameter: Timepoint (hr) Value: 6
  misc_feature: MA Experiment 108540 PARAMETER Experiment Name: Zm_20percent_PEG_P Parameter: Tissue Value: Aerial
  misc_feature: MA Experiment 108540 PARAMETER Experiment Name: Zm_20percent_PEG_P Parameter: Treatment Value: 20percent PEG vs. No Treatment
  misc_feature: MA Experiment ID: 108543 Result: Up-regulated in Transcription
  misc_feature: MA Experiment ID: 108544 Result: Down-regulated in Transcription
  misc_feature: MA Experiment ID: 108556 Result: Down-regulated in Transcription
  misc_feature: MA Experiment 108556 PARAMETER Experiment Name: Zm_Drought_P Parameter: Age (day) Value: 9
  misc_feature: MA Experiment 108556 PARAMETER Experiment Name: Zm_Drought_P Parameter: Organism Value: Zea mays
  misc_feature: MA Experiment 108556 PARAMETER Experiment Name: Zm_Drought_P Parameter: Plant Line Value: 35A19
  misc_feature: MA Experiment 108556 PARAMETER Experiment Name: Zm_Drought_P Parameter: Timepoint (hr) Value: 24
  misc_feature: MA Experiment 108556 PARAMETER Experiment Name: Zm_Drought_P Parameter: Tissue Value: Aerial
  misc_feature: MA Experiment 108556 PARAMETER Experiment Name: Zm_Drought_P Parameter: Treatment Value: Drought vs. No Drought
  misc_feature: MA Experiment ID: 20000477 Result: Down-regulated in Transcription
  misc_feature: MA Experiment 20000477 PARAMETER Experiment Name: Zm_5mM_SA_P Parameter: Age (day) Value: 10
  misc_feature: MA Experiment 20000477 PARAMETER Experiment Name: Zm_5mM_SA_P Parameter: Organism Value: Zea mays
  misc_feature: MA Experiment 20000477 PARAMETER Experiment Name: Zm_5mM_SA_P Parameter: Plant Line Value: 35A19
  misc_feature: MA Experiment 20000477 PARAMETER Experiment Name: Zm_5mM_SA_P Parameter: Timepoint (hr) Value: 48
  misc_feature: MA Experiment 20000477 PARAMETER Experiment Name: Zm_5mM_SA_P Parameter: Tissue Value: Aerial
  misc_feature: MA Experiment 20000477 PARAMETER Experiment Name: Zm_5mM_SA_P Parameter: Treatment Value: 5mM SA vs. No Treatment
  misc_feature: MA Experiment ID: 20000478 Result: Down-regulated in Transcription
  misc_feature: MA Experiment 20000478 PARAMETER Experiment Name: Zm_5mM_SA_P Parameter: Age (day) Value: 11
  misc_feature: MA Experiment 20000478 PARAMETER Experiment Name: Zm_5mM_SA_P Parameter: Organism Value: Zea mays
  misc_feature: MA Experiment 20000478 PARAMETER Experiment Name: Zm_5mM_SA_P Parameter: Plant Line Value: 35A19
  misc_feature: MA Experiment 20000478 PARAMETER Experiment Name: Zm_5mM_SA_P Parameter: Timepoint (hr) Value: 72
  misc_feature: MA Experiment 20000478 PARAMETER Experiment Name: Zm_5mM_SA_P Parameter: Tissue Value: Aerial
  misc_feature: MA Experiment 20000478 PARAMETER Experiment Name: Zm_5mM_SA_P Parameter: Treatment Value: 5mM SA vs. No Treatment
  misc_feature: MA Experiment ID: 20000479 Result: Down-regulated in Transcription
  misc_feature: MA Experiment 20000479 PARAMETER Experiment Name: Zm_Drought_P Parameter: Age (day) Value: 10
  misc_feature: MA Experiment 20000479 PARAMETER Experiment Name: Zm_Drought_P Parameter: Organism Value: Zea mays
  misc_feature: MA Experiment 20000479 PARAMETER Experiment Name: Zm_Drought_P Parameter: Plant Line Value: 35A19
  misc_feature: MA Experiment 20000479 PARAMETER Experiment Name: Zm_Drought_P Parameter: Timepoint (hr) Value: 48
  misc_feature: MA Experiment 20000479 PARAMETER Experiment Name: Zm_Drought_P Parameter: Tissue Value: Aerial
  misc_feature: MA Experiment 20000479 PARAMETER Experiment Name: Zm_Drought_P Parameter: Treatment Value: Drought vs. No Drought
  misc_feature: MA Experiment ID: 20000480 Result: Down-regulated in Transcription
  misc_feature: MA Experiment 20000480 PARAMETER Experiment Name: Zm_Drought_P Parameter: Age (day) Value: 11
  misc_feature: MA Experiment 20000480 PARAMETER Experiment Name: Zm_Drought_P Parameter: Organism Value: Zea mays
  misc_feature: MA Experiment 20000480 PARAMETER Experiment Name: Zm_Drought_P Parameter: Plant Line Value: 35A19
  misc_feature: MA Experiment 20000480 PARAMETER Experiment Name: Zm_Drought_P Parameter: Timepoint (hr) Value: 72
  misc_feature: MA Experiment 20000480 PARAMETER Experiment Name: Zm_Drought_P Parameter: Tissue Value: Aerial
  misc_feature: MA Experiment 20000480 PARAMETER Experiment Name: Zm_Drought_P Parameter: Treatment Value: Drought vs. No Drought
  misc_feature: MA Experiment ID: 20000535 Result: Down-regulated in Transcription
  misc_feature: MA Experiment 20000535 PARAMETER Experiment Name: Zm_Hybrid_Seed_Dev_P Parameter: DAP Value: 30 vs. 12
  misc_feature: MA Experiment 20000535 PARAMETER Experiment Name: Zm_Hybrid_Seed_Dev_P Parameter: Organism Value: Zea mays
  misc_feature: MA Experiment 20000535 PARAMETER Experiment Name: Zm_Hybrid_Seed_Dev_P Parameter: Plant Line Value: 35A19
  misc_feature: MA Experiment 20000535 PARAMETER Experiment Name: Zm_Hybrid_Seed_Dev_P Parameter: Tissue Value: Embryo vs. Unfert Floret
agtacagatccaccgccaccaccaccaccaagcactccagtcccgcagcagcatggccggcagcgcgtcccgcctcgccatcctcttggtgctcctggcggcgtcaccgctgcttggcgcgacgcagaaggccgcgccagggccggcgtcgtcgtcgggctcgggcgcgggcgcggcggacgcggcgccgccgacggacgtgaacaaggcgctgaaggacgagcagttcagcgagttccggcagctgctgcacgacacgcgcgtggacacgcagatcaacgcgcagctgacggacagctacaacgggctgaccatcatggcgcccaccaacgccgccttcgacaagatgaaggcgggcgtgctgaacgggctgtcgccgcaggagcagatccagatggtgctctactgcgtgctgccccggttctacagcctgtccatgctcggcaccctcagcggcaaggtcaacacgcaggggtccggccacgacgggccctacaggtacgacatcaagcggtcggggaacaacgtcaacgtgtccacgggggtgaactggatgctgctgggcagccccgtcagcaaggacttcccgctcgccatctaccccgtcgacaaggtgccgctcccctacgagctgttcgggcccaagccgcccacgccggcgcccgcgccggcacccgcgcccgggccggccaaggccaagaccaagaagaagaagaagtccgccgccatcgccgagccgcccacggccgacgacgacgacaccggctccacctccgacgaccagaaggctgccgccgcgccgccacgcgccagcagggcggccgccgcgctctccgtgctcggcgccgctgttctcgtcggcggcctcttctgatgggaagaggatcggatcggaggaggatagaatgaatgcaccgtcattcagaccaagatcacacggcgtgtgtgcgtttggccatcggctttattctttcttctctcttctcttgggggattttctctctctctctctctctctcggtgatttgtatttgtaacttaatgtgatatacattagcagtggttgttcttcttt

SEQ ID NO: 10721 - protein, 302 aa, Zea mays subsp. mays
  peptide (1)..(302): Ceres Seq. ID no. 12364947
  misc_feature (61)..(299): Pfam Name: HlyD family secretion protein Pfam Description: HlyD family secretion protein
  misc_feature (57)..(302): Homolog of NCBI NO: 22958681 NR Description: hypothetical protein [Rhodobacter sphaeroides]
  misc_feature (1)..(32): Homolog of NCBI NO: 37530618 NR Description: unknown protein [Oryza sativa (japonica >gi|16924043|gb|AAL31655.1| Unknown protein [Oryza sativa] Unknown protein [Oryza sativa] >gi|31429914|gb|AAP51898.1|
STDPPPPPPPSTPVPQQHGRQRVPPRHPLGAPGGVTAAWRDAEGRARAGVVVGLGRGRGGRGAADGREQGAEGRAVQRVPAAAARHARGHADQRAADGQLQRADHHGAHQRRLRQDEGGRAERAVAAGADPDGALLRAAPVLQPVHARHPQRQGQHAGVRPRRALQVRHQAVGEQRQRVHGGELDAAGQPRQQGLPARHLPRRQGAAPLRAVRAQAAHAGARAGTRARAGQGQDQEEEEVRRHRRAAHGRRRRHRLHLRRPEGCRRAATRQQGGRRALRARRRCSRRRPLLMGRGSDRRRIE

SEQ ID NO: 10722 - protein, 290 aa, Zea mays subsp. mays
  peptide (1)..(290): Ceres Seq. ID no. 12364948
  misc_feature (72)..(208): Pfam Name: Fasciclin domain Pfam Description: Fasciclin domain
  misc_feature (26)..(258): Homolog of NCBI NO: 34910950 NR Description: putative arabinogalactan-like protein [Oryza
  misc_feature (28)..(250): Homolog of NCBI NO: 21553590 NR Description: arabinogalactan protein-like [Arabidopsis
  misc_feature (29)..(250): Homolog of NCBI NO: 15239344 NR Description: fasciclin-like arabinogalactan-protein (FLA12); id: At5g60490.1, supported by cDNA: 15239., supported by cDNA:
  misc_feature (48)..(258): Homolog of NCBI NO: 5919185 NR Description: arabinogalactan protein Pop14A9 [Populus x
  misc_feature (30)..(227): Homolog of NCBI NO: 2129473 NR Description: arabinogalactan-like protein - loblolly pine
  misc_feature (18)..(264): Homolog of NCBI NO: 18399381 NR Description: fasciclin-like arabinogalactan-protein (FLA6); id: At2g20520.1, supported by cDNA: gi_13377779 [Arabidopsis
  misc_feature (29)..(247): Homolog of NCBI NO: 15294288 NR Description: AT5g60490/muf9_140 [Arabidopsis thaliana]
  misc_feature (21)..(255): Homolog of NCBI NO: 18379157 NR Description: fasciclin-like arabinogalactan-protein (FLA9); id: At1g03870.1, supported by cDNA: 39763., supported by cDNA: [Arabidopsis thaliana] >gi|25350180|pir||D86169 hypothetical
  misc_feature (28)..(245): Homolog of NCBI NO: 15241423 NR Description: fasciclin-like arabinogalactan-protein, putative protein id: At5g44130.1, supported by cDNA: gi_16648846, by cDNA: gi_20466118 [Arabidopsis thaliana]
  misc_feature (21)..(255): Homolog of NCBI NO: 24417458 NR Description: unknown [Arabidopsis thaliana]
VQIHRHHHHQALQSRSSMAGSASRLAILLVLLAASPLLGATQKAAPGPASSSGSGAGAADAAPPTDVNKALKDEQFSEFRQLLHDTRVDTQINAQLTDSYNGLTIMAPTNAAFDKMKAGVLNGLSPQEQIQMVLYCVLPRFYSLSMLGTLSGKVNTQGSGHDGPYRYDIKRSGNNVNVSTGVNWMLLGSPVSKDFPLAIYPVDKVPLPYELFGPKPPTPAPAPAPAPGPAKAKTKKKKKSAAIAEPPTADDDDTGSTSDDQKAAAAPPRASRAAAALSVLGAAVLVGGLF

SEQ ID NO: 10723 - protein, 273 aa, Zea mays subsp. mays
  peptide (1)..(273): Ceres Seq. ID no. 12364949
  misc_feature (55)..(191): Pfam Name: Fasciclin domain Pfam Description: Fasciclin domain
  misc_feature (11)..(228): Homolog of NCBI NO: 15241423 NR Description: fasciclin-like arabinogalactan-protein, putative protein id: At5g44130.1, supported by cDNA: gi_16648846, by cDNA: gi_20466118 [Arabidopsis thaliana]
  misc_feature (9)..(241): Homolog of NCBI NO: 34910950 NR Description: putative arabinogalactan-like protein [Oryza
  misc_feature (12)..(233): Homolog of NCBI NO: 15239344 NR Description: fasciclin-like arabinogalactan-protein (FLA12); id: At5g60490.1, supported by cDNA: 15239., supported by cDNA:
  misc_feature (13)..(210): Homolog of NCBI NO: 2129473 NR Description: arabinogalactan-like protein - loblolly pine
  misc_feature (12)..(230): Homolog of NCBI NO: 15294288 NR Description: AT5g60490/muf9_140 [Arabidopsis thaliana]
  misc_feature (4)..(238): Homolog of NCBI NO: 18379157 NR Description: fasciclin-like arabinogalactan-protein (FLA9); id: At1g03870.1, supported by cDNA: 39763., supported by cDNA: [Arabidopsis thaliana] >gi|25350180|pir||D86169 hypothetical
  misc_feature (1)..(247): Homolog of NCBI NO: 18399381 NR Description: fasciclin-like arabinogalactan-protein (FLA6); id: At2g20520.1, supported by cDNA: gi_13377779 [Arabidopsis
  misc_feature (31)..(241): Homolog of NCBI NO: 5919185 NR Description: arabinogalactan protein Pop14A9 [Populus x
  misc_feature (11)..(233): Homolog of NCBI NO: 21553590 NR Description: arabinogalactan protein-like [Arabidopsis
  misc_feature (4)..(238): Homolog of NCBI NO: 24417458 NR Description: unknown [Arabidopsis thaliana]
MAGSASRLAILLVLLAASPLLGATQKAAPGPASSSGSGAGAADAAPPTDVNKALKDEQFSEFRQLLHDTRVDTQINAQLTDSYNGLTIMAPTNAAFDKMKAGVLNGLSPQEQIQMVLYCVLPRFYSLSMLGTLSGKVNTQGSGHDGPYRYDIKRSGNNVNVSTGVNWMLLGSPVSKDFPLAIYPVDKVPLPYELFGPKPPTPAPAPAPAPGPAKAKTKKKKKSAAIAEPPTADDDDTGSTSDDQKAAAAPPRASRAAAALSVLGAAVLVGGLF

SEQ ID NO: 10724 - DNA, 2021 bp, Zea mays subsp. mays
  misc_feature (1)..(2021): Ceres Seq. ID no. 12413767
  misc_feature: MA Experiment ID: 108522 Result: Down-regulated in Transcription
  misc_feature: MA Experiment 108522 PARAMETER Experiment Name: Zm_42deg_Heat_P Parameter: Age (day) Value: 8
  misc_feature: MA Experiment 108522 PARAMETER Experiment Name: Zm_42deg_Heat_P Parameter: Organism Value: Zea mays
  misc_feature: MA Experiment 108522 PARAMETER Experiment Name: Zm_42deg_Heat_P Parameter: Plant Line Value: 35A19
  misc_feature: MA Experiment 108522 PARAMETER Experiment Name: Zm_42deg_Heat_P Parameter: Temperature (deg C) Value: 42 vs. 22
  misc_feature: MA Experiment 108522 PARAMETER Experiment Name: Zm_42deg_Heat_P Parameter: Timepoint (hr) Value: 1
  misc_feature: MA Experiment 108522 PARAMETER Experiment Name: Zm_42deg_Heat_P Parameter: Tissue Value: Aerial
  misc_feature: MA Experiment ID: 108528 Result: Up-regulated in Transcription
  misc_feature: MA Experiment 108528 PARAMETER Experiment Name: Zm_Imbibed_Seeds_P Parameter: Age (day) Value: 5 vs. 2
  misc_feature: MA Experiment 108528 PARAMETER Experiment Name: Zm_Imbibed_Seeds_P Parameter: Organism Value: Zea mays
  misc_feature: MA Experiment 108528 PARAMETER Experiment Name: Zm_Imbibed_Seeds_P Parameter: Plant Line Value: 35A19
  misc_feature: MA Experiment 108528 PARAMETER Experiment Name: Zm_Imbibed_Seeds_P Parameter: Tissue Value: Aerial vs. Embryo
  misc_feature: MA Experiment ID: 108529 Result: Up-regulated in Transcription
  misc_feature: MA Experiment 108529 PARAMETER Experiment Name: Zm_Imbibed_Seeds_P Parameter: Age (day) Value: 5 vs. 2
  misc_feature: MA Experiment 108529 PARAMETER Experiment Name: Zm_Imbibed_Seeds_P Parameter: Organism Value: Zea mays
  misc_feature: MA Experiment 108529 PARAMETER Experiment Name: Zm_Imbibed_Seeds_P Parameter: Plant Line Value: 35A19
  misc_feature: MA Experiment 108529 PARAMETER Experiment Name: Zm_Imbibed_Seeds_P Parameter: Tissue Value: Roots vs. Embryo
  misc_feature: MA Experiment ID: 108530 Result: Up-regulated in Transcription
  misc_feature: MA Experiment 108530 PARAMETER Experiment Name: Zm_Imbibed_Seeds_P Parameter: Age (day) Value: 6 vs. 2
  misc_feature: MA Experiment 108530 PARAMETER Experiment Name: Zm_Imbibed_Seeds_P Parameter: Organism Value: Zea mays
  misc_feature: MA Experiment 108530 PARAMETER Experiment Name: Zm_Imbibed_Seeds_P Parameter: Plant Line Value: 35A19
  misc_feature: MA Experiment 108530 PARAMETER Experiment Name: Zm_Imbibed_Seeds_P Parameter: Tissue Value: Aerial vs. Embryo
  misc_feature: MA Experiment ID: 108535 Result: Down-regulated in Transcription
  misc_feature: MA Experiment 108535 PARAMETER Experiment Name: Zm_Meristem_P Parameter: Age (day) Value: 8
  misc_feature: MA Experiment 108535 PARAMETER Experiment Name: Zm_Meristem_P Parameter: Organism Value: Zea mays
  misc_feature: MA Experiment 108535 PARAMETER Experiment Name: Zm_Meristem_P Parameter: Plant Line Value: 35A19
  misc_feature: MA Experiment 108535 PARAMETER Experiment Name: Zm_Meristem_P Parameter: Tissue Value: Root Meristem vs. Above Root Meristem
  misc_feature: MA Experiment ID: 108543 Result: Up-regulated in Transcription
  misc_feature: MA Experiment ID: 108545 Result: Down-regulated in Transcription
  misc_feature: MA Experiment 108545 PARAMETER Experiment Name: Zm_Imbibed_Seeds_P Parameter: Age (day) Value: 3 vs. 2
  misc_feature: MA Experiment 108545 PARAMETER Experiment Name: Zm_Imbibed_Seeds_P Parameter: Organism Value: Zea mays
  misc_feature: MA Experiment 108545 PARAMETER Experiment Name: Zm_Imbibed_Seeds_P Parameter: Plant Line Value: 35A19
  misc_feature: MA Experiment 108545 PARAMETER Experiment Name: Zm_Imbibed_Seeds_P Parameter: Tissue Value: Aerial vs. Embryo
  misc_feature: MA Experiment ID: 108559 Result: Down-regulated in Transcription
  misc_feature: MA Experiment 108559 PARAMETER Experiment Name: Zm_5mM_NO_P Parameter: Age (day) Value: 8
  misc_feature: MA Experiment 108559 PARAMETER Experiment Name: Zm_5mM_NO_P Parameter: Organism Value: Zea mays
  misc_feature: MA Experiment 108559 PARAMETER Experiment Name: Zm_5mM_NO_P Parameter: Plant Line Value: 35A19
  misc_feature: MA Experiment 108559 PARAMETER Experiment Name: Zm_5mM_NO_P Parameter: Timepoint (hr) Value: 12
  misc_feature: MA Experiment 108559 PARAMETER Experiment Name: Zm_5mM_NO_P Parameter: Tissue Value: Aerial
  misc_feature: MA Experiment 108559 PARAMETER Experiment Name: Zm_5mM_NO_P Parameter: Treatment Value: 5mM NO vs. No Treatment
  misc_feature: MA Experiment ID: 108597 Result: Down-regulated in Transcription
  misc_feature: MA Experiment 108597 PARAMETER Experiment Name: Zm_100uM_ABA_P Parameter: Age (day) Value: 9
  misc_feature: MA Experiment 108597 PARAMETER Experiment Name: Zm_100uM_ABA_P Parameter: Organism Value: Zea mays
  misc_feature: MA Experiment 108597 PARAMETER Experiment Name: Zm_100uM_ABA_P Parameter: Plant Line Value: 35A19
  misc_feature: MA Experiment 108597 PARAMETER Experiment Name: Zm_100uM_ABA_P Parameter: Timepoint (hr) Value: 24
  misc_feature: MA Experiment 108597 PARAMETER Experiment Name: Zm_100uM_ABA_P Parameter: Tissue Value: Aerial
  misc_feature: MA Experiment 108597 PARAMETER Experiment Name: Zm_100uM_ABA_P Parameter: Treatment Value: 100uM ABA vs. No Treatment
  misc_feature: MA Experiment ID: 108688 Result: Down-regulated in Transcription
  misc_feature: MA Experiment 108688 PARAMETER Experiment Name: Zm_Embryos-Flowers__P Parameter: Tissue Value: Immature Flowers vs. Aerial+
  misc_feature: MA Experiment ID: 108689 Result: Up-regulated in Transcription
  misc_feature: MA Experiment 108689 PARAMETER Experiment Name: Zm_Drought_Roots_P Parameter: Age (day) Value: 9
  misc_feature: MA Experiment 108689 PARAMETER Experiment Name: Zm_Drought_Roots_P Parameter: Organism Value: Zea mays
  misc_feature: MA Experiment 108689 PARAMETER Experiment Name: Zm_Drought_Roots_P Parameter: Plant Line Value: 35A19
  misc_feature: MA Experiment 108689 PARAMETER Experiment Name: Zm_Drought_Roots_P Parameter: Timepoint (hr) Value: 24
  misc_feature: MA Experiment 108689 PARAMETER Experiment Name: Zm_Drought_Roots_P Parameter: Tissue Value: Roots
  misc_feature: MA Experiment 108689 PARAMETER Experiment Name: Zm_Drought_Roots_P Parameter: Treatment Value: Drought vs. No Drought
  misc_feature: MA Experiment ID: 20000477 Result: Down-regulated in Transcription
  misc_feature: MA Experiment 20000477 PARAMETER Experiment Name: Zm_5mM_SA_P Parameter: Age (day) Value: 10
  misc_feature: MA Experiment 20000477 PARAMETER Experiment Name: Zm_5mM_SA_P Parameter: Organism Value: Zea mays
  misc_feature: MA Experiment 20000477 PARAMETER Experiment Name: Zm_5mM_SA_P Parameter: Plant Line Value: 35A19
  misc_feature: MA Experiment 20000477 PARAMETER Experiment Name: Zm_5mM_SA_P Parameter: Timepoint (hr) Value: 48
  misc_feature: MA Experiment 20000477 PARAMETER Experiment Name: Zm_5mM_SA_P Parameter: Tissue Value: Aerial
  misc_feature: MA Experiment 20000477 PARAMETER Experiment Name: Zm_5mM_SA_P Parameter: Treatment Value: 5mM SA vs. No Treatment
  misc_feature: MA Experiment ID: 20000478 Result: Down-regulated in Transcription
  misc_feature: MA Experiment 20000478 PARAMETER Experiment Name: Zm_5mM_SA_P Parameter: Age (day) Value: 11
  misc_feature: MA Experiment 20000478 PARAMETER Experiment Name: Zm_5mM_SA_P Parameter: Organism Value: Zea mays
  misc_feature: MA Experiment 20000478 PARAMETER Experiment Name: Zm_5mM_SA_P Parameter: Plant Line Value: 35A19
  misc_feature: MA Experiment 20000478 PARAMETER Experiment Name: Zm_5mM_SA_P Parameter: Timepoint (hr) Value: 72
  misc_feature: MA Experiment 20000478 PARAMETER Experiment Name: Zm_5mM_SA_P Parameter: Tissue Value: Aerial
  misc_feature: MA Experiment 20000478 PARAMETER Experiment Name: Zm_5mM_SA_P Parameter: Treatment Value: 5mM SA vs. No Treatment
  misc_feature: MA Experiment ID: 20000480 Result: Down-regulated in Transcription
  misc_feature: MA Experiment 20000480 PARAMETER Experiment Name: Zm_Drought_P Parameter: Age (day) Value: 11
  misc_feature: MA Experiment 20000480 PARAMETER Experiment Name: Zm_Drought_P Parameter: Organism Value: Zea mays
  misc_feature: MA Experiment 20000480 PARAMETER Experiment Name: Zm_Drought_P Parameter: Plant Line Value: 35A19
  misc_feature: MA Experiment 20000480 PARAMETER Experiment Name: Zm_Drought_P Parameter: Timepoint (hr) Value: 72
  misc_feature: MA Experiment 20000480 PARAMETER Experiment Name: Zm_Drought_P Parameter: Tissue Value: Aerial
  misc_feature: MA Experiment 20000480 PARAMETER Experiment Name: Zm_Drought_P Parameter: Treatment Value: Drought vs. No Drought
  misc_feature: MA Experiment ID: 20000492 Result: Down-regulated in Transcription
  misc_feature: MA Experiment 20000492 PARAMETER Experiment Name: Zm_Hybrid_Seed_Dev_P Parameter: DAP Value: 12
  misc_feature: MA Experiment 20000492 PARAMETER Experiment Name: Zm_Hybrid_Seed_Dev_P Parameter: Organism Value: Zea mays
  misc_feature: MA Experiment 20000492 PARAMETER Experiment Name: Zm_Hybrid_Seed_Dev_P Parameter: Plant Line Value: 35A19
  misc_feature: MA Experiment 20000492 PARAMETER Experiment Name: Zm_Hybrid_Seed_Dev_P Parameter: Tissue Value: Fert Kernel vs. Unfert Floret
  misc_feature: MA Experiment ID: 20000535 Result: Down-regulated in Transcription
  misc_feature: MA Experiment 20000535 PARAMETER Experiment Name: Zm_Hybrid_Seed_Dev_P Parameter: DAP Value: 30 vs. 12
  misc_feature: MA Experiment 20000535 PARAMETER Experiment Name: Zm_Hybrid_Seed_Dev_P Parameter: Organism Value: Zea mays
  misc_feature: MA Experiment 20000535 PARAMETER Experiment Name: Zm_Hybrid_Seed_Dev_P Parameter: Plant Line Value: 35A19
  misc_feature: MA Experiment 20000535 PARAMETER Experiment Name: Zm_Hybrid_Seed_Dev_P Parameter: Tissue Value: Embryo vs. Unfert Floret
atcgcaaactcggaaaccttgagaggaaagccaccagcagcaagcgaagaccaccagcagcagcgcagcggcgacgtgtttcgctctcgccatggcgtcgtcgtcctcgtcccggctgctgctcctcctcctcccgtgcctcgcgctcacgctgctcggcgcggcagacgccgaagtgcaccaccacgagttcgttatccaagagacgccggtgaagaggctgtgcaagacgcacaacatcatcacggtgaacgggcagtacccggggccgacgctggaggtcagggagggtgacacgctcgtcatcaacgtcgtcaaccgggcgcagtacaacgccaccatccactggcacggcatccggcagataaggactgggtgggcggacgggccggagttcgtgacgcagtgccccatcaggcccggcggcagctacaagtaccggttcaccatccaggggcaggagggcacgctgtggtggcacgcgcacagctcctggctcagggccaccgtctacggcgcgctcatcatccgccccagggagaacaagacctacccattcgccaagccctcgcgagaagtccccgtcatcctcggtgagtggtgggatgcgaacccgatcgacgtcatccgggaggcgcagaggaccggcggcggtcccaacgtctccgacgcgttcaccatcaacggccagcccggcgacctgtacaaatgctccaacaaagagactacggccatcccggtggaggccggcgagacggcgctgctgcggttcatcaacgccgcgctcaaccacgagctgttcgtcaccatcgcgcagcacaagatgacggtcgtcgccaccgacgcgtcctacaccaagcccttcaccacctcggtgctcatgctcgcgccgggccagaccaccgacgtcctcgtcaccatggaccagccgcccacccgctactacgtcgccgcgcgcgcctacgtctccggccagaacgtggccttcgacaacaccaccaccacggccgtcctcgagtacgactgcggctgcgcctccgacttcggccccaagatacagccggcgttcccggcggcgctaccggccttcaacgacacgtccgccgccaccgccttcgccgccgggatcaggagccccgaccgggtcaaggtccacgagaacgtcgacgagtacctcttcttcaccgtcggcctcggcctcttcaactgcaagccgggccagctctgcgccgggcccaacaacaacacccgcttcgcggccagcatgaacaacgtctccttcgtcttcccgcagaccgactccctcctccacgcgcactactacaagatccccggcgtcttcaccaccgacttcccggcatacccgccggtgcagttcgactacacggggcagaacgtcagccaggccctgtggcagccggtccccgccaccaagctgtacccgctcaggttcggctccgtggtgcagctcgtcctgcaggacaccagcatcgtcacgcccgagaaccaccccatccacatccacggctacgatttcttcatcctcgccgagggcttcggcaacttcgaccccaagaaggacgtcgagaagttcaactacgtcgacccgccccagaggaacaccgtggcggtgcctgtcaacggttgggcggtcatccagttcgtcgccgacaacccaggtgtgtggctcatgcattgccatctggacgtgcacatcacctggggcctggcaatggctttcctagtggaggacggctatggcgaactgcagtcgctggagccgcccccagttgatcttcccatgtgctagtggaggacggatatttgtgttgaggaagaaagcctgttcacgttgtatgttaattgttactcttttttggtggaggggggcgtgttcgtgatcttaaattcttaggggacttgattttccagcttgatttgaagtttcttctgtaaatctatgtaattttcaattaatgacattcagcatattatttgagaataaattatttctttgtacg

SEQ ID NO: 10725 - protein, 572 aa, Zea mays subsp. mays
  peptide (1)..(572): Ceres Seq. ID no. 12413768
MASSSSSRLLLLLLPCLALTLLGAADAEVHHHEFVIQETPVKRLCKTHNIITVNGQYPGPTLEVREGDTLVINVVNRAQYNATIHWHGIRQIRTGWADGPEFVTQCPIRPGGSYKYRFTIQGQEGTLWWHAHSSWLRATVYGALIIRPRENKTYPFAKPSREVPVILGEWWDANPIDVIREAQRTGGGPNVSDAFTINGQPGDLYKCSNKETTAIPVEAGETALLRFINAALNHELFVTIAQHKMTVVATDASYTKPFTTSVLMLAPGQTTDVLVTMDQPPTRYYVAARAYVSGQNVAFDNTTTTAVLEYDCGCASDFGPKIQPAFPAALPAFNDTSAATAFAAGIRSPDRVKVHENVDEYLFFTVGLGLFNCKPGQLCAGPNNNTRFAASMNNVSFVFPQTDSLLHAHYYKIPGVFTTDFPAYPPVQFDYTGQNVSQALWQPVPATKLYPLRFGSVVQLVLQDTSIVTPENHPIHIHGYDFFILAEGFGNFDPKKDVEKFNYVDPPQRNTVAVPVNGWAVIQFVADNPGVWLMHCHLDVHITWGLAMAFLVEDGYGELQSLEPPPVDLPMC

SEQ ID NO: 10726 - protein, 361 aa, Zea mays subsp. mays
  peptide (1)..(361): Ceres Seq. ID no. 12413769
MLQQRDYGHPGGGRRDGAAAVHQRRAQPRAVRHHRAAQDDGRRHRRVLHQALHHLGAHARAGPDHRRPRHHGPAAHPLLRRRARLRLRPERGLRQHHHHGRPRVRLRLRLRLRPQDTAGVPGGATGLQRHVRRHRLRRRDQEPRPGQGPRERRRVPLLHRRPRPLQLQAGPALRRAQQQHPLRGQHEQRLLRLPADRLPPPRALLQDPRRLHHRLPGIPAGAVRLHGAERQPGPVAAGPRHQAVPAQVRLRGAARPAGHQHRHAREPPHPHPRLRFLHPRRGLRQLRPQEGRREVQLRRPAPEEHRGGACQRLGGHPVRRRQPRCVAHALPSGRAHHLGPGNGFPSGGRLWRTAVAGAAPS

SEQ ID NO: 10727 - protein, 328 aa, Zea mays subsp. mays
  peptide (1)..(328): Ceres Seq. ID no. 12413770
MTVVATDASYTKPFTTSVLMLAPGQTTDVLVTMDQPPTRYYVAARAYVSGQNVAFDNTTTTAVLEYDCGCASDFGPKIQPAFPAALPAFNDTSAATAFAAGIRSPDRVKVHENVDEYLFFTVGLGLFNCKPGQLCAGPNNNTRFAASMNNVSFVFPQTDSLLHAHYYKIPGVFTTDFPAYPPVQFDYTGQNVSQALWQPVPATKLYPLRFGSVVQLVLQDTSIVTPENHPIHIHGYDFFILAEGFGNFDPKKDVEKFNYVDPPQRNTVAVPVNGWAVIQFVADNPGVWLMHCHLDVHITWGLAMAFLVEDGYGELQSLEPPPVDLPMC

SEQ ID NO: 10728 - DNA, 1342 bp, Zea mays subsp. mays
  misc_feature (1)..(1342): Ceres Seq. ID no. 12425290
  misc_feature: MA Experiment ID: 108689 Result: Down-regulated in Transcription
  misc_feature: MA Experiment 108689 PARAMETER Experiment Name: Zm_Drought_Roots_P Parameter: Age (day) Value: 9
  misc_feature: MA Experiment 108689 PARAMETER Experiment Name: Zm_Drought_Roots_P Parameter: Organism Value: Zea mays
  misc_feature: MA Experiment 108689 PARAMETER Experiment Name: Zm_Drought_Roots_P Parameter: Plant Line Value: 35A19
  misc_feature: MA Experiment 108689 PARAMETER Experiment Name: Zm_Drought_Roots_P Parameter: Timepoint (hr) Value: 24
  misc_feature: MA Experiment 108689 PARAMETER Experiment Name: Zm_Drought_Roots_P Parameter: Tissue Value: Roots
  misc_feature: MA Experiment 108689 PARAMETER Experiment Name: Zm_Drought_Roots_P Parameter: Treatment Value: Drought vs. No Drought
gcacgagaccattacctagaacatcctaatcgaaaagggagcaatataactaactgcacaaacgcaaaagtcaaacttgcagctgaggaatcgatcgcatcggtatcttgacgtgttcattgcccgattctagctactagtccccgctagctcttgagcgatcgtcgtagctagccgcccgccgtcgatcgatgggtgcaccggcgccgtccgtcgccgtggtcgccgcggtggtggtttgcctgtgcggcgcctttgcgcgcgcgcaggacatggacaacgagtgggcgcggccgccgtaccgcggcttcttcggcggccccgggtcgctgctgccgcagtcggacgtggacctgctggagttcccgctgaacctggagtacctggagacggagttcttctgctgggccgctctggggtacggcctcgacgccatcgatgccaacctcaccggcggcgggccgccctccatcggcggccagtccgccttccctcaccccgttcatccgcgacgtcgccacccagttctgctaccaagaagtcggacacctcagggcgatcaagcagacggtgaggggcttcccgcggccgttgctggacatcagcgcggccaacttcggcaagatcatcgagcaggcgctgaacgcgacgctggatccgcccttcaacccctacgagaacagcgtcaacttcctcgtcgcctcctacatcatcccctacgtcggcctcaccggctacgtcggcgccaaccccaggctcttcacccctcaggccagaaagctgctggcggggctgctggcggtggagtcagcgcaggacgcggtgatccggacgctgctgtacgagcgcgggatggcgcgtgtggcgggctacgccgtcggggtggcggaggtcacggcgcacatctcggacctcaggaactcgctggggaggaggggcgtcaaggacgagggactggtggtggcggccgagctggggcccgaggggctcaccgtggggaatgtcatcgccggtgaccacctctcgctcgcctacgaccgcacgcccgaggagatcctcggcatcgtctacggcaccggcaaccccgctcagcacggtgggttctttccccagggcgccgacggccgcatcgccagggggctcctcgcgtagcgcatgggcgtgtagcgaccgtgcgctgagcagcacggggggtaaagttgtccgtgtccctgctgcacggtacaggctgtagactagtactagtactttacgtgtttgtatgttcgcgactttgacgcatgtagttgtgtggtgagtgtgtaaactggatgatataaatgaatgttggtggaaataaagc

SEQ ID NO: 10729 - protein, 274 aa, Zea mays subsp. mays
  peptide (1)..(274): Ceres Seq. ID no. 12425291
  misc_feature (1)..(99): Homolog of NCBI NO: 38346151 NR Description: OSJNBb0118P14.11 [Oryza sativa (japonica
  misc_feature (52)..(104): Homolog of NCBI NO: 21593191 NR Description: dessication-related protein, putative
  misc_feature (52)..(104): Homolog of NCBI NO: 18401988 NR Description: dessication-related protein, putative; protein
  misc_feature (52)..(104): Homolog of NCBI NO: 25357137 NR Description: hypothetical protein T2J15.11 [imported] -
  misc_feature (48)..(99): Homolog of NCBI NO: 118926 NR Description: Desiccation-related protein PCC13-62 precursor
  misc_feature (33)..(107): Homolog of NCBI NO: 15228845 NR Description: putative protein; protein id: At3g62730.1, by cDNA: gi_15294283, supported by cDNA: gi_20147274 [Arabidopsis
  misc_feature (33)..(99): Homolog of NCBI NO: 12083528 NR Description: similar to Arabidopsis thaliana hypothetical
  misc_feature (42)..(104): Homolog of NCBI NO: 22984403 NR Description: hypothetical protein [Burkholderia fungorum]
MGAPAPSVAVVAAVVVCLCGAFARAQDMDNEWARPPYRGFFGGPGSLLPQSDVDLLEFPLNLEYLETEFFCWAALGYGLDAIDANLTGGGPPSIGGQSAFPHPVHPRRRHPVLLPRSRTPQGDQADGEGLPAAVAGHQRGQLRQDHRAGAERDAGSALQPLREQRQLPRRLLHHPLRRPHRLRRRQPQALHPSGQKAAGGAAGGGVSAGRGDPDAAVRARDGACGGLRRRGGGGHGAHLGPQELAGEEGRQGRGTGGGGRAGARGAHRGECHRR

SEQ ID NO: 10730 - protein, 247 aa, Zea mays subsp. mays
  peptide (1)..(247): Ceres Seq. ID no. 12425292
  misc_feature (1)..(72): Homolog of NCBI NO: 38346151 NR Description: OSJNBb0118P14.11 [Oryza sativa (japonica
  misc_feature (25)..(77): Homolog of NCBI NO: 21593191 NR Description: dessication-related protein, putative
  misc_feature (25)..(77): Homolog of NCBI NO: 18401988 NR Description: dessication-related protein, putative; protein
  misc_feature (25)..(77): Homolog of NCBI NO: 25357137 NR Description: hypothetical protein T2J15.11 [imported] -
  misc_feature (21)..(72): Homolog of NCBI NO: 118926 NR Description: Desiccation-related protein PCC13-62 precursor
  misc_feature (6)..(80): Homolog of NCBI NO: 15228845 NR Description: putative protein; protein id: At3g62730.1, by cDNA: gi_15294283, supported by cDNA: gi_20147274 [Arabidopsis
  misc_feature (6)..(72): Homolog of NCBI NO: 12083528 NR Description: similar to Arabidopsis thaliana hypothetical
  misc_feature (15)..(77): Homolog of NCBI NO: 22984403 NR Description: hypothetical protein [Burkholderia fungorum]
MDNEWARPPYRGFFGGPGSLLPQSDVDLLEFPLNLEYLETEFFCWAALGYGLDAIDANLTGGGPPSIGGQSAFPHPVHPRRRHPVLLPRSRTPQGDQADGEGLPAAVAGHQRGQLRQDHRAGAERDAGSALQPLREQRQLPRRLLHHPLRRPHRLRRRQPQALHPSGQKAAGGAAGGGVSAGRGDPDAAVRARDGACGGLRRRGGGGHGAHLGPQELAGEEGRQGRGTGGGGRAGARGAHRGECHRR

SEQ ID NO: 10731 - protein, 237 aa, Zea mays subsp. mays
  peptide (1)..(237): Ceres Seq. ID no. 12425293
  misc_feature (8)..(237): Homolog of NCBI NO: 38346151 NR Description: OSJNBb0118P14.11 [Oryza sativa (japonica
  misc_feature (2)..(236): Homolog of NCBI NO: 21593191 NR Description: dessication-related protein, putative
  misc_feature (2)..(236): Homolog of NCBI NO: 18401988 NR Description: dessication-related protein, putative; protein
  misc_feature (2)..(236): Homolog of NCBI NO: 25357137 NR Description: hypothetical protein T2J15.11 [imported] -
  misc_feature (6)..(230): Homolog of NCBI NO: 118926 NR Description: Desiccation-related protein PCC13-62 precursor
  misc_feature (3)..(236): Homolog of NCBI NO: 15228845 NR Description: putative protein; protein id: At3g62730.1, by cDNA: gi_15294283, supported by cDNA: gi_20147274 [Arabidopsis
  misc_feature (114)..(234): Homolog of NCBI NO: 12083528 NR Description: similar to Arabidopsis thaliana hypothetical
  misc_feature (8)..(95): Homolog of NCBI NO: 12083528 NR Description: similar to Arabidopsis thaliana hypothetical
  misc_feature (17)..(231): Homolog of NCBI NO: 22984403 NR Description: hypothetical protein [Burkholderia fungorum]
  misc_feature (5)..(231): Homolog of NCBI NO: 16263242 NR Description: Conserved hypothetical protein [Sinorhizobium
MPTSPAAGRPPSAASPPSLTPFIRDVATQFCYQEVGHLRAIKQTVRGFPRPLLDISAANFGKIIEQALNATLDPPFNPYENSVNFLVASYIIPYVGLTGYVGANPRLFTPQARKLLAGLLAVESAQDAVIRTLLYERGMARVAGYAVGVAEVTAHISDLRNSLGRRGVKDEGLVVAAELGPEGLTVGNVIAGDHLSLAYDRTPEEILGIVYGTGNPAQHGGFFPQGADGRIARGLLA

SEQ ID NO: 10732 - DNA, 1359 bp, Zea mays subsp. mays
  misc_feature (1)..(1359): Ceres Seq. ID no. 12342086
  misc_feature: MA Experiment ID: 108544 Result: Up-regulated in Transcription
gctctatacgactcctccatcctccccccctccccgtgatggctgcaatggatggggtaattgtagtggagctgtagaggcggcgggggtgcggttgcgacggactgtgctgcgccgacaagctgggaagaggaggcagcggcggcggggtgggacttgggatgggtcttctgtcgaaccgggtggagcggtcggagatcaggcccggcgaccacatctacacctggcgggccgtctacgcctactcccaccacggtatttatgtcgggggaagcaaagtggtccattttacacgtaagaaagaaactgaaacttcagattcatcagactccacctccagcctgatctcagagatttcatcagagtgccaaacattccctgattgtggatttcagctgtctaatagtggtgttgtcctcacttgcttggactgtttcctccgcaacggctccctctattgcttcgagtatggagtgccatctgcagttttccttgcaaagattcgtggggggacctgcaccattgccgaatcagacccaccagaagttgttgtccatcgagcgatgtacctgcttcaaaatggttttggaaactacgacatgtttgagaagaactgcgaagacttcgcactctactgcaagactgggcttctacctgttgaggagcctggcattgggactagtgggcaagcttcttctgctattggtgtgccgttggcagctcttctgtccactccgttcaagcttcttctgctggtccgcttggaatggccactgtcactgctgggatgtactgtgctggcagatacattactgacataggagtaaggaaggacgtagcaaaagttgaagtggagaaattatcatcgcaccccggtttccaccttgttgaagatgaagaatcagtcaacaagcgatcagaaaaaccaaagaccttgctccctatgaagaggaaacgagaaaggtgactgcgaagcacagcttaggaggatgaacttctcttcccttcaattggtgtcgaattgtggataatttgggatatgataataagactcggtatagatatgtgccttgcgaatgtatcataattggattaggcgcacccctcacctgatcaactgtaactgccttataaattcaatcaaattgctatataatgtagatttttcttctttgtgaggtttcagtcttctgctgcaattaataacagttataatattttttactgatctgggagatcactgtatctgtattctgtagttacaacttacaaggtagagcaaactatcggcaatggcgttttcatcaggtatactgtacgaaaagtgaatataaaaaattgagcagagcttgtttttgg

SEQ ID NO: 10733 - protein, 219 aa, Zea mays subsp. mays
  peptide (1)..(219): Ceres Seq. ID no. 12342087
  misc_feature (99)..(179): Pfam Name: NC domain Pfam Description: NC domain
  misc_feature (1)..(197): Homolog of NCBI NO: 18378812 NR Description: Expressed protein; protein id: At1g01225.1,
  misc_feature (1)..(197): Homolog of NCBI NO: 21592684 NR Description: unknown [Arabidopsis thaliana]
  misc_feature (1)..(197): Homolog of NCBI NO: 22328196 NR Description: unknown protein; protein id: At4g00905.1
  misc_feature (1)..(196): Homolog of NCBI NO: 18415178 NR Description: putative protein; protein id: At5g06370.1, by cDNA: 117588., supported by cDNA: gi_14190474, supported by gi_15809733 [Arabidopsis thaliana]
  misc_feature (1)..(196): Homolog of NCBI NO: 18396282 NR Description: expressed protein; protein id: At3g02700.1, by cDNA: 6694. [Arabidopsis thaliana] >gi|6957733|gb|AAF32477.1| protein [Arabidopsis thaliana] >gi|26449424|dbj|BAC41839.1|
  misc_feature (1)..(196): Homolog of NCBI NO: 21594170 NR Description: unknown [Arabidopsis thaliana]
  misc_feature (1)..(179): Homolog of NCBI NO: 15237330 NR Description: putative protein; protein id: At5g16360.1 thaliana] >gi|9759118|dbj|BAB09603.1| to unknown protein [Arabidopsis thaliana]
  misc_feature (32)..(196): Homolog of NCBI NO: 9758417 NR Description: gb|AAF32477.1~gene_id:MHF15.11~similar to unknown
  misc_feature (1)..(193): Homolog of NCBI NO: 15237327 NR Description: putative protein; protein id: At5g16330.1 thaliana] >gi|9759115|dbj|BAB09600.1|
MGLLSNRVERSEIRPGDHIYTWRAVYAYSHHGIYVGGSKVVHFTRKKETETSDSSDSTSSLISEISSECQTFPDCGFQLSNSGVVLTCLDCFLRNGSLYCFEYGVPSAVFLAKIRGGTCTIAESDPPEVVVHRAMYLLQNGFGNYDMFEKNCEDFALYCKTGLLPVEEPGIGTSGQASSAIGVPLAALLSTPFKLLLLVRLEWPLSLLGCTVLADTLLT

SEQ ID NO: 10734 - protein, 115 aa, Zea mays subsp. mays
  peptide (1)..(115): Ceres Seq. ID no. 12342088
MECHLQFSLQRFVGGPAPLPNQTHQKLLSIERCTCFKMVLETTTCLRRTAKTSHSTARLGFYLLRSLALGLVGKLLLLLVCRWQLFCPLRSSFFCWSAWNGHCHCWDVLCWQIHY

SEQ ID NO: 10735 - DNA, 1417 bp, Zea mays subsp. mays
  misc_feature (1)..(1417): Ceres Seq. ID no. 12353388
  misc_feature: MA Experiment ID: 108527 Result: Down-regulated in Transcription
  misc_feature: MA Experiment 108527 PARAMETER Experiment Name: Zm_5mM_NO_P Parameter: Age (day) Value: 8
  misc_feature: MA Experiment 108527 PARAMETER Experiment Name: Zm_5mM_NO_P Parameter: Organism Value: Zea mays
  misc_feature: MA Experiment 108527 PARAMETER Experiment Name: Zm_5mM_NO_P Parameter: Plant Line Value: 35A19
  misc_feature: MA Experiment 108527 PARAMETER Experiment Name: Zm_5mM_NO_P Parameter: Timepoint (hr) Value: 6
  misc_feature: MA Experiment 108527 PARAMETER Experiment Name: Zm_5mM_NO_P Parameter: Tissue Value: Aerial
  misc_feature: MA Experiment 108527 PARAMETER Experiment Name: Zm_5mM_NO_P Parameter: Treatment Value: 5mM NO vs. No Treatment
  misc_feature: MA Experiment ID: 108528 Result: Up-regulated in Transcription
  misc_feature: MA Experiment 108528 PARAMETER Experiment Name: Zm_Imbibed_Seeds_P Parameter: Age (day) Value: 5 vs. 2
  misc_feature: MA Experiment 108528 PARAMETER Experiment Name: Zm_Imbibed_Seeds_P Parameter: Organism Value: Zea mays
  misc_feature: MA Experiment 108528 PARAMETER Experiment Name: Zm_Imbibed_Seeds_P Parameter: Plant Line Value: 35A19
  misc_feature: MA Experiment 108528 PARAMETER Experiment Name: Zm_Imbibed_Seeds_P Parameter: Tissue Value: Aerial vs. Embryo
  misc_feature: MA Experiment ID: 108529 Result: Down-regulated in Transcription
  misc_feature: MA Experiment 108529 PARAMETER Experiment Name: Zm_Imbibed_Seeds_P Parameter: Age (day) Value: 5 vs. 2
  misc_feature: MA Experiment 108529 PARAMETER Experiment Name: Zm_Imbibed_Seeds_P Parameter: Organism Value: Zea mays
  misc_feature: MA Experiment 108529 PARAMETER Experiment Name: Zm_Imbibed_Seeds_P Parameter: Plant Line Value: 35A19
  misc_feature: MA Experiment 108529 PARAMETER Experiment Name: Zm_Imbibed_Seeds_P Parameter: Tissue Value: Roots vs. Embryo
  misc_feature: MA Experiment ID: 108530 Result: Up-regulated in Transcription
  misc_feature: MA Experiment 108530 PARAMETER Experiment Name: Zm_Imbibed_Seeds_P Parameter: Age (day) Value: 6 vs. 2
  misc_feature: MA Experiment 108530 PARAMETER Experiment Name: Zm_Imbibed_Seeds_P Parameter: Organism Value: Zea mays
  misc_feature: MA Experiment 108530 PARAMETER Experiment Name: Zm_Imbibed_Seeds_P Parameter: Plant Line Value: 35A19
  misc_feature: MA Experiment 108530 PARAMETER Experiment Name: Zm_Imbibed_Seeds_P Parameter: Tissue Value: Aerial vs. Embryo
  misc_feature: MA Experiment ID: 108544 Result: Up-regulated in Transcription
  misc_feature: MA Experiment ID: 108559 Result: Down-regulated in Transcription
  misc_feature: MA Experiment 108559 PARAMETER Experiment Name: Zm_5mM_NO_P Parameter: Age (day) Value: 8
  misc_feature: MA Experiment 108559 PARAMETER Experiment Name: Zm_5mM_NO_P Parameter: Organism Value: Zea mays
  misc_feature: MA Experiment 108559 PARAMETER Experiment Name: Zm_5mM_NO_P Parameter: Plant Line Value: 35A19
  misc_feature: MA Experiment 108559 PARAMETER Experiment Name: Zm_5mM_NO_P Parameter: Timepoint (hr) Value: 12
  misc_feature: MA Experiment 108559 PARAMETER Experiment Name: Zm_5mM_NO_P Parameter: Tissue Value: Aerial
  misc_feature: MA Experiment 108559 PARAMETER Experiment Name: Zm_5mM_NO_P Parameter: Treatment Value: 5mM NO vs. No Treatment
actcggccactcgacaccaccctccgcgctccgcatccgctcctccctctgctgccgtgccggtgccgctagccatccccacttctcacccgccccctctcctctactgccgccagccgcaacaaagatatggatagagcggccgcgacagccgcagacattatcgtcatgatcccatcgctctcgccttcgcctttgtagcactacctcctcgtccatccgcccccctatttcgtcccactcgggttgctagatcggactggatctctctgcccgtttcttggagcagagatggccgaaatgaccgtgactgtcgcggccgccaaaagcaccctccggacgtgccccggcgcccgccgtgctgcggttcttggtcggtggatgcctcttgcaccagcggcgcccgccaacttgaaattgttctctccagctgtgagggttccaagggctacttcccctgcggcggttgaggatgggagcaacactgatatagtccctatcccgaaagttataatagaccaagactcagatccggatgcaaccattgtagaaataaccttgggtgatcgtcttggcgatctccttgatacgatgagtgcgctaaagaacttggggctaaatgttgttaaagctagtgtctgtctcgattctactggcaagcatatcaagtttgctataactagagcgttcactggccgtaaaattgatgatccagagttgttagaagcagttcgactgacgatcattaacaacatgatacagtatcatccagagtccagcagtcaattggctatgggggcaacttttgggccagaagcccctacggaagaggttgatgtggatatagcaacccacatagatatctatgatgatggccctgaaagaagcttacttgtggtggaaacagcggatcgtccagggttactggttgaccttgttaagatcatctcggacatcagcattaatgtccaatctggagagtttgacactgaggggctactggctaaagcaaaattccatgtcagctacaggggcagaacactgaccgaggctttacaacaggttctttctaatagcttgcgctatttcttgaggcggccgacaacagaggacgccagcttctagccagatagatgatcatgaagcctcccaactttcttatgtggtggtattcacatgaattgaataccatcgtcaaagcatttgaaacacgcacaataatttgttaagatgggggcaattgtacttgatgttatggcaccacaccaattcgaagtattttttgttccaaggcaggggaatctgttgtatccaagtgcagaagattgctattcttaatcatgtaataacacattattattttgctacttgggatacaccgtttggtggtaaataagatggaatattgtgggggccc

SEQ ID NO: 10736 - protein, 277 aa, Zea mays subsp. mays
  peptide (1)..(277): Ceres Seq. ID no. 12353389
  misc_feature (199)..(268): Pfam Name: ACT domain Pfam Description: ACT domain
  misc_feature (52)..(277): Homolog of NCBI NO: 18394414 NR Description: expressed protein; protein id: At1g16880.1, by cDNA: gi_14423501 [Arabidopsis thaliana]
  misc_feature (23)..(277): Homolog of NCBI NO: 15238305 NR Description: putative protein; protein id: At5g04740.1, by cDNA: 34592., supported by cDNA: gi_18252932 [Arabidopsis
  misc_feature (23)..(277): Homolog of NCBI NO: 21592963 NR Description: unknown [Arabidopsis thaliana]
MAEMTVTVAAAKSTLRTCPGARRAAVLGRWMPLAPAAPANLKLFSPAVRVPRATSPAAVEDGSNTDIVPIPKVIIDQDSDPDATIVEITLGDRLGDLLDTMSALKNLGLNVVKASVCLDSTGKHIKFAITRAFTGRKIDDPELLEAVRLTIINNMIQYHPESSSQLAMGATFGPEAPTEEVDVDIATHIDIYDDGPERSLLVVETADRPGLLVDLVKIISDISINVQSGEFDTEGLLAKAKFHVSYRGRTLTEALQQVLSNSLRYFLRRPTTEDASF

SEQ ID NO: 10737 - protein, 274 aa, Zea mays subsp. mays
  peptide (1)..(274): Ceres Seq. ID no. 12353390
  misc_feature (196)..(265): Pfam Name: ACT domain Pfam Description: ACT domain
  misc_feature (49)..(274): Homolog of NCBI NO: 18394414 NR Description: expressed protein; protein id: At1g16880.1, by cDNA: gi_14423501 [Arabidopsis thaliana]
  misc_feature (20)..(274): Homolog of NCBI NO: 15238305 NR Description: putative protein; protein id: At5g04740.1, by cDNA: 34592., supported by cDNA: gi_18252932 [Arabidopsis
  misc_feature (20)..(274): Homolog of NCBI NO: 21592963 NR Description: unknown [Arabidopsis thaliana]
MTVTVAAAKSTLRTCPGARRAAVLGRWMPLAPAAPANLKLFSPAVRVPRATSPAAVEDGSNTDIVPIPKVIIDQDSDPDATIVEITLGDRLGDLLDTMSALKNLGLNVVKASVCLDSTGKHIKFAITRAFTGRKIDDPELLEAVRLTIINNMIQYHPESSSQLAMGATFGPEAPTEEVDVDIATHIDIYDDGPERSLLVVETADRPGLLVDLVKIISDISINVQSGEFDTEGLLAKAKFHVSYRGRTLTEALQQVLSNSLRYFLRRPTTEDASF

SEQ ID NO: 10738 - protein, 247 aa, Zea mays subsp. mays
  peptide (1)..(247): Ceres Seq. ID no. 12353391
  misc_feature (169)..(238): Pfam Name: ACT domain Pfam Description: ACT domain
  misc_feature (22)..(247): Homolog of NCBI NO: 18394414 NR Description: expressed protein; protein id: At1g16880.1, by cDNA: gi_14423501 [Arabidopsis thaliana]
  misc_feature (1)..(247): Homolog of NCBI NO: 15238305 NR Description: putative protein; protein id: At5g04740.1, by cDNA: 34592., supported by cDNA: gi_18252932 [Arabidopsis
  misc_feature (1)..(247): Homolog of NCBI NO: 21592963 NR Description: unknown [Arabidopsis thaliana]
MPLAPAAPANLKLFSPAVRVPRATSPAAVEDGSNTDIVPIPKVIIDQDSDPDATIVEITLGDRLGDLLDTMSALKNLGLNVVKASVCLDSTGKHIKFAITRAFTGRKIDDPELLEAVRLTIINNMIQYHPESSSQLAMGATFGPEAPTEEVDVDIATHIDIYDDGPERSLLVVETADRPGLLVDLVKIISDISINVQSGEFDTEGLLAKAKFHVSYRGRTLTEALQQVLSNSLRYFLRRPTTEDASF

SEQ ID NO: 10739 - DNA, 2887 bp, Zea mays subsp. mays
  misc_feature (1)..(2887): Ceres Seq. ID no. 13635664
  misc_feature: MA Experiment ID: 108527 Result: Down-regulated in Transcription
  misc_feature: MA Experiment 108527 PARAMETER Experiment Name: Zm_5mM_NO_P Parameter: Age (day) Value: 8
  misc_feature: MA Experiment 108527 PARAMETER Experiment Name: Zm_5mM_NO_P Parameter: Organism Value: Zea mays
  misc_feature: MA Experiment 108527 PARAMETER Experiment Name: Zm_5mM_NO_P Parameter: Plant Line Value: 35A19
  misc_feature: MA Experiment 108527 PARAMETER Experiment Name: Zm_5mM_NO_P Parameter: Timepoint (hr) Value: 6
  misc_feature: MA Experiment 108527 PARAMETER Experiment Name: Zm_5mM_NO_P Parameter: Tissue Value: Aerial
  misc_feature: MA Experiment 108527 PARAMETER Experiment Name: Zm_5mM_NO_P Parameter: Treatment Value: 5mM NO vs. No Treatment
  misc_feature: MA Experiment ID: 108556 Result: Down-regulated in Transcription
  misc_feature: MA Experiment 108556 PARAMETER Experiment Name: Zm_Drought_P Parameter: Age (day) Value: 9
  misc_feature: MA Experiment 108556 PARAMETER Experiment Name: Zm_Drought_P Parameter: Organism Value: Zea mays
  misc_feature: MA Experiment 108556 PARAMETER Experiment Name: Zm_Drought_P Parameter: Plant Line Value: 35A19
  misc_feature: MA Experiment 108556 PARAMETER Experiment Name: Zm_Drought_P Parameter: Timepoint (hr) Value: 24
  misc_feature: MA Experiment 108556 PARAMETER Experiment Name: Zm_Drought_P Parameter: Tissue Value: Aerial
  misc_feature: MA Experiment 108556 PARAMETER Experiment Name: Zm_Drought_P Parameter: Treatment Value: Drought vs. No Drought
  misc_feature: MA Experiment ID: 108559 Result: Down-regulated in Transcription
  misc_feature: MA Experiment 108559 PARAMETER Experiment Name: Zm_5mM_NO_P Parameter: Age (day) Value: 8
  misc_feature: MA Experiment 108559 PARAMETER Experiment Name: Zm_5mM_NO_P Parameter: Organism Value: Zea mays
  misc_feature: MA Experiment 108559 PARAMETER Experiment Name: Zm_5mM_NO_P Parameter: Plant Line Value: 35A19
  misc_feature: MA Experiment 108559 PARAMETER Experiment Name: Zm_5mM_NO_P Parameter: Timepoint (hr) Value: 12
  misc_feature: MA Experiment 108559 PARAMETER Experiment Name: Zm_5mM_NO_P Parameter: Tissue Value: Aerial
  misc_feature: MA Experiment 108559 PARAMETER Experiment Name: Zm_5mM_NO_P Parameter: Treatment Value: 5mM NO vs. No Treatment
  misc_feature: MA Experiment ID: 20000477 Result: Down-regulated in Transcription
  misc_feature: MA Experiment 20000477 PARAMETER Experiment Name: Zm_5mM_SA_P Parameter: Age (day) Value: 10
  misc_feature: MA Experiment 20000477 PARAMETER Experiment Name: Zm_5mM_SA_P Parameter: Organism Value: Zea mays
  misc_feature: MA Experiment 20000477 PARAMETER Experiment Name: Zm_5mM_SA_P Parameter: Plant Line Value: 35A19
  misc_feature: MA Experiment 20000477 PARAMETER Experiment Name: Zm_5mM_SA_P Parameter: Timepoint (hr) Value: 48
  misc_feature: MA Experiment 20000477 PARAMETER Experiment Name: Zm_5mM_SA_P Parameter: Tissue Value: Aerial
  misc_feature: MA Experiment 20000477 PARAMETER Experiment Name: Zm_5mM_SA_P Parameter: Treatment Value: 5mM SA vs. No Treatment
  misc_feature: MA Experiment ID: 20000478 Result: Down-regulated in Transcription
  misc_feature: MA Experiment 20000478 PARAMETER Experiment Name: Zm_5mM_SA_P Parameter: Age (day) Value: 11
  misc_feature: MA Experiment 20000478 PARAMETER Experiment Name: Zm_5mM_SA_P Parameter: Organism Value: Zea mays
  misc_feature: MA Experiment 20000478 PARAMETER Experiment Name: Zm_5mM_SA_P Parameter: Plant Line Value: 35A19
  misc_feature: MA Experiment 20000478 PARAMETER Experiment Name: Zm_5mM_SA_P Parameter: Timepoint (hr) Value: 72
  misc_feature: MA Experiment 20000478 PARAMETER Experiment Name: Zm_5mM_SA_P Parameter: Tissue Value: Aerial
  misc_feature: MA Experiment 20000478 PARAMETER Experiment Name: Zm_5mM_SA_P Parameter: Treatment Value: 5mM SA vs. No Treatment
  misc_feature: MA Experiment ID: 20000492 Result: Down-regulated in Transcription
  misc_feature: MA Experiment 20000492 PARAMETER Experiment Name: Zm_Hybrid_Seed_Dev_P Parameter: DAP Value: 12
  misc_feature: MA Experiment 20000492 PARAMETER Experiment Name: Zm_Hybrid_Seed_Dev_P Parameter: Organism Value: Zea mays
  misc_feature: MA Experiment 20000492 PARAMETER Experiment Name: Zm_Hybrid_Seed_Dev_P Parameter: Plant Line Value: 35A19
  misc_feature: MA Experiment 20000492 PARAMETER Experiment Name: Zm_Hybrid_Seed_Dev_P Parameter: Tissue Value: Fert Kernel vs. Unfert Floret
  misc_feature: MA Experiment ID: 20000535 Result: Down-regulated in Transcription
  misc_feature: MA Experiment 20000535 PARAMETER Experiment Name: Zm_Hybrid_Seed_Dev_P Parameter: DAP Value: 30 vs. 12
  misc_feature: MA Experiment 20000535 PARAMETER Experiment Name: Zm_Hybrid_Seed_Dev_P Parameter: Organism Value: Zea mays
  misc_feature: MA Experiment 20000535 PARAMETER Experiment Name: Zm_Hybrid_Seed_Dev_P Parameter: Plant Line Value: 35A19
  misc_feature: MA Experiment 20000535 PARAMETER Experiment Name: Zm_Hybrid_Seed_Dev_P Parameter: Tissue Value: Embryo vs. Unfert Floret
ggctgagaccgctcagcgacaaggagatttcaaggggggacccggcggagtgggagtgcatcaacgacactaccatcatctcccggagcaccttcccggaccggcccactgctccgactgcgtattcgttcgatagggtatttcgttctgactgtactaccaaagaagtatatgaggaagggaccaaagcagttgccctctctgtagttagtggcattaactcaagtgtttttgcatatggtcaaacaagtagtggaaaaacatacaccatgactggaataacggaatatacagcagcagatatctatgattacattgccaagcatgaagagagagcgtttgtattgaaattttcagcaatcgaaatatataacgaagttgtaagggatcttcttagtgcagaaaacacatcgcttagactttgggatgatgcagagaagggaacatgtgtagagaaccttacagaggtgaccttgagggattcagaccacctgaaagaacttattctacgtgtgaagctcaaaaggaggaccggagagacatacttaaatgaaaacagctccagatcacaccaaatacttaaactgactattgaaagttctgctcatgagttcttgggtaaggacaagtcaacaacacttgttgctagtgtgaacttcgttgatttggctggaagtgaacgtgcatcccaggcattatcagctgggactaggctgaaggaaggttgtcatattaatagaagtctacttaccctaggaactggtattcggaaactaagcaaggtaagaaatgggcacataccataccgagattcaaagctcacgcgcatattcaccttctctaggaggcaatgcaagaacagcaattatttgtacaatgagcccagcccggagccatatggacagtcaaggaataccttgttgtttgcaagttgtgcaaaggaagtggtgacaaatgcccaggttaatgtcgttatgtctgataaggcactggttaagcaattacaaaaagaacttgcaaggttggagagtgaattgcgatgcccagcttcatattctggtcttgaagcattagtgagagaaaaagataatcaaatccggaagatggataaagaaattaaggaactgaagttacatcgtgatcttgctcagtctagactgcaagatttgctcaaggttgttggagataaccacggttcgaagcaccccctggcttcttctgcaagaaattttacttttgatgttcctcagccatgtgaggatgagcaatcgacgacatcagaagctttcagcagtggccaaattttaggcttcaaggcgcctgacacacaaagagattataggtcacagcaatctgaaaatgatgtgcagtttgctacccctcttagctattcaatcagcagtcccccattcagtgggatgcctccaactaatggcagaaatgataactctcatatatctgatgaagattcagaggatctttgcaaagaagtacggtgcatagagaccaatgaaacagaagaaaatgaatgcttagagtcgtcagctgtgggaagcaatagtctgcaagattcaaatttagcttccagcatgcatgggaacgacaatacaaatcgatctgtgaattctggacggaatgatgcatcttctattaccctggaacaacatctggagaatgtcaaaaaaccgtttgccaatcctggcatggatctgggatcctctacacgtaactcgtcaagctcaaaagtaattggcagaagcaggagctgtaggtctctgatgggttctactctgttggaagacttggagaaagaagtttgcacccctccaagcagaagtttcatggactacccagggaggcccgaaacatgtcaaagaagggtacccgcactgaactacgatgcagagagtgaagctttatccagggcaggatcaatgctatctgaaattaccaccacgaggggtggactgaaggaaaacagctctgctgctggtgatacagaatttgttgctggcataggtgaatttgtcgcggagctaaaagaaatggcccagggtcataatggagaattggctgaagggaccataaggagcgtggggctggatcccattatggatatcttgcaatcaccttctcgctggcctttggaattcgagaagaaacagcaggagatcattgacctgtggcatggatgcaacgtttccttggtccacaggacttactttttcctgctgttcaaaggggacccagccgacgccatttacatggaagtggagcttaggaggttatcatttctcaagaacacatactccaacggaagcatggggtatgatatggtggcaggcagcttgagcacttctctggtttcaagtgcaaagaaactgcaacgcgagagggagatgctctgcaggcagatgcagaagcggctgacgatccaggaacgggagagcctgtacaccaagtggggagtctcgctgtcctccaagaggaggcggctgcaggtcgctcggcgcctttggacggagaccagggacctggagcatgtgagggagagcgcgtccctcgtggccagactgatcgggctcctggagcctgggaaggcgctgagggagatgtttggtctgagcttcgcgccgcagcagtccacccggaggtcgcacagtagttggcggtatggccgttcttctctagactgactgagctcgaaagacgcagctgacaaaaaaacaacaacagttattccgttgttttcgttttgtgtagtgcctgatttttttgctgtcctctcggaaaatagaaattcctgaacattttgtgaccagtctgcgagaaaatttggtagcattttcaagatttattgatgtttacaatttggaaaccgtcaacg

SEQ ID NO: 10740 - protein, 897 aa, Zea mays subsp. mays
  peptide (1)..(897): Ceres Seq. ID no. 13635665
  misc_feature (464)..(892): Homolog of NCBI NO: 15208447 NR Description: kinesin heavy chain [Zea mays]
  misc_feature (80)..(395): Homolog of NCBI NO: 15208447 NR Description: kinesin heavy chain [Zea mays]
  misc_feature (1)..(395): Homolog of NCBI NO: 30693419 NR Description: expressed protein [Arabidopsis thaliana]
  misc_feature (676)..(896): Homolog of NCBI NO: 30693419 NR Description: expressed protein [Arabidopsis thaliana]
  misc_feature (1)..(524): Homolog of NCBI NO: 30698217 NR Description: kinesin heavy chain DNA binding protein-related
  misc_feature (694)..(896): Homolog of NCBI NO: 30698217 NR Description: kinesin heavy chain DNA binding protein-related
  misc_feature (1)..(506): Homolog of NCBI NO: 18416291 NR Description: hypothetical protein [Arabidopsis thaliana]
  misc_feature (485)..(894): Homolog of NCBI NO: 18416291 NR Description: hypothetical protein [Arabidopsis thaliana]
  misc_feature (1)..(400): Homolog of NCBI NO: 15234898 NR Description: kinesin like protein [Arabidopsis thaliana]
  misc_feature (607)..(896): Homolog of NCBI NO: 15234898 NR Description: kinesin like protein [Arabidopsis thaliana]
  misc_feature (464)..(892): Homolog of NCBI NO: 15208447 NR Description: kinesin heavy chain [Zea mays]
  misc_feature (80)..(395): Homolog of NCBI NO: 15208447 NR Description: kinesin heavy chain [Zea mays]
  misc_feature (1)..(395): Homolog of NCBI NO: 30693419 NR Description: expressed protein [Arabidopsis thaliana]
  misc_feature (676)..(896): Homolog of NCBI NO: 30693419 NR Description: expressed protein [Arabidopsis thaliana]
  misc_feature (1)..(524): Homolog of NCBI NO: 30698217 NR Description: kinesin heavy chain DNA binding protein-related
  misc_feature (694)..(896): Homolog of NCBI NO: 30698217 NR Description: kinesin heavy chain DNA binding protein-related
  misc_feature (1)..(506): Homolog of NCBI NO: 18416291 NR Description: hypothetical protein [Arabidopsis thaliana]
  misc_feature (485)..(894): Homolog of NCBI NO: 18416291 NR Description: hypothetical protein [Arabidopsis thaliana]
  misc_feature (1)..(400): Homolog of NCBI NO: 15234898 NR Description: kinesin like protein [Arabidopsis thaliana]
  misc_feature (607)..(896): Homolog of NCBI NO: 15234898 NR Description: kinesin like protein [Arabidopsis thaliana]
LRPLSDKEISRGDPAEWECINDTTIISRSTFPDRPTAPTAYSFDRVFRSDCTTKEVYEEGTKAVALSVVSGINSSVFAYGQTSSGKTYTMTGITEYTAADIYDYIAKHEERAFVLKFSAIEIYNEVVRDLLSAENTSLRLWDDAEKGTCVENLTEVTLRDSDHLKELILRVKLKRRTGETYLNENSSRSHQILKLTIESSAHEFLGKDKSTTLVASVNFVDLAGSERASQALSAGTRLKEGCHINRSLLTLGTGIRKLSKVRNGHIPYRDSKLTRIFTFSRRQCKNSNYLYNEPSPEPYGQSRNTLLFASCAKEVVTNAQVNVVMSDKALVKQLQKELARLESELRCPASYSGLEALVREKDNQIRKMDKEIKELKLHRDLAQSRLQDLLKVVGDNHGSKHPLASSARNFTFDVPQPCEDEQSTTSEAFSSGQILGFKAPDTQRDYRSQQSENDVQFATPLSYSISSPPFSGMPPTNGRNDNSHISDEDSEDLCKEVRCIETNETEENECLESSAVGSNSLQDSNLASSMHGNDNTNRSVNSGRNDASSITLEQHLENVKKPFANPGMDLGSSTRNSSSSKVIGRSRSCRSLMGSTLLEDLEKEVCTPPSRSFMDYPGRPETCQRRVPALNYDAESEALSRAGSMLSEITTTRGGLKENSSAAGDTEFVAGIGEFVAELKEMAQGHNGELAEGTIRSVGLDPIMDILQSPSRWPLEFEKKQQEIIDLWHGCNVSLVHRTYFFLLFKGDPADAIYMEVELRRLSFLKNTYSNGSMGYDMVAGSLSTSLVSSAKKLQREREMLCRQMQKRLTIQERESLYTKWGVSLSSKRRRLQVARRLWTETRDLEHVRESASLVARLIGLLEPGKALREMFGLSFAPQQSTRRSHSSWRYGRSSLD

SEQ ID NO: 10741 - protein, 808 aa, Zea mays subsp. mays
  peptide (1)..(808): Ceres Seq. ID no. 13635666
  misc_feature (375)..(803): Homolog of NCBI NO: 15208447 NR Description: kinesin heavy chain [Zea mays]
  misc_feature (1)..(306): Homolog of NCBI NO: 15208447 NR Description: kinesin heavy chain [Zea mays]
  misc_feature (1)..(306): Homolog of NCBI NO: 30693419 NR Description: expressed protein [Arabidopsis thaliana]
  misc_feature (587)..(807): Homolog of NCBI NO: 30693419 NR Description: expressed protein [Arabidopsis thaliana]
  misc_feature (1)..(435): Homolog of NCBI NO: 30698217 NR Description: kinesin heavy chain DNA binding protein-related
  misc_feature (605)..(807): Homolog of NCBI NO: 30698217 NR Description: kinesin heavy chain DNA binding protein-related
  misc_feature (1)..(417): Homolog of NCBI NO: 18416291 NR Description: hypothetical protein [Arabidopsis thaliana]
  misc_feature (396)..(805): Homolog of NCBI NO: 18416291 NR Description: hypothetical protein [Arabidopsis thaliana]
  misc_feature (1)..(311): Homolog of NCBI NO: 15234898 NR Description: kinesin like protein [Arabidopsis thaliana]
  misc_feature (518)..(807): Homolog of NCBI NO: 15234898 NR Description: kinesin like protein [Arabidopsis thaliana]
  misc_feature (375)..(803): Homolog of NCBI NO: 15208447 NR Description: kinesin heavy chain [Zea mays]
  misc_feature (1)..(306): Homolog of NCBI NO: 15208447 NR Description: kinesin heavy chain [Zea mays]
  misc_feature (1)..(306): Homolog of NCBI NO: 30693419 NR Description: expressed protein [Arabidopsis thaliana]
  misc_feature (587)..(807): Homolog of NCBI NO: 30693419 NR Description: expressed protein [Arabidopsis thaliana]
  misc_feature (1)..(435): Homolog of NCBI NO: 30698217 NR Description: kinesin heavy chain DNA binding protein-related
  misc_feature (605)..(807): Homolog of NCBI NO: 30698217 NR Description: kinesin heavy chain DNA binding protein-related
  misc_feature (1)..(417): Homolog of NCBI NO: 18416291 NR Description: hypothetical protein [Arabidopsis thaliana]
  misc_feature (396)..(805): Homolog of NCBI NO: 18416291 NR Description: hypothetical protein [Arabidopsis thaliana]
  misc_feature (1)..(311): Homolog of NCBI NO: 15234898 NR Description: kinesin like protein [Arabidopsis thaliana]
  misc_feature (518)..(807): Homolog of NCBI NO: 15234898 NR Description: kinesin like protein [Arabidopsis thaliana]
MTGITEYTAADIYDYIAKHEERAFVLKFSAIEIYNEVVRDLLSAENTSLRLWDDAEKGTCVENLTEVTLRDSDHLKELILRVKLKRRTGETYLNENSSRSHQILKLTIESSAHEFLGKDKSTTLVASVNFVDLAGSERASQALSAGTRLKEGCHINRSLLTLGTGIRKLSKVRNGHIPYRDSKLTRIFTFSRRQCKNSNYLYNEPSPEPYGQSRNTLLFASCAKEVVTNAQVNVVMSDKALVKQLQKELARLESELRCPASYSGLEALVREKDNQIRKMDKEIKELKLHRDLAQSRLQDLLKVVGDNHGSKHPLASSARNFTFDVPQPCEDEQSTTSEAFSSGQILGFKAPDTQRDYRSQQSENDVQFATPLSYSISSPPFSGMPPTNGRNDNSHISDEDSEDLCKEVRCIETNETEENECLESSAVGSNSLQDSNLASSMHGNDNTNRSVNSGRNDASSITLEQHLENVKKPFANPGMDLGSSTRNSSSSKVIGRSRSCRSLMGSTLLEDLEKEVCTPPSRSFMDYPGRPETCQRRVPALNYDAESEALSRAGSMLSEITTTRGGLKENSSAAGDTEFVAGIGEFVAELKEMAQGHNGELAEGTIRSVGLDPIMDILQSPSRWPLEFEKKQQEIIDLWHGCNVSLVHRTYFFLLFKGDPADAIYMEVELRRLSFLKNTYSNGSMGYDMVAGSLSTSLVSSAKKLQREREMLCRQMQKRLTIQERESLYTKWGVSLSSKRRRLQVARRLWTETRDLEHVRESASLVARLIGLLEPGKALREMFGLSFAPQQSTRRSHSSWRYGRSSLD

SEQ ID NO: 10742 - protein, 573 aa, Zea mays subsp. mays
  peptide (1)..(573): Ceres Seq. ID no. 13635667
  misc_feature (283)..(572): Homolog of NCBI NO: 15234898 NR Description: kinesin like protein [Arabidopsis thaliana]
  misc_feature (140)..(568): Homolog of NCBI NO: 15208447 NR Description: kinesin heavy chain [Zea mays]
  misc_feature (1)..(71): Homolog of NCBI NO: 15208447 NR Description: kinesin heavy chain [Zea mays]
  misc_feature (1)..(71): Homolog of NCBI NO: 30693419 NR Description: expressed protein [Arabidopsis thaliana]
  misc_feature (352)..(572): Homolog of NCBI NO: 30693419 NR Description: expressed protein [Arabidopsis thaliana]
  misc_feature (1)..(200): Homolog of NCBI NO: 30698217 NR Description: kinesin heavy chain DNA binding protein-related
  misc_feature (370)..(572): Homolog of NCBI NO: 30698217 NR Description: kinesin heavy chain DNA binding protein-related
  misc_feature (1)..(182): Homolog of NCBI NO: 18416291 NR Description: hypothetical protein [Arabidopsis thaliana]
  misc_feature (161)..(570): Homolog of NCBI NO: 18416291 NR Description: hypothetical protein [Arabidopsis thaliana]
  misc_feature (1)..(76): Homolog of NCBI NO: 15234898 NR Description: kinesin like protein [Arabidopsis thaliana]
  misc_feature (140)..(568): Homolog of NCBI NO: 15208447 NR Description: kinesin heavy chain [Zea mays]
  misc_feature (1)..(71): Homolog of NCBI NO: 15208447 NR Description: kinesin heavy chain [Zea mays]
  misc_feature (1)..(71): Homolog of NCBI NO: 30693419 NR Description: expressed protein [Arabidopsis thaliana]
  misc_feature (352)..(572): Homolog of NCBI NO: 30693419 NR Description: expressed protein [Arabidopsis thaliana]
  misc_feature (1)..(200): Homolog of NCBI NO: 30698217 NR Description: kinesin heavy chain DNA binding protein-related
  misc_feature (370)..(572): Homolog of NCBI NO: 30698217 NR Description: kinesin heavy chain DNA binding protein-related
  misc_feature (1)..(182): Homolog of NCBI NO: 18416291 NR Description: hypothetical protein [Arabidopsis thaliana]
  misc_feature (161)..(570): Homolog of NCBI NO: 18416291 NR Description: hypothetical protein [Arabidopsis thaliana]
  misc_feature (1)..(76): Homolog of NCBI NO: 15234898 NR Description: kinesin like protein [Arabidopsis thaliana]
  misc_feature (283)..(572): Homolog of NCBI NO: 15234898 NR Description: kinesin like protein [Arabidopsis thaliana]
MSDKALVKQLQKELARLESELRCPASYSGLEALVREKDNQIRKMDKEIKELKLHRDLAQSRLQDLLKVVGDNHGSKHPLASSARNFTFDVPQPCEDEQSTTSEAFSSGQILGFKAPDTQRDYRSQQSENDVQFATPLSYSISSPPFSGMPPTNGRNDNSHISDEDSEDLCKEVRCIETNETEENECLESSAVGSNSLQDSNLASSMHGNDNTNRSVNSGRNDASSITLEQHLENVKKPFANPGMDLGSSTRNSSSSKVIGRSRSCRSLMGSTLLEDLEKEVCTPPSRSFMDYPGRPETCQRRVPALNYDAESEALSRAGSMLSEITTTRGGLKENSSAAGDTEFVAGIGEFVAELKEMAQGHNGELAEGTIRSVGLDPIMDILQSPSRWPLEFEKKQQEIIDLWHGCNVSLVHRTYFFLLFKGDPADAIYMEVELRRLSFLKNTYSNGSMGYDMVAGSLSTSLVSSAKKLQREREMLCRQMQKRLTIQERESLYTKWGVSLSSKRRRLQVARRLWTETRDLEHVRESASLVARLIGLLEPGKALREMFGLSFAPQQSTRRSHSSWRYGRSSLD

SEQ ID NO: 10743 - DNA, 1006 bp, Zea mays subsp. mays
  misc_feature (1)..(1006): Ceres Seq. ID no. 12368995
  misc_feature: MA Experiment ID: 20000477 Result: Down-regulated in Transcription
  misc_feature: MA Experiment 20000477 PARAMETER Experiment Name: Zm_5mM_SA_P Parameter: Age (day) Value: 10
  misc_feature: MA Experiment 20000477 PARAMETER Experiment Name: Zm_5mM_SA_P Parameter: Organism Value: Zea mays
  misc_feature: MA Experiment 20000477 PARAMETER Experiment Name: Zm_5mM_SA_P Parameter: Plant Line Value: 35A19
  misc_feature: MA Experiment 20000477 PARAMETER Experiment Name: Zm_5mM_SA_P Parameter: Timepoint (hr) Value: 48
  misc_feature: MA Experiment 20000477 PARAMETER Experiment Name: Zm_5mM_SA_P Parameter: Tissue Value: Aerial
  misc_feature: MA Experiment 20000477 PARAMETER Experiment Name: Zm_5mM_SA_P Parameter: Treatment Value: 5mM SA vs. No Treatment
  misc_feature: MA Experiment ID: 20000479 Result: Down-regulated in Transcription
  misc_feature: MA Experiment 20000479 PARAMETER Experiment Name: Zm_Drought_P Parameter: Age (day) Value: 10
  misc_feature: MA Experiment 20000479 PARAMETER Experiment Name: Zm_Drought_P Parameter: Organism Value: Zea mays
  misc_feature: MA Experiment 20000479 PARAMETER Experiment Name: Zm_Drought_P Parameter: Plant Line Value: 35A19
  misc_feature: MA Experiment 20000479 PARAMETER Experiment Name: Zm_Drought_P Parameter: Timepoint (hr) Value: 48
  misc_feature: MA Experiment 20000479 PARAMETER Experiment Name: Zm_Drought_P Parameter: Tissue Value: Aerial
  misc_feature: MA Experiment 20000479 PARAMETER Experiment Name: Zm_Drought_P Parameter: Treatment Value: Drought vs. No Drought
  misc_feature: MA Experiment ID: 20000535 Result: Up-regulated in Transcription
  misc_feature: MA Experiment 20000535 PARAMETER Experiment Name: Zm_Hybrid_Seed_Dev_P Parameter: DAP Value: 30 vs. 12
  misc_feature: MA Experiment 20000535 PARAMETER Experiment Name: Zm_Hybrid_Seed_Dev_P Parameter: Organism Value: Zea mays
  misc_feature: MA Experiment 20000535 PARAMETER Experiment Name: Zm_Hybrid_Seed_Dev_P Parameter: Plant Line Value: 35A19
  misc_feature: MA Experiment 20000535 PARAMETER Experiment Name: Zm_Hybrid_Seed_Dev_P Parameter: Tissue Value: Embryo vs. Unfert Floret
  misc_feature: MA Experiment ID: 20000632 Result: Down-regulated in Transcription
  misc_feature: MA Experiment 20000632 PARAMETER Experiment Name: Zm_Herbicide-Treatments_P Parameter: Timepoint (hr) Value: 4
  misc_feature: MA Experiment 20000632 PARAMETER Experiment Name: Zm_Herbicide-Treatments_P Parameter: Tissue Value: Aerial
  misc_feature: MA Experiment 20000632 PARAMETER Experiment Name: Zm_Herbicide-Treatments_P Parameter: Treatment Value: Glean vs. No Treatment
aaaaaactgagtaaaaaaacacaagaacataaccgcagcaataacaatatacacaaagacgggagagagaagagagatggcggaagcgacgccgtacgaggagcagcggcggaggcaggtggaggcgaacaaacggaagctggaggagctgcagctccaccacctctctgctgccatcagagaggccgccgccgccgccaagccctcgctggtcaagaagcggaaggcgcgggtgcctctcgacgtcgccgacgccgtgatggagccagtacggcggtccggccggctcgccaacctcccggataagcccgtgtaccgcgagaaggttcccgattttgggatgaagattaggaggacgtacggatcggtgagaagagatctgaccaaccgggtgtacgcgaccgacgatgcgaggagctacgccatctctaaggcggaggatctggagcaagagctggactccagcttccccatcttcatcaagcccatgacccagtcccatgtcaccgggggcttctggctgggccttccgattcatttctgccggaagtatctgcccaagcgtgacgagatgatcaccctggtggatgaggatgatgacgagtccgacacgctgtacctcgcaatgaagcgggggctcagtgctggatggagagggtttgccgtccagcagaagctggtggatggagattgcctggtcttccagctgattgagcaaacaaagttcaaggtctacataactagagcaagttcctactacgaaagcgaggactgatgaaactagtagcttgtaatctggtgattggagctcagttatggaggtggctgcgttggacaagcttgcatctgggaatcgctggggtgtcttgaaactttttggtggcagaaagttagctgatgtatgaaacccagtatctcctaccaattgttgctgatttgtgtacttcttgggcttaccacttgcacggttcagaaacctgcactatgtaagggggttgttggtggc

SEQ ID NO: 10744 - protein, 232 aa, Zea mays subsp. mays
  peptide (1)..(232): Ceres Seq. ID no. 12368996
  misc_feature (134)..(225): Pfam Name: B3 DNA binding domain Pfam Description: B3 DNA binding domain
  misc_feature (5)..(225): Homolog of NCBI NO: 15217278 NR Description: Unknown protein [Oryza sativa]
  misc_feature (7)..(225): Homolog of NCBI NO: 9294620 NR Description: gene_id:MVI11.9~unknown protein [Arabidopsis
  misc_feature (15)..(230): Homolog of NCBI NO: 30694114 NR Description: expressed protein [Arabidopsis thaliana]
  misc_feature (4)..(225): Homolog of NCBI NO: 15237157 NR Description: unknown protein; protein id: At5g58280.1 thaliana] >gi|10176791|dbj|BAA96919.2| gene_id:MCK7.15~unknown
  misc_feature (116)..(212): Homolog of NCBI NO: 34904376 NR Description: unnamed protein product [Oryza sativa (japonica group)] >gi|8467994|dbj|BAA96595.1| unnamed protein product
  misc_feature (15)..(149): Homolog of NCBI NO: 10177273 NR Description: gene_id:MJB21.7~unknown protein [Arabidopsis
MAEATPYEEQRRRQVEANKRKLEELQLHHLSAAIREAAAAAKPSLVKKRKARVPLDVADAVMEPVRRSGRLANLPDKPVYREKVPDFGMKIRRTYGSVRRDLTNRVYATDDARSYAISKAEDLEQELDSSFPIFIKPMTQSHVTGGFWLGLPIHFCRKYLPKRDEMITLVDEDDDESDTLYLAMKRGLSAGWRGFAVQQKLVDGDCLVFQLIEQTKFKVYITRASSYYESED

SEQ ID NO: 10745 - protein, 171 aa, Zea mays subsp. mays
  peptide (1)..(171): Ceres Seq. ID no. 12368997
  misc_feature (73)..(164): Pfam Name: B3 DNA binding domain Pfam Description: B3 DNA binding domain
  misc_feature (1)..(164): Homolog of NCBI NO: 15217278 NR Description: Unknown protein [Oryza sativa]
  misc_feature (1)..(164): Homolog of NCBI NO: 9294620 NR Description: gene_id:MVI11.9~unknown protein [Arabidopsis
  misc_feature (1)..(169): Homolog of NCBI NO: 30694114 NR Description: expressed protein [Arabidopsis thaliana]
  misc_feature (1)..(164): Homolog of NCBI NO: 15237157 NR Description: unknown protein; protein id: At5g58280.1 thaliana] >gi|10176791|dbj|BAA96919.2| gene_id:MCK7.15~unknown
  misc_feature (55)..(151): Homolog of NCBI NO: 34904376 NR Description: unnamed protein product [Oryza sativa (japonica group)] >gi|8467994|dbj|BAA96595.1| unnamed protein product
  misc_feature (1)..(88): Homolog of NCBI NO: 10177273 NR Description: gene_id:MJB21.7~unknown protein [Arabidopsis
MEPVRRSGRLANLPDKPVYREKVPDFGMKIRRTYGSVRRDLTNRVYATDDARSYAISKAEDLEQELDSSFPIFIKPMTQSHVTGGFWLGLPIHFCRKYLPKRDEMITLVDEDDDESDTLYLAMKRGLSAGWRGFAVQQKLVDGDCLVFQLIEQTKFKVYITRASSYYESED

SEQ ID NO: 10746 - protein, 144 aa, Zea mays subsp. mays
  peptide (1)..(144): Ceres Seq. ID no. 12368998
  misc_feature (46)..(137): Pfam Name: B3 DNA binding domain Pfam Description: B3 DNA binding domain
  misc_feature (1)..(137): Homolog of NCBI NO: 15217278 NR Description: Unknown protein [Oryza sativa]
  misc_feature (1)..(137): Homolog of NCBI NO: 9294620 NR Description: gene_id:MVI11.9~unknown protein [Arabidopsis
  misc_feature (1)..(142): Homolog of NCBI NO: 30694114 NR Description: expressed protein [Arabidopsis thaliana]
  misc_feature (1)..(137): Homolog of NCBI NO: 15237157 NR Description: unknown protein; protein id: At5g58280.1 thaliana] >gi|10176791|dbj|BAA96919.2| gene_id:MCK7.15~unknown
  misc_feature (28)..(124): Homolog of NCBI NO: 34904376 NR Description: unnamed protein product [Oryza sativa (japonica group)] >gi|8467994|dbj|BAA96595.1| unnamed protein product
  misc_feature (1)..(61): Homolog of NCBI NO: 10177273 NR Description: gene_id:MJB21.7~unknown protein [Arabidopsis
MKIRRTYGSVRRDLTNRVYATDDARSYAISKAEDLEQELDSSFPIFIKPMTQSHVTGGFWLGLPIHFCRKYLPKRDEMITLVDEDDDESDTLYLAMKRGLSAGWRGFAVQQKLVDGDCLVFQLIEQTKFKVYITRASSYYESED

SEQ ID NO: 10747 - DNA, 754 bp, Zea mays subsp. mays
  misc_feature (1)..(754): Ceres Seq. ID no. 12413763
  misc_feature: MA Experiment ID: 108528 Result: Down-regulated in Transcription
  misc_feature: MA Experiment 108528 PARAMETER Experiment Name: Zm_Imbibed_Seeds_P Parameter: Age (day) Value: 5 vs. 2
  misc_feature: MA Experiment 108528 PARAMETER Experiment Name: Zm_Imbibed_Seeds_P Parameter: Organism Value: Zea mays
  misc_feature: MA Experiment 108528 PARAMETER Experiment Name: Zm_Imbibed_Seeds_P Parameter: Plant Line Value: 35A19
  misc_feature: MA Experiment 108528 PARAMETER Experiment Name: Zm_Imbibed_Seeds_P Parameter: Tissue Value: Aerial vs. Embryo
  misc_feature: MA Experiment ID: 108536 Result: Down-regulated in Transcription
  misc_feature: MA Experiment 108536 PARAMETER Experiment Name: Zm_Meristem_P Parameter: Age (day) Value: 8
  misc_feature: MA Experiment 108536 PARAMETER Experiment Name: Zm_Meristem_P Parameter: Organism Value: Zea mays
  misc_feature: MA Experiment 108536 PARAMETER Experiment Name: Zm_Meristem_P Parameter: Plant Line Value: 35A19
  misc_feature: MA Experiment 108536 PARAMETER Experiment Name: Zm_Meristem_P Parameter: Tissue Value: Shoot Meristem vs. Above Shoot Meristem
  misc_feature: MA Experiment ID: 108543 Result: Up-regulated in Transcription
  misc_feature: MA Experiment ID: 108544 Result: Up-regulated in Transcription
  misc_feature: MA Experiment ID: 108545 Result: Down-regulated in Transcription
  misc_feature: MA Experiment 108545 PARAMETER Experiment Name: Zm_Imbibed_Seeds_P Parameter: Age (day) Value: 3 vs. 2
  misc_feature: MA Experiment 108545 PARAMETER Experiment Name: Zm_Imbibed_Seeds_P Parameter: Organism Value: Zea mays
  misc_feature: MA Experiment 108545 PARAMETER Experiment Name: Zm_Imbibed_Seeds_P Parameter: Plant Line Value: 35A19
  misc_feature: MA Experiment 108545 PARAMETER Experiment Name: Zm_Imbibed_Seeds_P Parameter: Tissue Value: Aerial vs. Embryo
  misc_feature: MA Experiment ID: 108547 Result: Down-regulated in Transcription
  misc_feature: MA Experiment 108547 PARAMETER Experiment Name: Zm_Imbibed_Seeds_P Parameter: Age (day) Value: 4 vs. 2
  misc_feature: MA Experiment 108547 PARAMETER Experiment Name: Zm_Imbibed_Seeds_P Parameter: Organism Value: Zea mays
  misc_feature: MA Experiment 108547 PARAMETER Experiment Name: Zm_Imbibed_Seeds_P Parameter: Plant Line Value: 35A19
  misc_feature: MA Experiment 108547 PARAMETER Experiment Name: Zm_Imbibed_Seeds_P Parameter: Tissue Value: Aerial vs. Embryo
  misc_feature: MA Experiment ID: 108687 Result: Down-regulated in Transcription
  misc_feature: MA Experiment 108687 PARAMETER Experiment Name: Zm_Embryos-Flowers__P Parameter: Tissue Value: Embryo vs. Aerial+
  misc_feature: MA Experiment ID: 20000492 Result: Down-regulated in Transcription
  misc_feature: MA Experiment 20000492 PARAMETER Experiment Name: Zm_Hybrid_Seed_Dev_P Parameter: DAP Value: 12
  misc_feature: MA Experiment 20000492 PARAMETER Experiment Name: Zm_Hybrid_Seed_Dev_P Parameter: Organism Value: Zea mays
  misc_feature: MA Experiment 20000492 PARAMETER Experiment Name: Zm_Hybrid_Seed_Dev_P Parameter: Plant Line Value: 35A19
  misc_feature: MA Experiment 20000492 PARAMETER Experiment Name: Zm_Hybrid_Seed_Dev_P Parameter: Tissue Value: Fert Kernel vs. Unfert Floret
  misc_feature: MA Experiment ID: 20000535 Result: Down-regulated in Transcription
  misc_feature: MA Experiment 20000535 PARAMETER Experiment Name: Zm_Hybrid_Seed_Dev_P Parameter: DAP Value: 30 vs. 12
  misc_feature: MA Experiment 20000535 PARAMETER Experiment Name: Zm_Hybrid_Seed_Dev_P Parameter: Organism Value: Zea mays
  misc_feature: MA Experiment 20000535 PARAMETER Experiment Name: Zm_Hybrid_Seed_Dev_P Parameter: Plant Line Value: 35A19
  misc_feature: MA Experiment 20000535 PARAMETER Experiment Name: Zm_Hybrid_Seed_Dev_P Parameter: Tissue Value: Embryo vs. Unfert Floret
aaaaaaccaaaagcagaggggaaagtgccgtcagctctgactctcgggcacttggctgacgacccgttctctctttgcaactgcaactgcaacgcaccaagaaactgccggcgatcgatcggggcaaggagataaacatggtgcacgggaagctggaggtcctcctcgtctccgccaagggactcgaggacaccgatttcctcaataacatggaccccttcgtgatccttacctgccgcacccaagagcagaaaagcagcgtcgcaaatggagcaggaagcgagcccgaatggaacgagaccttcgtcttcaccgtctccgacgacaccccgcagctgcacctcaagatcatggacagcgacctcaccaacgacgatttcgtcggcgaacgaaccatccccctggaggccgtgtttcaggaaggcagccttcccccggcggttcacccggtcgtcaaggaggagaagtactgcggagaggtcaagctcgcgctcaccttcactccagcagcggaaactcgccgccctgatgacaacgaggaggggccgccttacagcagctggagttgatctatctgccatgggatgcatgcatcatatatatccaccaagagaagagaggataattaattaatctactcaagagaagaatcagtgttgctgttatgcgaccctctatctatctatatatatgtgcttaatttgtcatgaacgactgccaatataaaataaactattcagagttgtttgcacgt

SEQ ID NO: 10748 - protein, 143 aa, Zea mays subsp. mays
  peptide (1)..(143): Ceres Seq. ID no. 12413764
  misc_feature (6)..(86): Pfam Name: C2 domain Pfam Description: C2 domain
  misc_feature (1)..(143): Homolog of NCBI NO: 7489756 NR Description: hypothetical protein - maize
  misc_feature (1)..(128): Homolog of NCBI NO: 5565983 NR Description: unknown [Zea mays]
  misc_feature (1)..(143): Homolog of NCBI NO: 38345558 NR Description: OSJNBa0032F06.15 [Oryza sativa (japonica
  misc_feature (1)..(142): Homolog of NCBI NO: 21553977 NR Description: putative elicitor-responsive gene [Arabidopsis
  misc_feature (1)..(142): Homolog of NCBI NO: 15221718 NR Description: putative elicitor-responsive gene; protein id: supported by cDNA: 18965., supported by cDNA: gi_15451085,
  misc_feature (1)..(135): Homolog of NCBI NO: 11358958 NR Description: elicitor-responsive gene 3 [imported] - rice
  misc_feature (1)..(134): Homolog of NCBI NO: 3860331 NR Description: hypothetical protein [Cicer arietinum]
  misc_feature (4)..(128): Homolog of NCBI NO: 7489474 NR Description: FIERG2 protein - rice >gi|2920839|gb|AAC04628.1|
  misc_feature (4)..(128): Homolog of NCBI NO: 21998841 NR Description: RPP17-1 [Oryza sativa (japonica cultivar-group)]
  misc_feature (4)..(128): Homolog of NCBI NO: 7489473 NR Description: FIERG1 protein - rice >gi|2920837|gb|AAC04627.1|
MVHGKLEVLLVSAKGLEDTDFLNNMDPFVILTCRTQEQKSSVANGAGSEPEWNETFVFTVSDDTPQLHLKIMDSDLTNDDFVGERTIPLEAVFQEGSLPPAVHPVVKEEKYCGEVKLALTFTPAAETRRPDDNEEGPPYSSWS

SEQ ID NO: 10749 - protein, 121 aa, Zea mays subsp. mays
  peptide (1)..(121): Ceres Seq. ID no. 12413765
MEQEASPNGTRPSSSPSPTTPRSCTSRSWTATSPTTISSANEPSPWRPCFRKAAFPRRFTRSSRRRSTAERSSSRSPSLQQRKLAALMTTRRGRLTAAGVDLSAMGCMHHIYPPREERIIN

SEQ ID NO: 10750 - protein, 119 aa, Zea mays subsp. mays
  peptide (1)..(119): Ceres Seq. ID no. 12413766
  misc_feature (1)..(62): Pfam Name: C2 domain Pfam Description: C2 domain
  misc_feature (1)..(119): Homolog of NCBI NO: 7489756 NR Description: hypothetical protein - maize
  misc_feature (1)..(104): Homolog of NCBI NO: 5565983 NR Description: unknown [Zea mays]
  misc_feature (1)..(119): Homolog of NCBI NO: 38345558 NR Description: OSJNBa0032F06.15 [Oryza sativa (japonica
  misc_feature (1)..(118): Homolog of NCBI NO: 21553977 NR Description: putative elicitor-responsive gene [Arabidopsis
  misc_feature (1)..(118): Homolog of NCBI NO: 15221718 NR Description: putative elicitor-responsive gene; protein id: supported by cDNA: 18965., supported by cDNA: gi_15451085,
  misc_feature (1)..(111): Homolog of NCBI NO: 11358958 NR Description: elicitor-responsive gene 3 [imported] - rice
  misc_feature (1)..(110): Homolog of NCBI NO: 3860331 NR Description: hypothetical protein [Cicer arietinum]
  misc_feature (1)..(104): Homolog of NCBI NO: 7489474 NR Description: FIERG2 protein - rice >gi|2920839|gb|AAC04628.1|
  misc_feature (1)..(104): Homolog of NCBI NO: 21998841 NR Description: RPP17-1 [Oryza sativa (japonica cultivar-group)]
  misc_feature (1)..(104): Homolog of NCBI NO: 7489473 NR Description: FIERG1 protein - rice >gi|2920837|gb|AAC04627.1|
MDPFVILTCRTQEQKSSVANGAGSEPEWNETFVFTVSDDTPQLHLKIMDSDLTNDDFVGERTIPLEAVFQEGSLPPAVHPVVKEEKYCGEVKLALTFTPAAETRRPDDNEEGPPYSSWS

SEQ ID NO: 10751 - DNA, 1357 bp, Zea mays subsp. mays
  misc_feature (1)..(1357): Ceres Seq. ID no. 12413779
  misc_feature: MA Experiment ID: 20000633 Result: Down-regulated in Transcription
  misc_feature: MA Experiment 20000633 PARAMETER Experiment Name: Zm_Herbicide-Treatments_P Parameter: Timepoint (hr) Value: 4
  misc_feature: MA Experiment 20000633 PARAMETER Experiment Name: Zm_Herbicide-Treatments_P Parameter: Tissue Value: Aerial
  misc_feature: MA Experiment 20000633 PARAMETER Experiment Name: Zm_Herbicide-Treatments_P Parameter: Treatment Value: Trimec vs. No Treatment
agatcagatccgacaactcgccctcccgtctttccctctctctcctcccaccacacccggtcgtcgttgtcgcggcgtgagcgagcgagaggggaaaacccaaaaccctagcaccccccgccccgtcgccgacggccgccggagtagagagatggcggtggacgaggtgaactcggtctacgtcggcggccttccctacgaggccaacgaggagatgcttcgcgacgccttcgggtactacggcaccatcgtctccgtcaaggtgattaatgatcatgctgtcaaaggcaagtgttatggttttgttactttcactcaccccagagctactgagcaagcaattgcgggcatggacggcaagaaattaggcaaccgtattgttcgagtaaatgaagtgcgtacaagaggcccccgcgattttggccgagatggtttcagacgagatccaagaaggtatggtagagatccatactgggacagaagggacagggaacggagctatgatcgtgaaagagatccctaccatgacagggatagtgatagatcccgtgagcatgatagagaaagagattatgaacatggtggatttaatagagaaattgactatcccatggaccgagatcgtgaaggagatgagagacgtcctagagaacatgatcgtacagcagaaatgcataatgtggattcagataatgacaaagataaggaacatgtatcaagaaaaaggttcagccgcccaaaaggtcgtgatagcagagatttatcaagttccagtgatggtcttcaaaatgatggaaaacatcagttggataaaactattcagatgcgcgaggaccttgaaaatgagattaaccagattaaggataaaatatctgggaaagaacagcacattgcagatttgcagaagaaagctcagaaactagaggatgaactggttgccgcacggaaagtctcttcagaacgacagttggcggttacagacctgtacaaacatttcctccaacttcaggactacaatgatagggtcaaaacagctgaacagaggctgcagtctcttgttgatgctgccttggtcgagctcgacatggccgaagatgctactaccagagatggctcgatgtacgagaacggcgtgctttgaacacccaactgccatgggtttgtgtggttgctgatttgttagatttgtagtttgcgtctgccatgtaatagaaccgcactgtaactagaaacaggaaaaatgttttgtgtaagggtcggagaatctgctgtcgtggtccttgagcccggatttctctttcgtagttggattcattaaccggcctgagtattcctgttaccgtatgttttgagcgtg

SEQ ID NO: 10752 - protein, 379 aa, Zea mays subsp. mays
  peptide (1)..(379): Ceres Seq. ID no. 12413780
  misc_feature (59)..(129): Pfam Name: RNA recognition motif. (a.k.a. RRM, RBD, or RNP domain) Pfam Description: RNA recognition motif. (a.k.a. RRM, RBD, or RNP
  misc_feature (51)..(359): Homolog of NCBI NO: 21553602 NR Description: glycine-rich RNA-binding protein-like
  misc_feature (51)..(359): Homolog of NCBI NO: 18420085 NR Description: glycine-rich RNA-binding protein - like; protein At5g19960.1, supported by cDNA: 152904., supported by cDNA:
  misc_feature (54)..(198): Homolog of NCBI NO: 28856196 NR Description: Similar to cold inducible RNA binding protein
  misc_feature (53)..(257): Homolog of NCBI NO: 28279759 NR Description: Similar to splicing factor, arginine/serine-rich
  misc_feature (44)..(291): Homolog of NCBI NO: 23483169 NR Description: u1 small nuclear ribonucleoprotein 70 kDa
  misc_feature (150)..(310): Homolog of NCBI NO: 23482058 NR Description: hypothetical protein [Plasmodium yoelii yoelii]
  misc_feature (130)..(371): Homolog of NCBI NO: 23508822 NR Description: eukaryotic translation initiation factor 3 eukaryotic translation initiation factor 3 subunit 10, putative
  misc_feature (59)..(221): Homolog of NCBI NO: 25144919 NR Description: pre-mRNA splicing SR Protein RSP-6 (20.5 kD)
  misc_feature (45)..(153): Homolog of NCBI NO: 20257707 NR Description: glycine-rich RNA binding protein [Zea mays]
  misc_feature (60)..(167): Homolog of NCBI NO: 6911146 NR Description: putative glycine-rich RNA-binding protein 2
DQIRQLALPSFPLSPPTTPGRRCRGVSEREGKTQNPSTPRPVADGRRSREMAVDEVNSVYVGGLPYEANEEMLRDAFGYYGTIVSVKVINDHAVKGKCYGFVTFTHPRATEQAIAGMDGKKLGNRIVRVNEVRTRGPRDFGRDGFRRDPRRYGRDPYWDRRDRERSYDRERDPYHDRDSDRSREHDRERDYEHGGFNREIDYPMDRDREGDERRPREHDRTAEMHNVDSDNDKDKEHVSRKRFSRPKGRDSRDLSSSSDGLQNDGKHQLDKTIQMREDLENEINQIKDKISGKEQHIADLQKKAQKLEDELVAARKVSSERQLAVTDLYKHFLQLQDYNDRVKTAEQRLQSLVDAALVELDMAEDATTRDGSMYENGVL

SEQ ID NO: 10753 - protein, 329 aa, Zea mays subsp. mays
  peptide (1)..(329): Ceres Seq. ID no. 12413781
  misc_feature (9)..(79): Pfam Name: RNA recognition motif. (a.k.a. RRM, RBD, or RNP domain) Pfam Description: RNA recognition motif. (a.k.a. RRM, RBD, or RNP
  misc_feature (1)..(309): Homolog of NCBI NO: 18420085 NR Description: glycine-rich RNA-binding protein - like; protein At5g19960.1, supported by cDNA: 152904., supported by cDNA:
  misc_feature (4)..(148): Homolog of NCBI NO: 28856196 NR Description: Similar to cold inducible RNA binding protein
  misc_feature (3)..(207): Homolog of NCBI NO: 28279759 NR Description: Similar to splicing factor, arginine/serine-rich
  misc_feature (1)..(241): Homolog of NCBI NO: 23483169 NR Description: u1 small nuclear ribonucleoprotein 70 kDa
  misc_feature (100)..(260): Homolog of NCBI NO: 23482058 NR Description: hypothetical protein [Plasmodium yoelii yoelii]
  misc_feature (1)..(309): Homolog of NCBI NO: 21553602 NR Description: glycine-rich RNA-binding protein-like
  misc_feature (80)..(321): Homolog of NCBI NO: 23508822 NR Description: eukaryotic translation initiation factor 3 eukaryotic translation initiation factor 3 subunit 10, putative
  misc_feature (9)..(171): Homolog of NCBI NO: 25144919 NR Description: pre-mRNA splicing SR Protein RSP-6 (20.5 kD)
  misc_feature (1)..(103): Homolog of NCBI NO: 20257707 NR Description: glycine-rich RNA binding protein [Zea mays]
  misc_feature (10)..(117): Homolog of NCBI NO: 6911146 NR Description: putative glycine-rich RNA-binding protein 2
MAVDEVNSVYVGGLPYEANEEMLRDAFGYYGTIVSVKVINDHAVKGKCYGFVTFTHPRATEQAIAGMDGKKLGNRIVRVNEVRTRGPRDFGRDGFRRDPRRYGRDPYWDRRDRERSYDRERDPYHDRDSDRSREHDRERDYEHGGFNREIDYPMDRDREGDERRPREHDRTAEMHNVDSDNDKDKEHVSRKRFSRPKGRDSRDLSSSSDGLQNDGKHQLDKTIQMREDLENEINQIKDKISGKEQHIADLQKKAQKLEDELVAARKVSSERQLAVTDLYKHFLQLQDYNDRVKTAEQRLQSLVDAALVELDMAEDATTRDGSMYENGVL

SEQ ID NO: 10754 - protein, 308 aa, Zea mays subsp. mays
  peptide (1)..(308): Ceres Seq. ID no. 12413782
  misc_feature (1)..(58): Pfam Name: RNA recognition motif. (a.k.a. RRM, RBD, or RNP domain) Pfam Description: RNA recognition motif. (a.k.a. RRM, RBD, or RNP
  misc_feature (1)..(288): Homolog of NCBI NO: 21553602 NR Description: glycine-rich RNA-binding protein-like
  misc_feature (1)..(288): Homolog of NCBI NO: 18420085 NR Description: glycine-rich RNA-binding protein - like; protein At5g19960.1, supported by cDNA: 152904., supported by cDNA:
  misc_feature (1)..(127): Homolog of NCBI NO: 28856196 NR Description: Similar to cold inducible RNA binding protein
  misc_feature (1)..(186): Homolog of NCBI NO: 28279759 NR Description: Similar to splicing factor, arginine/serine-rich
  misc_feature (1)..(220): Homolog of NCBI NO: 23483169 NR Description: u1 small nuclear ribonucleoprotein 70 kDa
  misc_feature (79)..(239): Homolog of NCBI NO: 23482058 NR Description: hypothetical protein [Plasmodium yoelii yoelii]
  misc_feature (59)..(300): Homolog of NCBI NO: 23508822 NR Description: eukaryotic translation initiation factor 3 eukaryotic translation initiation factor 3 subunit 10, putative
  misc_feature (1)..(150): Homolog of NCBI NO: 25144919 NR Description: pre-mRNA splicing SR Protein RSP-6 (20.5 kD)
  misc_feature (1)..(82): Homolog of NCBI NO: 20257707 NR Description: glycine-rich RNA binding protein [Zea mays]
  misc_feature (1)..(96): Homolog of NCBI NO: 6911146 NR Description: putative glycine-rich RNA-binding protein 2
MLRDAFGYYGTIVSVKVINDHAVKGKCYGFVTFTHPRATEQAIAGMDGKKLGNRIVRVNEVRTRGPRDFGRDGFRRDPRRYGRDPYWDRRDRERSYDRERDPYHDRDSDRSREHDRERDYEHGGFNREIDYPMDRDREGDERRPREHDRTAEMHNVDSDNDKDKEHVSRKRFSRPKGRDSRDLSSSSDGLQNDGKHQLDKTIQMREDLENEINQIKDKISGKEQHIADLQKKAQKLEDELVAARKVSSERQLAVTDLYKHFLQLQDYNDRVKTAEQRLQSLVDAALVELDMAEDATTRDGSMYENGVL

SEQ ID NO: 10755 - DNA, 1747 bp, Zea mays subsp. mays
  misc_feature (1)..(1747): Ceres Seq. ID no. 12566487
  misc_feature: MA Experiment ID: 108535 Result: Up-regulated in Transcription
  misc_feature: MA Experiment 108535 PARAMETER Experiment Name: Zm_Meristem_P Parameter: Age (day) Value: 8
  misc_feature: MA Experiment 108535 PARAMETER Experiment Name: Zm_Meristem_P Parameter: Organism Value: Zea mays
  misc_feature: MA Experiment 108535 PARAMETER Experiment Name: Zm_Meristem_P Parameter: Plant Line Value: 35A19
  misc_feature: MA Experiment 108535 PARAMETER Experiment Name: Zm_Meristem_P Parameter: Tissue Value: Root Meristem vs. Above Root Meristem
  misc_feature: MA Experiment ID: 108556 Result: Down-regulated in Transcription
  misc_feature: MA Experiment 108556 PARAMETER Experiment Name: Zm_Drought_P Parameter: Age (day) Value: 9
  misc_feature: MA Experiment 108556 PARAMETER Experiment Name: Zm_Drought_P Parameter: Organism Value: Zea mays
  misc_feature: MA Experiment 108556 PARAMETER Experiment Name: Zm_Drought_P Parameter: Plant Line Value: 35A19
  misc_feature: MA Experiment 108556 PARAMETER Experiment Name: Zm_Drought_P Parameter: Timepoint (hr) Value: 24
  misc_feature: MA Experiment 108556 PARAMETER Experiment Name: Zm_Drought_P Parameter: Tissue Value: Aerial
  misc_feature: MA Experiment 108556 PARAMETER Experiment Name: Zm_Drought_P Parameter: Treatment Value: Drought vs. No Drought
  misc_feature: MA Experiment ID: 20000108 Result: Up-regulated in Transcription
  misc_feature: MA Experiment 20000108 PARAMETER Experiment Name: Zm_Root-Tips_P Parameter: Age (day) Value: 12
  misc_feature: MA Experiment 20000108 PARAMETER Experiment Name: Zm_Root-Tips_P Parameter: Organism Value: Zea mays
  misc_feature: MA Experiment 20000108 PARAMETER Experiment Name: Zm_Root-Tips_P Parameter: Tissue Value: Root tips vs. Root mid region    35
  misc_feature: MA Experiment 20000108 PARAMETER Experiment Name: Zm_Root-Tips_P Parameter: Tissue Value: Root tips vs. Root mid region   Sequence Listing-Misc Features (4)
gcacgagaccattacctagaacatcctaatcgaaaactactgtagccgctgctgctcctctcctcccatctcaccacacaccgcagccccagcaagatcgcgcggaggccatggcgaagcccaagccttcctccgccggcgccaagccgaccgcggctgcgccaccggttacagtgcactcggcgctggtcacctacacctccatgctcgcgctcctctccctctgcccgcccttcgtcatcctcctgtggtacacgatggtgcacgcggacggatcggtggtgcggacttacgagcacctcagggatcacggcgtgctcgaggggctcaaggccatctggcccatgcccaccctcgtcgcgtggaagatcatcttcggcttcgggctcttcgaggccgtcctacagctgctgctccctgggaagcgcttcgaagggcccatctcgcctgccgggaacgtgccggtctacaaggcaaatggcttacaagcatatgcagtgaccttgataacttaccttggtttgtggtggttcggtatatttaaccctgcaatagtgtatgatcacttgggggagatatactctgctcttgtttttggaagctttgtgttctgtatttttctctacataaagggccatgtatttccatcttcatctgactctggatcctctgggaatgtgataattgacttctactggggtatggagctgtaccctcggattggcaagtactttgatatcaaagtattcaccaactgtcgtttcggtatgatgtcctgggctgttcttgccgtaacctattgcataaagcagtatgaaatgaatggcagagttgctgattctatgcttgtgaatactgcacttatgttgatctatatcactaagttcttttggtgggaatctggatattggtgtactatggacattgctcatgatagagctggtttctatatctgctggggatgcttggtatgggttccatccatatatacttcccctggaatgtaccttgtaaaccaccctttgaatttgggcccccagctagcactctcaattcttctagctggaatgttgtgcatatacataaactatgattgtgaccgtcagcgccaagaatttcgacggacgaatgggaaatgctcggtctggggcaaggctccatctaagattgttgcctcttatcagactacaaagggagaaactaaaaccagtcttctcttgacttctggatggtggggcttgtcacgtcacttccactatgtcccagagatactatctgcatttttctggactgttccagctcttttcaatcacttcctaccatacttctacgtgatctttctgactatattattgtttgaccgagcaaagagggatgatgaccggtgctcatcaaagtacgggaagtactggaagatttactgcaacaaagtaccatacagagtcattcctggcatttactgagcatctcgagttctggacgactcttgatattaagctcaacagatgccacgatatccagtcttcataccgatttgctactgattgtgtaatgtcgctggtaggcttgggctgtacgcagtattaggtgtaggcaacttggcttttggcatttaccttgtatgtgtcgtgtatctagggctggggcttgctccttcagttgttagacagtagggggtaatctcaggggtgcaatgtactccctccgtcctaaaataaaagcatatctagtatttaaattttgtttc

SEQ ID NO: 10756 - protein, 450 aa, Zea mays subsp. mays
  peptide (1)..(450): Ceres Seq. ID no. 12566488
  misc_feature (21)..(450): Pfam Name: Ergosterol biosynthesis ERG4/ERG24 family Pfam Description: Ergosterol biosynthesis ERG4/ERG24 family
  misc_feature (16)..(450): Homolog of NCBI NO: 39726086 NR Description: sterol delta-7 reductase [Tropaeolum majus]
  misc_feature (21)..(450): Homolog of NCBI NO: 15222967 NR Description: sterol delta7 reductase; protein id: At1g50430.1, by cDNA: gi_1245181, supported by cDNA: gi_20466245 [Arabidopsis
  misc_feature (21)..(450): Homolog of NCBI NO: 1245182 NR Description: sterol delta-7 reductase
  misc_feature (19)..(447): Homolog of NCBI NO: 29654463 NR Description: ergosterol biosynthesis ERG4/ERG24 family protein burnetii RSA 493] >gi|29541730|gb|AAO90669.1| ergosterol
  misc_feature (31)..(450): Homolog of NCBI NO: 27924199 NR Description: Similar to 7-dehydrocholesterol reductase
  misc_feature (1)..(450): Homolog of NCBI NO: 38969866 NR Description: 7-dehydrocholesterol reductase [Silurana
  misc_feature (108)..(450): Homolog of NCBI NO: 6681179 NR Description: 7-dehydrocholesterol reductase [Mus musculus]
  misc_feature (108)..(450): Homolog of NCBI NO: 11693158 NR Description: 7-dehydrocholesterol reductase [Rattus norvegicus]
  misc_feature (108)..(450): Homolog of NCBI NO: 3171089 NR Description: 7-dehydrocholesterol reductase [Homo sapiens]
  misc_feature (108)..(450): Homolog of NCBI NO: 4503321 NR Description: 7-dehydrocholesterol reductase;
MAKPKPSSAGAKPTAAAPPVTVHSALVTYTSMLALLSLCPPFVILLWYTMVHADGSVVRTYEHLRDHGVLEGLKAIWPMPTLVAWKIIFGFGLFEAVLQLLLPGKRFEGPISPAGNVPVYKANGLQAYAVTLITYLGLWWFGIFNPAIVYDHLGEIYSALVFGSFVFCIFLYIKGHVFPSSSDSGSSGNVIIDFYWGMELYPRIGKYFDIKVFTNCRFGMMSWAVLAVTYCIKQYEMNGRVADSMLVNTALMLIYITKFFWWESGYWCTMDIAHDRAGFYICWGCLVWVPSIYTSPGMYLVNHPLNLGPQLALSILLAGMLCIYINYDCDRQRQEFRRTNGKCSVWGKAPSKIVASYQTTKGETKTSLLLTSGWWGLSRHFHYVPEILSAFFWTVPALFNHFLPYFYVIFLTILLFDRAKRDDDRCSSKYGKYWKIYCNKVPYRVIPGIY

SEQ ID NO: 10757 - protein, 419 aa, Zea mays subsp. mays
  peptide (1)..(419): Ceres Seq. ID no. 12566489
  misc_feature (1)..(419): Pfam Name: Ergosterol biosynthesis ERG4/ERG24 family Pfam Description: Ergosterol biosynthesis ERG4/ERG24 family
  misc_feature (1)..(419): Homolog of NCBI NO: 39726086 NR Description: sterol delta-7 reductase [Tropaeolum majus]
  misc_feature (1)..(419): Homolog of NCBI NO: 15222967 NR Description: sterol delta7 reductase; protein id: At1g50430.1, by cDNA: gi_1245181, supported by cDNA: gi_20466245 [Arabidopsis
  misc_feature (1)..(419): Homolog of NCBI NO: 1245182 NR Description: sterol delta-7 reductase
  misc_feature (1)..(416): Homolog of NCBI NO: 29654463 NR Description: ergosterol biosynthesis ERG4/ERG24 family protein burnetii RSA 493] >gi|29541730|gb|AAO90669.1| ergosterol
  misc_feature (1)..(419): Homolog of NCBI NO: 27924199 NR Description: Similar to 7-dehydrocholesterol reductase
  misc_feature (1)..(419): Homolog of NCBI NO: 38969866 NR Description: 7-dehydrocholesterol reductase [Silurana
  misc_feature (77)..(419): Homolog of NCBI NO: 6681179 NR Description: 7-dehydrocholesterol reductase [Mus musculus]
  misc_feature (77)..(419): Homolog of NCBI NO: 11693158 NR Description: 7-dehydrocholesterol reductase [Rattus norvegicus]
  misc_feature (77)..(419): Homolog of NCBI NO: 3171089 NR Description: 7-dehydrocholesterol reductase [Homo sapiens]
  misc_feature (77)..(419): Homolog of NCBI NO: 20138066 NR Description: 7-dehydrocholesterol reductase (7-DHC reductase)
MLALLSLCPPFVILLWYTMVHADGSVVRTYEHLRDHGVLEGLKAIWPMPTLVAWKIIFGFGLFEAVLQLLLPGKRFEGPISPAGNVPVYKANGLQAYAVTLITYLGLWWFGIFNPAIVYDHLGEIYSALVFGSFVFCIFLYIKGHVFPSSSDSGSSGNVIIDFYWGMELYPRIGKYFDIKVFTNCRFGMMSWAVLAVTYCIKQYEMNGRVADSMLVNTALMLIYITKFFWWESGYWCTMDIAHDRAGFYICWGCLVWVPSIYTSPGMYLVNHPLNLGPQLALSILLAGMLCIYINYDCDRQRQEFRRTNGKCSVWGKAPSKIVASYQTTKGETKTSLLLTSGWWGLSRHFHYVPEILSAFFWTVPALFNHFLPYFYVIFLTILLFDRAKRDDDRCSSKYGKYWKIYCNKVPYRVIPGIY

SEQ ID NO: 10758 - protein, 401 aa, Zea mays subsp. mays
  peptide (1)..(401): Ceres Seq. ID no. 12566490
  misc_feature (1)..(401): Pfam Name: Ergosterol biosynthesis ERG4/ERG24 family Pfam Description: Ergosterol biosynthesis ERG4/ERG24 family
  misc_feature (1)..(401): Homolog of NCBI NO: 39726086 NR Description: sterol delta-7 reductase [Tropaeolum majus]
  misc_feature (1)..(401): Homolog of NCBI NO: 15222967 NR Description: sterol delta7 reductase; protein id: At1g50430.1, by cDNA: gi_1245181, supported by cDNA: gi_20466245 [Arabidopsis
  misc_feature (1)..(401): Homolog of NCBI NO: 1245182 NR Description: sterol delta-7 reductase
  misc_feature (1)..(398): Homolog of NCBI NO: 29654463 NR Description: ergosterol biosynthesis ERG4/ERG24 family protein burnetii RSA 493] >gi|29541730|gb|AAO90669.1| ergosterol
  misc_feature (1)..(401): Homolog of NCBI NO: 27924199 NR Description: Similar to 7-dehydrocholesterol reductase
  misc_feature (1)..(401): Homolog of NCBI NO: 38969866 NR Description: 7-dehydrocholesterol reductase [Silurana
  misc_feature (59)..(401): Homolog of NCBI NO: 6681179 NR Description: 7-dehydrocholesterol reductase [Mus musculus]
  misc_feature (59)..(401): Homolog of NCBI NO: 11693158 NR Description: 7-dehydrocholesterol reductase [Rattus norvegicus]
  misc_feature (59)..(401): Homolog of NCBI NO: 3171089 NR Description: 7-dehydrocholesterol reductase [Homo sapiens]
  misc_feature (59)..(401): Homolog of NCBI NO: 4503321 NR Description: 7-dehydrocholesterol reductase;
MVHADGSVVRTYEHLRDHGVLEGLKAIWPMPTLVAWKIIFGFGLFEAVLQLLLPGKRFEGPISPAGNVPVYKANGLQAYAVTLITYLGLWWFGIFNPAIVYDHLGEIYSALVFGSFVFCIFLYIKGHVFPSSSDSGSSGNVIIDFYWGMELYPRIGKYFDIKVFTNCRFGMMSWAVLAVTYCIKQYEMNGRVADSMLVNTALMLIYITKFFWWESGYWCTMDIAHDRAGFYICWGCLVWVPSIYTSPGMYLVNHPLNLGPQLALSILLAGMLCIYINYDCDRQRQEFRRTNGKCSVWGKAPSKIVASYQTTKGETKTSLLLTSGWWGLSRHFHYVPEILSAFFWTVPALFNHFLPYFYVIFLTILLFDRAKRDDDRCSSKYGKYWKIYCNKVPYRVIPGIY

SEQ ID NO: 10759 - DNA, 1272 bp, Zea mays subsp. mays
  misc_feature (1)..(1272): Ceres Seq. ID no. 13500491
  misc_feature: MA Experiment ID: 108527 Result: Up-regulated in Transcription
  misc_feature: MA Experiment 108527 PARAMETER Experiment Name: Zm_5mM_NO_P Parameter: Age (day) Value: 8
  misc_feature: MA Experiment 108527 PARAMETER Experiment Name: Zm_5mM_NO_P Parameter: Organism Value: Zea mays
  misc_feature: MA Experiment 108527 PARAMETER Experiment Name: Zm_5mM_NO_P Parameter: Plant Line Value: 35A19
  misc_feature: MA Experiment 108527 PARAMETER Experiment Name: Zm_5mM_NO_P Parameter: Timepoint (hr) Value: 6
  misc_feature: MA Experiment 108527 PARAMETER Experiment Name: Zm_5mM_NO_P Parameter: Tissue Value: Aerial
  misc_feature: MA Experiment 108527 PARAMETER Experiment Name: Zm_5mM_NO_P Parameter: Treatment Value: 5mM NO vs. No Treatment
  misc_feature: MA Experiment ID: 108689 Result: Up-regulated in Transcription
  misc_feature: MA Experiment 108689 PARAMETER Experiment Name: Zm_Drought_Roots_P Parameter: Age (day) Value: 9
  misc_feature: MA Experiment 108689 PARAMETER Experiment Name: Zm_Drought_Roots_P Parameter: Organism Value: Zea mays
  misc_feature: MA Experiment 108689 PARAMETER Experiment Name: Zm_Drought_Roots_P Parameter: Plant Line Value: 35A19
  misc_feature: MA Experiment 108689 PARAMETER Experiment Name: Zm_Drought_Roots_P Parameter: Timepoint (hr) Value: 24
  misc_feature: MA Experiment 108689 PARAMETER Experiment Name: Zm_Drought_Roots_P Parameter: Tissue Value: Roots
  misc_feature: MA Experiment 108689 PARAMETER Experiment Name: Zm_Drought_Roots_P Parameter: Treatment Value: Drought vs. No Drought
atccatcagtgtggactgtcgaaccgggggatgggttgggacgttgggtcctggtccacgtgaccacgtctagcagtagcaggctctcgaaactcacgttcccgtgtcgctcaactggcacaggactggaccccgtcccgtacggcatcgcaccccgcagccgcaggccgcatcttcctcgcgtgctctgccctctgtgcctgcccattcgttgatcccatcggcttccccttcctcttccccgatccccttcctcccccgatcccatccaattccacttccacaccccgggcctcgccgccgacgccgacgccgacgccgccggccatgtccaagtacggcaccattcccacctcctcctccgcgggcggagggcccgtgcccctcggcggcgcctccccgctcgatttcatctcccgcgccaaggctcggggcgcctcggcgctggcgacgcgccggccctggcgcgagctcgtggacgtccacgccgtcggcctgcccccgagcctcggcgacgcgtacctccgcgtgcgcgccaacctcgcccacttcgccatgaactacgccatcgtcgtcctcgtcgtcgtcttcctctccctcctctggcaccccgtctccctcatcgtcttcctcgtctgcatgctcgcctggctcgtcctctacttcctccgcgacgagcccctcgtcctcttcggccgcgtcgtcgccgacggctacgtccttgccgtgctcgccgtcgtcacgctcgtcctgctgctcctcaccgacgccactgccaacatcctctcctcgctgctcatcggcctcgtcctcgtcctcgtccacgccgcgctgcacaaggcggaggacaacgccgccgacgaggccgaccgctggtacgcgccggtgtcacagcagccgtcgcactgaggatctgaatgtggccattcggcgccttggctgtgatcctattctgtactgtttccgagttcctccagctgcgcaagctgggccatccccatctcatctgcgatgaaaaccctgtccttgttgattgtgattcacttgctgccggttccatgggaagttttggatccagcgatgacgcagggctgttaaacttgttctccacgcccagcccatttctgtgatacgtttaaagcgtctcgttcacgtgtatcaaatccggactgaagtctagtgtacattttgagttggagaaatgtgatgccagggacctgcattcagattttatcgacgccatgcatgtaggcaagcgatgctgatatttct

SEQ ID NO: 10760 - protein, 193 aa, Zea mays subsp. mays; identical to SEQ ID NO: 9578
  peptide (1)..(193): Ceres Seq. ID no. 13500492
  misc_feature (1)..(182): Homolog of NCBI NO: 34903576 NR Description: P0419B01.1 [Oryza sativa (japonica
  misc_feature (1)..(179): Homolog of NCBI NO: 21617895 NR Description: unknown [Arabidopsis thaliana]
  misc_feature (1)..(179): Homolog of NCBI NO: 18400140 NR Description: expressed protein [Arabidopsis thaliana] gb|AAC14054.1~gene_id:MMM17.14~similar to unknown protein thaliana] >gi|28393547|gb|AAO42194.1| unknown protein
  misc_feature (1)..(179): Homolog of NCBI NO: 18405248 NR Description: expressed protein [Arabidopsis thaliana]
  misc_feature (23)..(179): Homolog of NCBI NO: 15231332 NR Description: expressed protein [Arabidopsis thaliana] gb|AAC14054.1~gene_id:MMM17.13~similar to unknown protein
  misc_feature (23)..(174): Homolog of NCBI NO: 15220814 NR Description: expressed protein [Arabidopsis thaliana]
  misc_feature (1)..(174): Homolog of NCBI NO: 40539036 NR Description: putative prenylated rab acceptor protein [Oryza
  misc_feature (1)..(179): Homolog of NCBI NO: 21594668 NR Description: unknown [Arabidopsis thaliana]
  misc_feature (1)..(181): Homolog of NCBI NO: 15239101 NR Description: expressed protein [Arabidopsis thaliana] emb|CAB87410.1~gene_id:K18I23.19~similar to unknown protein
  misc_feature (1)..(181): Homolog of NCBI NO: 18072825 NR Description: prenylated Rab receptor 2 [Arabidopsis thaliana]

SEQ ID NO: 10761 - protein, 117 aa, Zea mays subsp. mays
  peptide (1)..(117): Ceres Seq. ID no. 13500493
  misc_feature (1)..(106): Homolog of NCBI NO: 34903576 NR Description: P0419B01.1 [Oryza sativa (japonica
  misc_feature (1)..(103): Homolog of NCBI NO: 21617895 NR Description: unknown [Arabidopsis thaliana]
  misc_feature (1)..(103): Homolog of NCBI NO: 18400140 NR Description: expressed protein [Arabidopsis thaliana] gb|AAC14054.1~gene_id:MMM17.14~similar to unknown protein thaliana] >gi|28393547|gb|AAO42194.1| unknown protein
  misc_feature (1)..(103): Homolog of NCBI NO: 18405248 NR Description: expressed protein [Arabidopsis thaliana]
  misc_feature (1)..(103): Homolog of NCBI NO: 15231332 NR Description: expressed protein [Arabidopsis thaliana] gb|AAC14054.1~gene_id:MMM17.13~similar to unknown protein
  misc_feature (1)..(98): Homolog of NCBI NO: 15220814 NR Description: expressed protein [Arabidopsis thaliana]
  misc_feature (1)..(98): Homolog of NCBI NO: 40539036 NR Description: putative prenylated rab acceptor protein [Oryza
  misc_feature (1)..(103): Homolog of NCBI NO: 21594668 NR Description: unknown [Arabidopsis thaliana]
  misc_feature (1)..(105): Homolog of NCBI NO: 15239101 NR Description: expressed protein [Arabidopsis thaliana] emb|CAB87410.1~gene_id:K18I23.19~similar to unknown protein
  misc_feature (1)..(105): Homolog of NCBI NO: 18072825 NR Description: prenylated Rab receptor 2 [Arabidopsis thaliana]
MNYAIVVLVVVFLSLLWHPVSLIVFLVCMLAWLVLYFLRDEPLVLFGRVVADGYVLAVLAVVTLVLLLLTDATANILSSLLIGLVLVLVHAALHKAEDNAADEADRWYAPVSQQPSH

SEQ ID NO: 10762 - DNA, 1792 bp, Zea mays subsp. mays
  misc_feature (1)..(1792): Ceres Seq. ID no. 12412110
  misc_feature: MA Experiment ID: 108529 Result: Up-regulated in Transcription
  misc_feature: MA Experiment 108529 PARAMETER Experiment Name: Zm_Imbibed_Seeds_P Parameter: Age (day) Value: 5 vs. 2
  misc_feature: MA Experiment 108529 PARAMETER Experiment Name: Zm_Imbibed_Seeds_P Parameter: Organism Value: Zea mays
  misc_feature: MA Experiment 108529 PARAMETER Experiment Name: Zm_Imbibed_Seeds_P Parameter: Plant Line Value: 35A19
  misc_feature: MA Experiment 108529 PARAMETER Experiment Name: Zm_Imbibed_Seeds_P Parameter: Tissue Value: Roots vs. Embryo
  misc_feature: MA Experiment ID: 108534 Result: Up-regulated in Transcription
  misc_feature: MA Experiment 108534 PARAMETER Experiment Name: Zm_4deg_Cold_P Parameter: Age (hr) Value: 8
  misc_feature: MA Experiment 108534 PARAMETER Experiment Name: Zm_4deg_Cold_P Parameter: Organism Value: Zea mays
  misc_feature: MA Experiment 108534 PARAMETER Experiment Name: Zm_4deg_Cold_P Parameter: Plant Line Value: 35A19
  misc_feature: MA Experiment 108534 PARAMETER Experiment Name: Zm_4deg_Cold_P Parameter: Temperature (deg C) Value: 4 vs. 22
  misc_feature: MA Experiment 108534 PARAMETER Experiment Name: Zm_4deg_Cold_P Parameter: Timepoint (hr) Value: 6
  misc_feature: MA Experiment 108534 PARAMETER Experiment Name: Zm_4deg_Cold_P Parameter: Tissue Value: Aerial
  misc_feature: MA Experiment ID: 108535 Result: Down-regulated in Transcription
  misc_feature: MA Experiment 108535 PARAMETER Experiment Name: Zm_Meristem_P Parameter: Age (day) Value: 8
  misc_feature: MA Experiment 108535 PARAMETER Experiment Name: Zm_Meristem_P Parameter: Organism Value: Zea mays
  misc_feature: MA Experiment 108535 PARAMETER Experiment Name: Zm_Meristem_P Parameter: Plant Line Value: 35A19
  misc_feature: MA Experiment 108535 PARAMETER Experiment Name: Zm_Meristem_P Parameter: Tissue Value: Root Meristem vs. Above Root Meristem
  misc_feature: MA Experiment ID: 108536 Result: Up-regulated in Transcription
  misc_feature: MA Experiment 108536 PARAMETER Experiment Name: Zm_Meristem_P Parameter: Age (day) Value: 8
  misc_feature: MA Experiment 108536 PARAMETER Experiment Name: Zm_Meristem_P Parameter: Organism Value: Zea mays
  misc_feature: MA Experiment 108536 PARAMETER Experiment Name: Zm_Meristem_P Parameter: Plant Line Value: 35A19
  misc_feature: MA Experiment 108536 PARAMETER Experiment Name: Zm_Meristem_P Parameter: Tissue Value: Shoot Meristem vs. Above Shoot Meristem
  misc_feature: MA Experiment ID: 108689 Result: Down-regulated in Transcription
  misc_feature: MA Experiment 108689 PARAMETER Experiment Name: Zm_Drought_Roots_P Parameter: Age (day) Value: 9
  misc_feature: MA Experiment 108689 PARAMETER Experiment Name: Zm_Drought_Roots_P Parameter: Organism Value: Zea mays
  misc_feature: MA Experiment 108689 PARAMETER Experiment Name: Zm_Drought_Roots_P Parameter: Plant Line Value: 35A19
  misc_feature: MA Experiment 108689 PARAMETER Experiment Name: Zm_Drought_Roots_P Parameter: Timepoint (hr) Value: 24
  misc_feature: MA Experiment 108689 PARAMETER Experiment Name: Zm_Drought_Roots_P Parameter: Tissue Value: Roots
  misc_feature: MA Experiment 108689 PARAMETER Experiment Name: Zm_Drought_Roots_P Parameter: Treatment Value: Drought vs. No Drought
  misc_feature: MA Experiment ID: 20000477 Result: Down-regulated in Transcription
  misc_feature: MA Experiment 20000477 PARAMETER Experiment Name: Zm_5mM_SA_P Parameter: Age (day) Value: 10
  misc_feature: MA Experiment 20000477 PARAMETER Experiment Name: Zm_5mM_SA_P Parameter: Organism Value: Zea mays
  misc_feature: MA Experiment 20000477 PARAMETER Experiment Name: Zm_5mM_SA_P Parameter: Plant Line Value: 35A19
  misc_feature: MA Experiment 20000477 PARAMETER Experiment Name: Zm_5mM_SA_P Parameter: Timepoint (hr) Value: 48
  misc_feature: MA Experiment 20000477 PARAMETER Experiment Name: Zm_5mM_SA_P Parameter: Tissue Value: Aerial
  misc_feature: MA Experiment 20000477 PARAMETER Experiment Name: Zm_5mM_SA_P Parameter: Treatment Value: 5mM SA vs. No Treatment
  misc_feature: MA Experiment ID: 20000478 Result: Down-regulated in Transcription
  misc_feature: MA Experiment 20000478 PARAMETER Experiment Name: Zm_5mM_SA_P Parameter: Age (day) Value: 11
  misc_feature: MA Experiment 20000478 PARAMETER Experiment Name: Zm_5mM_SA_P Parameter: Organism Value: Zea mays
  misc_feature: MA Experiment 20000478 PARAMETER Experiment Name: Zm_5mM_SA_P Parameter: Plant Line Value: 35A19
  misc_feature: MA Experiment 20000478 PARAMETER Experiment Name: Zm_5mM_SA_P Parameter: Timepoint (hr) Value: 72
  misc_feature: MA Experiment 20000478 PARAMETER Experiment Name: Zm_5mM_SA_P Parameter: Tissue Value: Aerial
  misc_feature: MA Experiment 20000478 PARAMETER Experiment Name: Zm_5mM_SA_P Parameter: Treatment Value: 5mM SA vs. No Treatment
  misc_feature: MA Experiment ID: 20000479 Result: Down-regulated in Transcription
  misc_feature: MA Experiment 20000479 PARAMETER Experiment Name: Zm_Drought_P Parameter: Age (day) Value: 10
  misc_feature: MA Experiment 20000479 PARAMETER Experiment Name: Zm_Drought_P Parameter: Organism Value: Zea mays
  misc_feature: MA Experiment 20000479 PARAMETER Experiment Name: Zm_Drought_P Parameter: Plant Line Value: 35A19
  misc_feature: MA Experiment 20000479 PARAMETER Experiment Name: Zm_Drought_P Parameter: Timepoint (hr) Value: 48
  misc_feature: MA Experiment 20000479 PARAMETER Experiment Name: Zm_Drought_P Parameter: Tissue Value: Aerial
  misc_feature: MA Experiment 20000479 PARAMETER Experiment Name: Zm_Drought_P Parameter: Treatment Value: Drought vs. No Drought
  misc_feature: MA Experiment ID: 20000480 Result: Down-regulated in Transcription
  misc_feature: MA Experiment 20000480 PARAMETER Experiment Name: Zm_Drought_P Parameter: Age (day) Value: 11
  misc_feature: MA Experiment 20000480 PARAMETER Experiment Name: Zm_Drought_P Parameter: Organism Value: Zea mays
  misc_feature: MA Experiment 20000480 PARAMETER Experiment Name: Zm_Drought_P Parameter: Plant Line Value: 35A19
  misc_feature: MA Experiment 20000480 PARAMETER Experiment Name: Zm_Drought_P Parameter: Timepoint (hr) Value: 72
  misc_feature: MA Experiment 20000480 PARAMETER Experiment Name: Zm_Drought_P Parameter: Tissue Value: Aerial
  misc_feature: MA Experiment 20000480 PARAMETER Experiment Name: Zm_Drought_P Parameter: Treatment Value: Drought vs. No Drought
  misc_feature: MA Experiment ID: 20000488 Result: Down-regulated in Transcription
  misc_feature: MA Experiment 20000488 PARAMETER Experiment Name: Zm_50mM_NH4NO3_L_to_H_P Parameter: Organism Value: Zea mays
  misc_feature: MA Experiment 20000488 PARAMETER Experiment Name: Zm_50mM_NH4NO3_L_to_H_P Parameter: Timepoint (hr) Value: 8
  misc_feature: MA Experiment 20000488 PARAMETER Experiment Name: Zm_50mM_NH4NO3_L_to_H_P Parameter: Tissue Value: Leaves
  misc_feature: MA Experiment 20000488 PARAMETER Experiment Name: Zm_50mM_NH4NO3_L_to_H_P Parameter: Treatment Value: 50mM NH4NO3 vs. 100mM Mannitol
  misc_feature: MA Experiment ID: 20000492 Result: Down-regulated in Transcription
  misc_feature: MA Experiment 20000492 PARAMETER Experiment Name: Zm_Hybrid_Seed_Dev_P Parameter: DAP Value: 12
  misc_feature: MA Experiment 20000492 PARAMETER Experiment Name: Zm_Hybrid_Seed_Dev_P Parameter: Organism Value: Zea mays
  misc_feature: MA Experiment 20000492 PARAMETER Experiment Name: Zm_Hybrid_Seed_Dev_P Parameter: Plant Line Value: 35A19
  misc_feature: MA Experiment 20000492 PARAMETER Experiment Name: Zm_Hybrid_Seed_Dev_P Parameter: Tissue Value: Fert Kernel vs. Unfert Floret
  misc_feature: MA Experiment ID: 20000535 Result: Down-regulated in Transcription
  misc_feature: MA Experiment 20000535 PARAMETER Experiment Name: Zm_Hybrid_Seed_Dev_P Parameter: DAP Value: 30 vs. 12
  misc_feature: MA Experiment 20000535 PARAMETER Experiment Name: Zm_Hybrid_Seed_Dev_P Parameter: Organism Value: Zea mays
  misc_feature: MA Experiment 20000535 PARAMETER Experiment Name: Zm_Hybrid_Seed_Dev_P Parameter: Plant Line Value: 35A19
  misc_feature: MA Experiment 20000535 PARAMETER Experiment Name: Zm_Hybrid_Seed_Dev_P Parameter: Tissue Value: Embryo vs. Unfert Floret
  misc_feature: MA Experiment ID: 20001608 Result: Down-regulated in Transcription
  misc_feature: MA Experiment 20001608 PARAMETER Experiment Name: Zm_50ppm_KNO3_L-to-H_P Parameter: Age (day) Value: 21
  misc_feature: MA Experiment 20001608 PARAMETER Experiment Name: Zm_50ppm_KNO3_L-to-H_P Parameter: Organism Value: Zea mays
  misc_feature: MA Experiment 20001608 PARAMETER Experiment Name: Zm_50ppm_KNO3_L-to-H_P Parameter: Plant Line Value: 35A19
  misc_feature: MA Experiment 20001608 PARAMETER Experiment Name: Zm_50ppm_KNO3_L-to-H_P Parameter: Timepoint (hr) Value: 48
  misc_feature: MA Experiment 20001608 PARAMETER Experiment Name: Zm_50ppm_KNO3_L-to-H_P Parameter: Tissue Value: Shoots
  misc_feature: MA Experiment 20001608 PARAMETER Experiment Name: Zm_50ppm_KNO3_L-to-H_P Parameter: Treatment Value: 50ppm KNO3 vs. 50ppm KCl
aaatcctcctcctcctcctgccgcagcccgcagggaggtggagttgtcaacgtgccgaggactggagcgcccgcgtccggcgtctctataaacgagaccgcccggccatttggtctgctcctctctgttctcccctgcctgcctgcttccagctgcatctctctccgccgagaccgagaggaggaggaggcaagggaggcatccctgacgtacggacggcggccatggggacgcaggcgccggagaactaccccgccgagaaggtacaggacgcgaggagcgcgcgggagaaggccatcgacgactggctcccgatcacctcgtcgcggaacgccaagtggtggtactccgccttccacaatgtcaccgccatggtcggcgccggcgtgctcagcctgccctacgccatgtccgagcttggctggggccctggcatcgcggtgctggtggtgtcgtgggtgatcacgctgtacacgctgtggcagatggtggagatgcacgagatggtccccgggaagcggttcgaccgttaccacgagctggggcagcacgcgttcggggaccggctgggcctgtggatcgtggtgccgcagcagctggtcgtcgaggtgggcgtgaacatcgtgtacatggtgaccggcggcaagtccctgaagaagttccacgacgtggctggtgtgcggcgacacgggggtgtgcgaggggaaggacaacatcaagaccacctacttcatcatgatcttcgcgtccgtccacttcgtcctctcgcagctccccaacttcaactccatctccggcgtctccctcgccgccgccgtcatgtcgctcagctactccaccatcgcgtggggcgcgtcggtgcacaaggggaggatgtcgggcgtcgactaccacctgcgcgcgaccaccacgccggggaaggtgttcggcttcttcggcgcgctgggggacgtggcgttcgcctacgccggccacaacgtggtgctggagatccaggccaccatcccgtccacccccgacaagccgtccaagaagcccatgtggaagggcgtggtggtcgcctacgtcgtggtggcgctctgctacttccccgtcgcgctcatcggctactgggcgttcggaaacacggtcgaggacaacatcctcatcacgctcagcaagcccaagtggctcatcgcgctcgccaacatgatggtcgtcgtccatgtcatcggcagctaccagatctatgccatgccggtgtttgacatgatagagaccgtgctggtgaagaagctgcgcttccctcccggcctcacgctgcgtctgatcgctcggaccctctatgttgcgttcacgatgttcatagccatcaccttccccttcttcggtgggctgctcggtttcttcggcgggttcgccttcgcgccgaccacctatttccttccctgcgtcatgtggctcgcaatctacaagcccaagaggttcagcctctcctggttgaccaactggatgtgcatcattcttggggtgctcctgatgattctgtcgcccatcggagggctccggcaaataataatggacgcgaaaacctaccagttctactcgtgagctaccaccagccatgacttgtaagcacgattggagaaatctgtcaaagcctcaaccacgagtttttgtttttgttttttgtcatgccaaacacatacatatacgtactgtttttttaatattcaaaggtgttcttcgtggcttgcgtgtgtacagtattatgtgtatgagggagacataagtttaatgatgctggctgtct

SEQ ID NO: 10763 - protein, 414 aa, Zea mays subsp. mays
  peptide (1)..(414): Ceres Seq. ID no. 12412111
  misc_feature (90)..(223): Homolog of NCBI NO: 18395471 NR Description: putative lysine/histidine-specific permease; id: At1g24400.1, supported by cDNA: gi_9293859 [Arabidopsis
  misc_feature (81)..(223): Homolog of NCBI NO: 15220504 NR Description: putative amino acid permease; protein id: [Arabidopsis thaliana] >gi|11072015|gb|AAG28894.1|AC008113_10 [Arabidopsis thaliana] >gi|12324687|gb|AAG52310.1|AC011020_17
  misc_feature (95)..(224): Homolog of NCBI NO: 12597815 NR Description: lysine and histidine specific transporter,
  misc_feature (95)..(224): Homolog of NCBI NO: 22330117 NR Description: lysine and histidine specific transporter,
  misc_feature (75)..(223): Homolog of NCBI NO: 2576361 NR Description: lysine and histidine specific transporter
  misc_feature (84)..(219): Homolog of NCBI NO: 7489096 NR Description: amino acid permease 1 - wood tobacco amino acid permease 1 >gi|1906549|gb|AAB96830.1| amino acid
  misc_feature (89)..(224): Homolog of NCBI NO: 15219896 NR Description: lysine and histidine specific transporter,
  misc_feature (86)..(224): Homolog of NCBI NO: 6091720 NR Description: putative amino acid permease [Arabidopsis
  misc_feature (99)..(224): Homolog of NCBI NO: 15232176 NR Description: putative amino acid permease; protein id: [Arabidopsis thaliana] >gi|6016733|gb|AAF01559.1|AC009325_29
  misc_feature (100)..(223): Homolog of NCBI NO: 15220283 NR Description: lysine and histidine specific transporter, protein id: At1g47670.1, supported by cDNA: gi_17529317
ILLLLLPQPAGRWSCQRAEDWSARVRRLYKRDRPAIWSAPLCSPLPACFQLHLSPPRPRGGGGKGGIPDVRTAAMGTQAPENYPAEKVQDARSAREKAIDDWLPITSSRNAKWWYSAFHNVTAMVGAGVLSLPYAMSELGWGPGIAVLVVSWVITLYTLWQMVEMHEMVPGKRFDRYHELGQHAFGDRLGLWIVVPQQLVVEVGVNIVYMVTGGKSLKKFHDVAGVRRHGGVRGEGQHQDHLLHHDLRVRPLRPLAAPQLQLHLRRLPRRRRHVAQLLHHRVGRVGAQGEDVGRRLPPARDHHAGEGVRLLRRAGGRGVRLRRPQRGAGDPGHHPVHPRQAVQEAHVEGRGGRLRRGGALLLPRRAHRLLGVRKHGRGQHPHHAQQAQVAHRARQHDGRRPCHRQLPDLCHAGV

SEQ ID NO: 10764 - protein, 340 aa, Zea mays subsp. mays
  peptide (1)..(340): Ceres Seq. ID no. 12412112
  misc_feature (16)..(149): Homolog of NCBI NO: 18395471 NR Description: putative lysine/histidine-specific permease; id: At1g24400.1, supported by cDNA: gi_9293859 [Arabidopsis
  misc_feature (7)..(149): Homolog of NCBI NO: 15220504 NR Description: putative amino acid permease; protein id: [Arabidopsis thaliana] >gi|11072015|gb|AAG28894.1|AC008113_10 [Arabidopsis thaliana] >gi|12324687|gb|AAG52310.1|AC011020_17
  misc_feature (21)..(150): Homolog of NCBI NO: 12597815 NR Description: lysine and histidine specific transporter,
  misc_feature (21)..(150): Homolog of NCBI NO: 22330117 NR Description: lysine and histidine specific transporter,
  misc_feature (1)..(149): Homolog of NCBI NO: 2576361 NR Description: lysine and histidine specific transporter
  misc_feature (10)..(145): Homolog of NCBI NO: 7489096 NR Description: amino acid permease 1 - wood tobacco amino acid permease 1 >gi|1906549|gb|AAB96830.1| amino acid
  misc_feature (15)..(150): Homolog of NCBI NO: 15219896 NR Description: lysine and histidine specific transporter,
  misc_feature (12)..(150): Homolog of NCBI NO: 6091720 NR Description: putative amino acid permease [Arabidopsis
  misc_feature (25)..(150): Homolog of NCBI NO: 15232176 NR Description: putative amino acid permease; protein id: [Arabidopsis thaliana] >gi|6016733|gb|AAF01559.1|AC009325_29
  misc_feature (26)..(149): Homolog of NCBI NO: 15220283 NR Description: lysine and histidine specific transporter, protein id: At1g47670.1, supported by cDNA: gi_17529317
MGTQAPENYPAEKVQDARSAREKAIDDWLPITSSRNAKWWYSAFHNVTAMVGAGVLSLPYAMSELGWGPGIAVLVVSWVITLYTLWQMVEMHEMVPGKRFDRYHELGQHAFGDRLGLWIVVPQQLVVEVGVNIVYMVTGGKSLKKFHDVAGVRRHGGVRGEGQHQDHLLHHDLRVRPLRPLAAPQLQLHLRRLPRRRRHVAQLLHHRVGRVGAQGEDVGRRLPPARDHHAGEGVRLLRRAGGRGVRLRRPQRGAGDPGHHPVHPRQAVQEAHVEGRGGRLRRGGALLLPRRAHRLLGVRKHGRGQHPHHAQQAQVAHRARQHDGRRPCHRQLPDLCHAGV

SEQ ID NO: 10765 - protein, 291 aa, Zea mays subsp. mays
  peptide (1)..(291): Ceres Seq. ID no. 12412113
  misc_feature (1)..(100): Homolog of NCBI NO: 18395471 NR Description: putative lysine/histidine-specific permease; id: At1g24400.1, supported by cDNA: gi_9293859 [Arabidopsis
  misc_feature (1)..(100): Homolog of NCBI NO: 15220504 NR Description: putative amino acid permease; protein id: [Arabidopsis thaliana] >gi|11072015|gb|AAG28894.1|AC008113_10 [Arabidopsis thaliana] >gi|12324687|gb|AAG52310.1|AC011020_17
  misc_feature (1)..(101): Homolog of NCBI NO: 12597815 NR Description: lysine and histidine specific transporter,
  misc_feature (1)..(101): Homolog of NCBI NO: 22330117 NR Description: lysine and histidine specific transporter,
  misc_feature (1)..(100): Homolog of NCBI NO: 2576361 NR Description: lysine and histidine specific transporter
  misc_feature (1)..(96): Homolog of NCBI NO: 7489096 NR Description: amino acid permease 1 - wood tobacco amino acid permease 1 >gi|1906549|gb|AAB96830.1| amino acid
  misc_feature (1)..(101): Homolog of NCBI NO: 15219896 NR Description: lysine and histidine specific transporter,
  misc_feature (1)..(101): Homolog of NCBI NO: 6091720 NR Description: putative amino acid permease [Arabidopsis
  misc_feature (1)..(101): Homolog of NCBI NO: 15232176 NR Description: putative amino acid permease; protein id: [Arabidopsis thaliana] >gi|6016733|gb|AAF01559.1|AC009325_29
  misc_feature (1)..(100): Homolog of NCBI NO: 15220283 NR Description: lysine and histidine specific transporter, protein id: At1g47670.1, supported by cDNA: gi_17529317
MVGAGVLSLPYAMSELGWGPGIAVLVVSWVITLYTLWQMVEMHEMVPGKRFDRYHELGQHAFGDRLGLWIVVPQQLVVEVGVNIVYMVTGGKSLKKFHDVAGVRRHGGVRGEGQHQDHLLHHDLRVRPLRPLAAPQLQLHLRRLPRRRRHVAQLLHHRVGRVGAQGEDVGRRLPPARDHHAGEGVRLLRRAGGRGVRLRRPQRGAGDPGHHPVHPRQAVQEAHVEGRGGRLRRGGALLLPRRAHRLLGVRKHGRGQHPHHAQQAQVAHRARQHDGRRPCHRQLPDLCHAGV

SEQ ID NO: 10766 - DNA, 1836 bp, Zea mays subsp. mays
  misc_feature (1)..(1836): Ceres Seq. ID no. 12412106
  misc_feature: MA Experiment ID: 108543 Result: Up-regulated in Transcription
  misc_feature: MA Experiment ID: 20000479 Result: Down-regulated in Transcription
  misc_feature: MA Experiment 20000479 PARAMETER Experiment Name: Zm_Drought_P Parameter: Age (day) Value: 10
  misc_feature: MA Experiment 20000479 PARAMETER Experiment Name: Zm_Drought_P Parameter: Organism Value: Zea mays
  misc_feature: MA Experiment 20000479 PARAMETER Experiment Name: Zm_Drought_P Parameter: Plant Line Value: 35A19
  misc_feature: MA Experiment 20000479 PARAMETER Experiment Name: Zm_Drought_P Parameter: Timepoint (hr) Value: 48
  misc_feature: MA Experiment 20000479 PARAMETER Experiment Name: Zm_Drought_P Parameter: Tissue Value: Aerial
  misc_feature: MA Experiment 20000479 PARAMETER Experiment Name: Zm_Drought_P Parameter: Treatment Value: Drought vs. No Drought
  misc_feature: MA Experiment ID: 20000480 Result: Down-regulated in Transcription
  misc_feature: MA Experiment 20000480 PARAMETER Experiment Name: Zm_Drought_P Parameter: Age (day) Value: 11
  misc_feature: MA Experiment 20000480 PARAMETER Experiment Name: Zm_Drought_P Parameter: Organism Value: Zea mays
  misc_feature: MA Experiment 20000480 PARAMETER Experiment Name: Zm_Drought_P Parameter: Plant Line Value: 35A19
  misc_feature: MA Experiment 20000480 PARAMETER Experiment Name: Zm_Drought_P Parameter: Timepoint (hr) Value: 72
  misc_feature: MA Experiment 20000480 PARAMETER Experiment Name: Zm_Drought_P Parameter: Tissue Value: Aerial
  misc_feature: MA Experiment 20000480 PARAMETER Experiment Name: Zm_Drought_P Parameter: Treatment Value: Drought vs. No Drought
  misc_feature: MA Experiment ID: 20000492 Result: Up-regulated in Transcription
  misc_feature: MA Experiment 20000492 PARAMETER Experiment Name: Zm_Hybrid_Seed_Dev_P Parameter: DAP Value: 12
  misc_feature: MA Experiment 20000492 PARAMETER Experiment Name: Zm_Hybrid_Seed_Dev_P Parameter: Organism Value: Zea mays
  misc_feature: MA Experiment 20000492 PARAMETER Experiment Name: Zm_Hybrid_Seed_Dev_P Parameter: Plant Line Value: 35A19
  misc_feature: MA Experiment 20000492 PARAMETER Experiment Name: Zm_Hybrid_Seed_Dev_P Parameter: Tissue Value: Fert Kernel vs. Unfert Floret
aacacaactgcacaaaagcacaagcctccctcccggctccccacctcgcagcgtccgccggcacaccacctctgactcctctccctccgcggcctccgtttcttccctcattctccgcaaaccctaatcccaatggctgcctccgccaggactaccagctcgttgccctacctagtcgccgtctcctcccccgcggctcaccgccacggggccagccacccgatccgcgcctcggtgggggaggcgacaatggacgtggtgtcggaggcggagctgcgggagaaagggttcttggggatgcggaaaacgaaactggtgtgcacggtggggcccgcctgcgtcgaggcgctgccggcgctggcgcgcggcgggatgggcgtggcgcggatcaacctctgccacggtggccgggagtggcatcgtgccgccatgcgctctgtgcggaggctcaacgaggagggaggattctgcgtgacgcttatggtcgacaccgagggttcccagctcctcgtcgcggaccacggaggcgccacctcagtcaaggccgaggatgggtcagagtggatatttacaaacaaaaaagctgatgaagcccatcagttcacaatgcatgtgaattttgataagttttctgaaggcattttggttggtgatgagcttgtaatagatggtggaatggcaacatttgaagttactgagaaaataggaaatgatttgcgctgtaagtgcacggacccaggattgggctgacatcgaatttgggatagctgaaggagttgattgcattgctctatcatttgtaaatgatgctaatgatataaagcagttgaaagcttacctctctagaagatcgttagagcacatcaaagtatttgcaaagattgagagtctagaatctctcaagaacctgaaagacatcatagaggcatctgatggagttatggtagcacgaggggatcttggagttcagattcctcttgaacagatcccagccattcaagaatcaattgttaaactatgtagacacctgaacaagcctgtgatagttgcttctcagcttctcgaatcaatggttgaatacccaacaccaactcgagcagaggtggccgatgtttcggaagcagtgcggcaatatgcagacgctgtgatgctatcagcagagtcagctataggtgcatatccccaaaaagcgctatctgtacttcgtgcagccagtgaaaggatggaatcatggagccgtgaggaaaacatgcagaaacttcttccacggcatcagcttgcaattgcattgcctgaccggatctcagagcagatttgcagctgtgctgtagaaatggcaaacaaccttgctgtggatgccatatttgtctacacaaagcatggtcacatggcatcacttctatcgcgcaaccgacccaaccctcccatattcgcgttcactgataatgccaattcaagaaagagcatgaacctctactcgggagtgattccacttcatctaccattgtcaaatagcatggaggataacttcaacaaaaccatcagcctgatgaggtcgaagggttcagtgaaacccggagacacggtcttggtggtatcagattctgatctaaaccaaccttgtgctgccacctcggtgttccaatccattcaggtccggctagtggagtaggttccatgagatgagatcctactagccgtttggttggctaaaatgtaacgtaaccaactactactatgcgttaccattgcaaaccattcccaccgtctataattagatcctatttccatctccaaataaagattgaaccactgcgattacagtggtgtctgatt

SEQ ID NO: 10767 - protein, 320 aa, Zea mays subsp. mays
  peptide (1)..(320): Ceres Seq. ID no. 12412107
  misc_feature (199)..(298): Pfam Name: Pyruvate kinase, alpha/beta domain Pfam Description: Pyruvate kinase, alpha/beta domain
  misc_feature (1)..(320): Homolog of NCBI NO: 29788835 NR Description: putative pyruvate kinase [Oryza sativa (japonica
  misc_feature (1)..(298): Homolog of NCBI NO: 2497539 NR Description: Pyruvate kinase isozyme A, chloroplast precursor
  misc_feature (1)..(298): Homolog of NCBI NO: 2129963 NR Description: pyruvate kinase (EC 2.7.1.40) A, chloroplast -
  misc_feature (1)..(298): Homolog of NCBI NO: 18403597 NR Description: pyruvate kinase, putative; protein id: supported by cDNA: 13351., supported by cDNA: gi_15983774, by cDNA: gi_16604371 [Arabidopsis thaliana]
  misc_feature (1)..(298): Homolog of NCBI NO: 21537361 NR Description: pyruvate kinase, putative [Arabidopsis thaliana]
  misc_feature (1)..(298): Homolog of NCBI NO: 2497541 NR Description: Pyruvate kinase isozyme A, chloroplast precursor
  misc_feature (1)..(298): Homolog of NCBI NO: 7434450 NR Description: pyruvate kinase (EC 2.7.1.40) isoform beta -
  misc_feature (1)..(298): Homolog of NCBI NO: 34393488 NR Description: putative Pyruvate kinase isozyme A, chloroplast
  misc_feature (1)..(298): Homolog of NCBI NO: 21954080 NR Description: putative pyruvate kinase [Arabidopsis thaliana]
  misc_feature (1)..(320): Homolog of NCBI NO: 37537030 NR Description: putative pyruvate kinase [Oryza sativa (japonica group)] >gi|19225011|gb|AAL86487.1| putative pyruvate kinase
MICAVSARTQDWADIEFGIAEGVDCIALSFVNDANDIKQLKAYLSRRSLEHIKVFAKIESLESLKNLKDIIEASDGVMVARGDLGVQIPLEQIPAIQESIVKLCRHLNKPVIVASQLLESMVEYPTPTRAEVADVSEAVRQYADAVMLSAESAIGAYPQKALSVLRAASERMESWSREENMQKLLPRHQLAIALPDRISEQICSCAVEMANNLAVDAIFVYTKHGHMASLLSRNRPNPPIFAFTDNANSRKSMNLYSGVIPLHLPLSNSMEDNFNKTISLMRSKGSVKPGDTVLVVSDSDLNQPCAATSVFQSIQVRLVE

SEQ ID NO: 10768 - protein, 243 aa, Zea mays subsp. mays
  peptide (1)..(243): Ceres Seq. ID no. 12412108
  misc_feature (122)..(221): Pfam Name: Pyruvate kinase, alpha/beta domain Pfam Description: Pyruvate kinase, alpha/beta domain
  misc_feature (1)..(243): Homolog of NCBI NO: 29788835 NR Description: putative pyruvate kinase [Oryza sativa (japonica
  misc_feature (1)..(221): Homolog of NCBI NO: 2497539 NR Description: Pyruvate kinase isozyme A, chloroplast precursor
  misc_feature (1)..(221): Homolog of NCBI NO: 2129963 NR Description: pyruvate kinase (EC 2.7.1.40) A, chloroplast -
  misc_feature (1)..(221): Homolog of NCBI NO: 18403597 NR Description: pyruvate kinase, putative; protein id: supported by cDNA: 13351., supported by cDNA: gi_15983774, by cDNA: gi_16604371 [Arabidopsis thaliana]
  misc_feature (1)..(221): Homolog of NCBI NO: 21537361 NR Description: pyruvate kinase, putative [Arabidopsis thaliana]
  misc_feature (1)..(221): Homolog of NCBI NO: 2497541 NR Description: Pyruvate kinase isozyme A, chloroplast precursor
  misc_feature (1)..(221): Homolog of NCBI NO: 7434450 NR Description: pyruvate kinase (EC 2.7.1.40) isoform beta -
  misc_feature (1)..(221): Homolog of NCBI NO: 34393488 NR Description: putative Pyruvate kinase isozyme A, chloroplast
  misc_feature (1)..(221): Homolog of NCBI NO: 21954080 NR Description: putative pyruvate kinase [Arabidopsis thaliana]
  misc_feature (1)..(243): Homolog of NCBI NO: 37537030 NR Description: putative pyruvate kinase [Oryza sativa (japonica group)] >gi|19225011|gb|AAL86487.1| putative pyruvate kinase
MVARGDLGVQIPLEQIPAIQESIVKLCRHLNKPVIVASQLLESMVEYPTPTRAEVADVSEAVRQYADAVMLSAESAIGAYPQKALSVLRAASERMESWSREENMQKLLPRHQLAIALPDRISEQICSCAVEMANNLAVDAIFVYTKHGHMASLLSRNRPNPPIFAFTDNANSRKSMNLYSGVIPLHLPLSNSMEDNFNKTISLMRSKGSVKPGDTVLVVSDSDLNQPCAATSVFQSIQVRLVE

SEQ ID NO: 10769 - protein, 205 aa, Zea mays subsp. mays
  peptide (1)..(205): Ceres Seq. ID no. 12412109
  misc_feature (1)..(204): Homolog of NCBI NO: 29788835 NR Description: putative pyruvate kinase [Oryza sativa (japonica
  misc_feature (40)..(204): Homolog of NCBI NO: 2497539 NR Description: Pyruvate kinase isozyme A, chloroplast precursor
  misc_feature (1)..(204): Homolog of NCBI NO: 2129963 NR Description: pyruvate kinase (EC 2.7.1.40) A, chloroplast -
  misc_feature (1)..(204): Homolog of NCBI NO: 18403597 NR Description: pyruvate kinase, putative; protein id: supported by cDNA: 13351., supported by cDNA: gi_15983774, by cDNA: gi_16604371 [Arabidopsis thaliana]
  misc_feature (1)..(204): Homolog of NCBI NO: 21537361 NR Description: pyruvate kinase, putative [Arabidopsis thaliana]
  misc_feature (1)..(204): Homolog of NCBI NO: 2497541 NR Description: Pyruvate kinase isozyme A, chloroplast precursor
  misc_feature (79)..(204): Homolog of NCBI NO: 7434450 NR Description: pyruvate kinase (EC 2.7.1.40) isoform beta -
  misc_feature (81)..(204): Homolog of NCBI NO: 34393488 NR Description: putative Pyruvate kinase isozyme A, chloroplast
  misc_feature (1)..(203): Homolog of NCBI NO: 37537030 NR Description: putative pyruvate kinase [Oryza sativa (japonica group)] >gi|19225011|gb|AAL86487.1| putative pyruvate kinase
  misc_feature (14)..(203): Homolog of NCBI NO: 2497542 NR Description: Pyruvate kinase isozyme G, chloroplast precursor
MAASARTTSSLPYLVAVSSPAAHRHGASHPIRASVGEATMDVVSEAELREKGFLGMRKTKLVCTVGPACVEALPALARGGMGVARINLCHGGREWHRAAMRSVRRLNEEGGFCVTLMVDTEGSQLLVADHGGATSVKAEDGSEWIFTNKKADEAHQFTMHVNFDKFSEGILVGDELVIDGGMATFEVTEKIGNDLRCKCTDPGLG

SEQ ID NO: 10770 - DNA, 767 bp, Zea mays subsp. mays
  misc_feature (1)..(767): Ceres Seq. ID no. 12342167
  misc_feature: MA Experiment ID: 108535 Result: Up-regulated in Transcription
  misc_feature: MA Experiment 108535 PARAMETER Experiment Name: Zm_Meristem_P Parameter: Age (day) Value: 8
  misc_feature: MA Experiment 108535 PARAMETER Experiment Name: Zm_Meristem_P Parameter: Organism Value: Zea mays
  misc_feature: MA Experiment 108535 PARAMETER Experiment Name: Zm_Meristem_P Parameter: Plant Line Value: 35A19
  misc_feature: MA Experiment 108535 PARAMETER Experiment Name: Zm_Meristem_P Parameter: Tissue Value: Root Meristem vs. Above Root Meristem
aagacctcctattcaccatgccgaccgaagagggttccgacggcggtggcggcgccggagccggagccggggagaagaagagctcgcaggcgcccgcaaagcctggagcgtgcggcgccgcaaagttcctcgcggggttgccgtcgcgcggcaacttctcttccggctccgccccctccaatctgggagggttcagggtttacgtctgcgagcacagcacagatcccccagaaggacaagttataaagacggattcaacgaatattttaatcaggcatctccagttgaacaagcagaagactgagggcaaagatgtggattccagaactgtcggcgaaaacaacagagggaaaagatctgctgccagaagtttggatgtcaacaattcagcaaagaaggctaacttgggtacttcatctggatcatcagcctatgaggaaatttctggcttttcacaacacacactgcagtcatttacagtggagagattgcgtgcacttctacgacaaagtggtcgatcgaccaaaggcaaaaaggatgaactgattgctcgcttacgggagtcgcagggttgacatgaatctggtacttgtttagtcaatcaaaccccttcaggcagggttacacgaccaaatgagtaccatgctgtacttgtcaatggctgctctgcctagatttaatacaatgtaatggcatatgtaggttgagactttgccggaccttattatactcagaatttgttaactagctgttacctgtcagtagtc

SEQ ID NO: 10771 - protein, 190 aa, Zea mays subsp. mays
  peptide (1)..(190): Ceres Seq. ID no. 12342168
  misc_feature (24)..(178): Homolog of NCBI NO: 15242782 NR Description: unknown protein; protein id: At5g63460.1 thaliana] >gi|9758287|dbj|BAB08811.1| gene_id:MLE2.9~unknown
DLLFTMPTEEGSDGGGGAGAGAGEKKSSQAPAKPGACGAAKFLAGLPSRGNFSSGSAPSNLGGFRVYVCEHSTDPPEGQVIKTDSTNILIRHLQLNKQKTEGKDVDSRTVGENNRGKRSAARSLDVNNSAKKANLGTSSGSSAYEEISGFSQHTLQSFTVERLRALLRQSGRSTKGKKDELIARLRESQG

SEQ ID NO: 10772 - protein, 185 aa, Zea mays subsp. mays
  peptide (1)..(185): Ceres Seq. ID no. 12342169
  misc_feature (19)..(173): Homolog of NCBI NO: 15242782 NR Description: unknown protein; protein id: At5g63460.1 thaliana] >gi|9758287|dbj|BAB08811.1| gene_id:MLE2.9~unknown
MPTEEGSDGGGGAGAGAGEKKSSQAPAKPGACGAAKFLAGLPSRGNFSSGSAPSNLGGFRVYVCEHSTDPPEGQVIKTDSTNILIRHLQLNKQKTEGKDVDSRTVGENNRGKRSAARSLDVNNSAKKANLGTSSGSSAYEEISGFSQHTLQSFTVERLRALLRQSGRSTKGKKDELIARLRESQG

SEQ ID NO: 10773 - protein, 100 aa, Zea mays subsp. mays
  peptide (1)..(100): Ceres Seq. ID no. 12342170
RPPIHHADRRGFRRRWRRRSRSRGEEELAGARKAWSVRRRKVPRGVAVARQLLFRLRPLQSGRVQGLRLRAQHRSPRRTSYKDGFNEYFNQASPVEQAED

SEQ ID NO: 10774 - DNA, 1273 bp, Zea mays subsp. mays
  misc_feature (1)..(1273): Ceres Seq. ID no. 12412098
  misc_feature: MA Experiment ID: 108522 Result: Down-regulated in Transcription
  misc_feature: MA Experiment 108522 PARAMETER Experiment Name: Zm_42deg_Heat_P Parameter: Age (day) Value: 8
  misc_feature: MA Experiment 108522 PARAMETER Experiment Name: Zm_42deg_Heat_P Parameter: Organism Value: Zea mays
  misc_feature: MA Experiment 108522 PARAMETER Experiment Name: Zm_42deg_Heat_P Parameter: Plant Line Value: 35A19
  misc_feature: MA Experiment 108522 PARAMETER Experiment Name: Zm_42deg_Heat_P Parameter: Temperature (deg C) Value: 42 vs. 22
  misc_feature: MA Experiment 108522 PARAMETER Experiment Name: Zm_42deg_Heat_P Parameter: Timepoint (hr) Value: 1
  misc_feature: MA Experiment 108522 PARAMETER Experiment Name: Zm_42deg_Heat_P Parameter: Tissue Value: Aerial
  misc_feature: MA Experiment ID: 108523 Result: Down-regulated in Transcription
  misc_feature: MA Experiment 108523 PARAMETER Experiment Name: Zm_42deg_Heat_P Parameter: Age (day) Value: 8
  misc_feature: MA Experiment 108523 PARAMETER Experiment Name: Zm_42deg_Heat_P Parameter: Organism Value: Zea mays
  misc_feature: MA Experiment 108523 PARAMETER Experiment Name: Zm_42deg_Heat_P Parameter: Plant Line Value: 35A19
  misc_feature: MA Experiment 108523 PARAMETER Experiment Name: Zm_42deg_Heat_P Parameter: Temperature (deg C) Value: 42 vs. 22
  misc_feature: MA Experiment 108523 PARAMETER Experiment Name: Zm_42deg_Heat_P Parameter: Timepoint (hr) Value: 6
  misc_feature: MA Experiment 108523 PARAMETER Experiment Name: Zm_42deg_Heat_P Parameter: Tissue Value: Aerial
  misc_feature: MA Experiment ID: 108529 Result: Up-regulated in Transcription
  misc_feature: MA Experiment 108529 PARAMETER Experiment Name: Zm_Imbibed_Seeds_P Parameter: Age (day) Value: 5 vs. 2
  misc_feature: MA Experiment 108529 PARAMETER Experiment Name: Zm_Imbibed_Seeds_P Parameter: Organism Value: Zea mays
  misc_feature: MA Experiment 108529 PARAMETER Experiment Name: Zm_Imbibed_Seeds_P Parameter: Plant Line Value: 35A19
  misc_feature: MA Experiment 108529 PARAMETER Experiment Name: Zm_Imbibed_Seeds_P Parameter: Tissue Value: Roots vs. Embryo
  misc_feature: MA Experiment ID: 108535 Result: Down-regulated in Transcription
  misc_feature: MA Experiment 108535 PARAMETER Experiment Name: Zm_Meristem_P Parameter: Age (day) Value: 8
  misc_feature: MA Experiment 108535 PARAMETER Experiment Name: Zm_Meristem_P Parameter: Organism Value: Zea mays
  misc_feature: MA Experiment 108535 PARAMETER Experiment Name: Zm_Meristem_P Parameter: Plant Line Value: 35A19
  misc_feature: MA Experiment 108535 PARAMETER Experiment Name: Zm_Meristem_P Parameter: Tissue Value: Root Meristem vs. Above Root Meristem
  misc_feature: MA Experiment ID: 108543 Result: Up-regulated in Transcription
  misc_feature: MA Experiment ID: 108544 Result: Down-regulated in Transcription
  misc_feature: MA Experiment ID: 108546 Result: Up-regulated in Transcription
  misc_feature: MA Experiment 108546 PARAMETER Experiment Name: Zm_Imbibed_Seeds_P Parameter: Age (day) Value: 3 vs. 2
  misc_feature: MA Experiment 108546 PARAMETER Experiment Name: Zm_Imbibed_Seeds_P Parameter: Organism Value: Zea mays
  misc_feature: MA Experiment 108546 PARAMETER Experiment Name: Zm_Imbibed_Seeds_P Parameter: Plant Line Value: 35A19
  misc_feature: MA Experiment 108546 PARAMETER Experiment Name: Zm_Imbibed_Seeds_P Parameter: Tissue Value: Roots vs. Embryo
  misc_feature: MA Experiment ID: 20000480 Result: Down-regulated in Transcription
  misc_feature: MA Experiment 20000480 PARAMETER Experiment Name: Zm_Drought_P Parameter: Age (day) Value: 11
  misc_feature: MA Experiment 20000480 PARAMETER Experiment Name: Zm_Drought_P Parameter: Organism Value: Zea mays
  misc_feature: MA Experiment 20000480 PARAMETER Experiment Name: Zm_Drought_P Parameter: Plant Line Value: 35A19
  misc_feature: MA Experiment 20000480 PARAMETER Experiment Name: Zm_Drought_P Parameter: Timepoint (hr) Value: 72
  misc_feature: MA Experiment 20000480 PARAMETER Experiment Name: Zm_Drought_P Parameter: Tissue Value: Aerial
  misc_feature: MA Experiment 20000480 PARAMETER Experiment Name: Zm_Drought_P Parameter: Treatment Value: Drought vs. No Drought
  misc_feature: MA Experiment ID: 20000492 Result: Down-regulated in Transcription
  misc_feature: MA Experiment 20000492 PARAMETER Experiment Name: Zm_Hybrid_Seed_Dev_P Parameter: DAP Value: 12
  misc_feature: MA Experiment 20000492 PARAMETER Experiment Name: Zm_Hybrid_Seed_Dev_P Parameter: Organism Value: Zea mays
  misc_feature: MA Experiment 20000492 PARAMETER Experiment Name: Zm_Hybrid_Seed_Dev_P Parameter: Plant Line Value: 35A19
  misc_feature: MA Experiment 20000492 PARAMETER Experiment Name: Zm_Hybrid_Seed_Dev_P Parameter: Tissue Value: Fert Kernel vs. Unfert Floret
  misc_feature: MA Experiment ID: 20000535 Result: Down-regulated in Transcription
  misc_feature: MA Experiment 20000535 PARAMETER Experiment Name: Zm_Hybrid_Seed_Dev_P Parameter: DAP Value: 30 vs. 12
  misc_feature: MA Experiment 20000535 PARAMETER Experiment Name: Zm_Hybrid_Seed_Dev_P Parameter: Organism Value: Zea mays
  misc_feature: MA Experiment 20000535 PARAMETER Experiment Name: Zm_Hybrid_Seed_Dev_P Parameter: Plant Line Value: 35A19
  misc_feature: MA Experiment 20000535 PARAMETER Experiment Name: Zm_Hybrid_Seed_Dev_P Parameter: Tissue Value: Embryo vs. Unfert Floret
  misc_feature: MA Experiment ID: 20001608 Result: Down-regulated in Transcription
  misc_feature: MA Experiment 20001608 PARAMETER Experiment Name: Zm_50ppm_KNO3_L-to-H_P Parameter: Age (day) Value: 21
  misc_feature: MA Experiment 20001608 PARAMETER Experiment Name: Zm_50ppm_KNO3_L-to-H_P Parameter: Organism Value: Zea mays
  misc_feature: MA Experiment 20001608 PARAMETER Experiment Name: Zm_50ppm_KNO3_L-to-H_P Parameter: Plant Line Value: 35A19
  misc_feature: MA Experiment 20001608 PARAMETER Experiment Name: Zm_50ppm_KNO3_L-to-H_P Parameter: Timepoint (hr) Value: 48
  misc_feature: MA Experiment 20001608 PARAMETER Experiment Name: Zm_50ppm_KNO3_L-to-H_P Parameter: Tissue Value: Shoots
  misc_feature: MA Experiment 20001608 PARAMETER Experiment Name: Zm_50ppm_KNO3_L-to-H_P Parameter: Treatment Value: 50ppm KNO3 vs. 50ppm KCl
aacatagtttcgtcgtggaacaagaggcggagaagcaggtcactcgaccagctaaatccctgggtgtacaagccggctgagctatggcaggcgaaggagcaggagcaccaccacccgccgcccaagaagcgcagctgcaccatggtgttcacgctcaaggagatggaggaggcgaccaacctgttcagcgaccgcaacctcatcggcaagggcggcttcggccgggtttacagaggcgtgctcaaggatggccagatcgtcgccgtcaagaagatggagctgccgacttgcaagcaggccgacggcgagcgcgagttccgggtggagatcgacatcctgagcaggctagaccaccccaacctggtcacgctcatcggctactgcgccgacggcaagcaccggttcgtggtgtacgagtacatgcccaggggcaacctccaggacatcctcaacggcattggggaggtgaggatggactggccgctgcgcctgcggatcgcgctgggagcggcgcgggcgctggcctacctgcactccagcacggccgtcggcgtccccgtcgtccacagggacttcaagtccagcaacatcctcctcaccgaccactacgaggcaaagatctcggacttcgggctcgccaagctgctgcagcaggaccaggacctgcacaccaccaccagggtgctgggcacgttcggctacttcgaccccgaatacgcgctgacagggaagctgacgctgcagagcgacgtgtacgcgttcggcgtggtgctgctgggagctgctgacggggcggcgggccatcgacctgagccaggggccgcaggagcagaacctcatcgtcggcatccaccaggtggtgggcgaccgcaagaagctgcgcaaggtggtggaccgggacatgcccaggggctcctacacgctggagtcggtgtccatgttcgccgcgctcgccgcgcgctgcgtctgcttcgacagcgccgcccgcccgcccatgcaggactgcgtcaaggagctccagttcatcatgtacgctaacatgaagatatgatcactctcgcgggtgcaaaccgcgcgtgggttttctttacttttgagacgggggcggggcatgcggacgatgctgctggattgcaagcaattgcaggtccgcagcttttgtttggttgatgaaacgaattgtctaaaaaggctttatacagttacttgctagtggtgctcgtttggtagagcttgtagctctagtcaaaccagttctactggtgatttctcc

SEQ ID NO: 10775 - protein, 345 aa, Zea mays subsp. mays
  peptide (1)..(345): Ceres Seq. ID no. 12412099
  misc_feature (2)..(264): Homolog of NCBI NO: 30102706 NR Description: At1g24030 [Arabidopsis thaliana]
  misc_feature (55)..(264): Homolog of NCBI NO: 25287587 NR Description: protein T23E23.18 [imported] - Arabidopsis >gi|9369396|gb|AAF87144.1|AC002423_9 T23E23.18 [Arabidopsis
  misc_feature (55)..(264): Homolog of NCBI NO: 15221649 NR Description: protein kinase, putative; protein id: At1g24030.1
  misc_feature (50)..(264): Homolog of NCBI NO: 8778594 NR Description: F5M15.3 [Arabidopsis thaliana]
  misc_feature (50)..(264): Homolog of NCBI NO: 15217992 NR Description: protein kinase, putative; protein id: At1g20650.1
  misc_feature (50)..(264): Homolog of NCBI NO: 11259782 NR Description: protein kinase-like - Arabidopsis thaliana
  misc_feature (50)..(264): Homolog of NCBI NO: 30679773 NR Description: protein kinase family [Arabidopsis thaliana]
  misc_feature (49)..(273): Homolog of NCBI NO: 34899302 NR Description: putative protein serine/threonine kinase [Oryza
  misc_feature (49)..(273): Homolog of NCBI NO: 34395193 NR Description: putative protein serine/threonine kinase [Oryza
  misc_feature (43)..(264): Homolog of NCBI NO: 34394036 NR Description: putative protein serine/threonine kinase BNK1
NIVSSWNKRRRSRSLDQLNPWVYKPAELWQAKEQEHHHPPPKKRSCTMVFTLKEMEEATNLFSDRNLIGKGGFGRVYRGVLKDGQIVAVKKMELPTCKQADGEREFRVEIDILSRLDHPNLVTLIGYCADGKHRFVVYEYMPRGNLQDILNGIGEVRMDWPLRLRIALGAARALAYLHSSTAVGVPVVHRDFKSSNILLTDHYEAKISDFGLAKLLQQDQDLHTTTRVLGTFGYFDPEYALTGKLTLQSDVYAFGVVLLGAADGAAGHRPEPGAAGAEPHRRHPPGGGRPQEAAQGGGPGHAQGLLHAGVGVHVRRARRALRLLRQRRPPAHAGLRQGAPVHHVR

SEQ ID NO: 10776 - protein, 298 aa, Zea mays subsp. mays
  peptide (1)..(298): Ceres Seq. ID no. 12412100
  misc_feature (1)..(217): Homolog of NCBI NO: 30102706 NR Description: At1g24030 [Arabidopsis thaliana]
  misc_feature (8)..(217): Homolog of NCBI NO: 25287587 NR Description: protein T23E23.18 [imported] - Arabidopsis >gi|9369396|gb|AAF87144.1|AC002423_9 T23E23.18 [Arabidopsis
  misc_feature (8)..(217): Homolog of NCBI NO: 15221649 NR Description: protein kinase, putative; protein id: At1g24030.1
  misc_feature (3)..(217): Homolog of NCBI NO: 8778594 NR Description: F5M15.3 [Arabidopsis thaliana]
  misc_feature (3)..(217): Homolog of NCBI NO: 15217992 NR Description: protein kinase, putative; protein id: At1g20650.1
  misc_feature (3)..(217): Homolog of NCBI NO: 11259782 NR Description: protein kinase-like - Arabidopsis thaliana
  misc_feature (3)..(217): Homolog of NCBI NO: 30679773 NR Description: protein kinase family [Arabidopsis thaliana]
  misc_feature (2)..(226): Homolog of NCBI NO: 34899302 NR Description: putative protein serine/threonine kinase [Oryza
  misc_feature (2)..(226): Homolog of NCBI NO: 34395193 NR Description: putative protein serine/threonine kinase [Oryza
  misc_feature (1)..(217): Homolog of NCBI NO: 34394036 NR Description: putative protein serine/threonine kinase BNK1
MVFTLKEMEEATNLFSDRNLIGKGGFGRVYRGVLKDGQIVAVKKMELPTCKQADGEREFRVEIDILSRLDHPNLVTLIGYCADGKHRFVVYEYMPRGNLQDILNGIGEVRMDWPLRLRIALGAARALAYLHSSTAVGVPVVHRDFKSSNILLTDHYEAKISDFGLAKLLQQDQDLHTTTRVLGTFGYFDPEYALTGKLTLQSDVYAFGVVLLGAADGAAGHRPEPGAAGAEPHRRHPPGGGRPQEAAQGGGPGHAQGLLHAGVGVHVRRARRALRLLRQRRPPAHAGLRQGAPVHHVR

SEQ ID NO: 10777 - protein, 291 aa, Zea mays subsp. mays
  peptide (1)..(291): Ceres Seq. ID no. 12412101
  misc_feature (1)..(210): Homolog of NCBI NO: 30102706 NR Description: At1g24030 [Arabidopsis thaliana]
  misc_feature (1)..(210): Homolog of NCBI NO: 25287587 NR Description: protein T23E23.18 [imported] - Arabidopsis >gi|9369396|gb|AAF87144.1|AC002423_9 T23E23.18 [Arabidopsis
  misc_feature (1)..(210): Homolog of NCBI NO: 15221649 NR Description: protein kinase, putative; protein id: At1g24030.1
  misc_feature (1)..(210): Homolog of NCBI NO: 8778594 NR Description: F5M15.3 [Arabidopsis thaliana]
  misc_feature (1)..(210): Homolog of NCBI NO: 15217992 NR Description: protein kinase, putative; protein id: At1g20650.1
  misc_feature (1)..(210): Homolog of NCBI NO: 11259782 NR Description: protein kinase-like - Arabidopsis thaliana
  misc_feature (1)..(210): Homolog of NCBI NO: 30679773 NR Description: protein kinase family [Arabidopsis thaliana]
  misc_feature (1)..(219): Homolog of NCBI NO: 34899302 NR Description: putative protein serine/threonine kinase [Oryza
  misc_feature (1)..(219): Homolog of NCBI NO: 34395193 NR Description: putative protein serine/threonine kinase [Oryza
  misc_feature (1)..(210): Homolog of NCBI NO: 34394036 NR Description: putative protein serine/threonine kinase BNK1
MEEATNLFSDRNLIGKGGFGRVYRGVLKDGQIVAVKKMELPTCKQADGEREFRVEIDILSRLDHPNLVTLIGYCADGKHRFVVYEYMPRGNLQDILNGIGEVRMDWPLRLRIALGAARALAYLHSSTAVGVPVVHRDFKSSNILLTDHYEAKISDFGLAKLLQQDQDLHTTTRVLGTFGYFDPEYALTGKLTLQSDVYAFGVVLLGAADGAAGHRPEPGAAGAEPHRRHPPGGGRPQEAAQGGGPGHAQGLLHAGVGVHVRRARRALRLLRQRRPPAHAGLRQGAPVHHVR

SEQ ID NO: 10778 - DNA, 1342 bp, Zea mays subsp. mays
  misc_feature (1)..(1342): Ceres Seq. ID no. 12412086
  misc_feature: MA Experiment ID: 108527 Result: Down-regulated in Transcription
  misc_feature: MA Experiment 108527 PARAMETER Experiment Name: Zm_5mM_NO_P Parameter: Age (day) Value: 8
  misc_feature: MA Experiment 108527 PARAMETER Experiment Name: Zm_5mM_NO_P Parameter: Organism Value: Zea mays
  misc_feature: MA Experiment 108527 PARAMETER Experiment Name: Zm_5mM_NO_P Parameter: Plant Line Value: 35A19
  misc_feature: MA Experiment 108527 PARAMETER Experiment Name: Zm_5mM_NO_P Parameter: Timepoint (hr) Value: 6
  misc_feature: MA Experiment 108527 PARAMETER Experiment Name: Zm_5mM_NO_P Parameter: Tissue Value: Aerial
  misc_feature: MA Experiment 108527 PARAMETER Experiment Name: Zm_5mM_NO_P Parameter: Treatment Value: 5mM NO vs. No Treatment
  misc_feature: MA Experiment ID: 108559 Result: Down-regulated in Transcription
  misc_feature: MA Experiment 108559 PARAMETER Experiment Name: Zm_5mM_NO_P Parameter: Age (day) Value: 8
  misc_feature: MA Experiment 108559 PARAMETER Experiment Name: Zm_5mM_NO_P Parameter: Organism Value: Zea mays
  misc_feature: MA Experiment 108559 PARAMETER Experiment Name: Zm_5mM_NO_P Parameter: Plant Line Value: 35A19
  misc_feature: MA Experiment 108559 PARAMETER Experiment Name: Zm_5mM_NO_P Parameter: Timepoint (hr) Value: 12
  misc_feature: MA Experiment 108559 PARAMETER Experiment Name: Zm_5mM_NO_P Parameter: Tissue Value: Aerial
  misc_feature: MA Experiment 108559 PARAMETER Experiment Name: Zm_5mM_NO_P Parameter: Treatment Value: 5mM NO vs. No Treatment
  misc_feature: MA Experiment ID: 20000479 Result: Down-regulated in Transcription
  misc_feature: MA Experiment 20000479 PARAMETER Experiment Name: Zm_Drought_P Parameter: Age (day) Value: 10
  misc_feature: MA Experiment 20000479 PARAMETER Experiment Name: Zm_Drought_P Parameter: Organism Value: Zea mays
  misc_feature: MA Experiment 20000479 PARAMETER Experiment Name: Zm_Drought_P Parameter: Plant Line Value: 35A19
  misc_feature: MA Experiment 20000479 PARAMETER Experiment Name: Zm_Drought_P Parameter: Timepoint (hr) Value: 48
  misc_feature: MA Experiment 20000479 PARAMETER Experiment Name: Zm_Drought_P Parameter: Tissue Value: Aerial
  misc_feature: MA Experiment 20000479 PARAMETER Experiment Name: Zm_Drought_P Parameter: Treatment Value: Drought vs. No Drought
  misc_feature: MA Experiment ID: 20000480 Result: Down-regulated in Transcription
  misc_feature: MA Experiment 20000480 PARAMETER Experiment Name: Zm_Drought_P Parameter: Age (day) Value: 11
  misc_feature: MA Experiment 20000480 PARAMETER Experiment Name: Zm_Drought_P Parameter: Organism Value: Zea mays
  misc_feature: MA Experiment 20000480 PARAMETER Experiment Name: Zm_Drought_P Parameter: Plant Line Value: 35A19
  misc_feature: MA Experiment 20000480 PARAMETER Experiment Name: Zm_Drought_P Parameter: Timepoint (hr) Value: 72
  misc_feature: MA Experiment 20000480 PARAMETER Experiment Name: Zm_Drought_P Parameter: Tissue Value: Aerial
  misc_feature: MA Experiment 20000480 PARAMETER Experiment Name: Zm_Drought_P Parameter: Treatment Value: Drought vs. No Drought
  misc_feature: MA Experiment ID: 20000535 Result: Down-regulated in Transcription
  misc_feature: MA Experiment 20000535 PARAMETER Experiment Name: Zm_Hybrid_Seed_Dev_P Parameter: DAP Value: 30 vs. 12
  misc_feature: MA Experiment 20000535 PARAMETER Experiment Name: Zm_Hybrid_Seed_Dev_P Parameter: Organism Value: Zea mays
  misc_feature: MA Experiment 20000535 PARAMETER Experiment Name: Zm_Hybrid_Seed_Dev_P Parameter: Plant Line Value: 35A19
  misc_feature: MA Experiment 20000535 PARAMETER Experiment Name: Zm_Hybrid_Seed_Dev_P Parameter: Tissue Value: Embryo vs. Unfert Floret
atcgattaatctcctcccccctcaacaaccgcgagatcttcagctaccgctctctccggtcgcgtttgcatccgcattcctcagatccagattcgagccccagccccgcttcgagatccagctagctctctatcaagcatccggcggagcgagcagcggggggctcggcgagagagaagatgaagcggaagacgcggaacaagatcatcgtatggacactggccctggctgcagtggcgattctggtgggcggcacgattgcgctggtgctcacggcggggacgtggaaggccaagataaagaagtcgcaggagaagatctgtaacaaggggtgggagtgctcggggagcaagtactgctgcaacgacaccatcaccgacttcttcaaggtgtaccagttcgagaacctcttcgccaagcgcaacacccccgtcgcgcacgccgtcgggttctgggactaccaggccttcatcaccgccgcggccctcttcgagccccaggggttctgcaccaccggcggcaagcagatgcagatgatggagctctgcgccttcctcgggcacgtcggcgccaagacttcatgtgggtacggcgtggcgaccggcgggccgacggcatgggggctgtgctacaaccacgagatgagccccgaccagacctactgcgacaagacctacacccagtacccctgcgtcgagggcgccgagtactacggccgaggcgcgattcctgtctactggaactacaactacggcgctgccggtgacgggatcaaggcggatctgctccaccacccagagtacctggagcagaacgcgacgctggcattcatggcggcgatgtggcggtggatgacgccgatcaagaagagccagccgtcggcgcacgacgccttcgtgggcaactggaagccgaccaagaacgacacgctcagcaaacgcctgcctgggttcggcgccaccatgaacatactctacggcgagtcgatctgcggcaagggatacgtcgacgccatgaacgttataatctcgcactaccagtattaccttgacctcatgggcgtcggccgtgagcactctggcgacaaccgtgattgcgccgagcaggcaccgttcaacccctccagcccgacggatgaccagaagcagcagcaatcaggaagctaagacggacggactcattgcgccattgccactgatcaagcttccacagcgctagattgagctacagattcttcaggatgcgtgaagctgcatgcatcgtgttgatgttgttttgaatagactgtatgtactgtctatgtgaattgcgagatttgtggttatttactaccatgttgtcc

SEQ ID NO: 10779 - protein, 328 aa, Zea mays subsp. mays
  peptide (1)..(328): Ceres Seq. ID no. 12412087
  misc_feature (15)..(320): Homolog of NCBI NO: 27817867 NR Description: OJ1081_B12.16 [Oryza sativa (japonica
  misc_feature (15)..(316): Homolog of NCBI NO: 15221283 NR Description: glycosyl hydrolase family 19 (chitinase); protein At1g05850.1, supported by cDNA: gi_12083323, supported by cDNA: supported by cDNA: gi_17226328, supported by cDNA: gi_21280934
  misc_feature (11)..(316): Homolog of NCBI NO: 15228911 NR Description: glycosyl hydrolase family 19 (chitinase); protein At3g16920.1, supported by cDNA: gi_15724261, supported by cDNA: [Arabidopsis thaliana] >gi|7670022|dbj|BAA94976.1| basic
  misc_feature (48)..(318): Homolog of NCBI NO: 17932710 NR Description: putative chitinase [Musa acuminata]
  misc_feature (73)..(312): Homolog of NCBI NO: 7798632 NR Description: class I chitinase [Arabis holboellii]
  misc_feature (43)..(319): Homolog of NCBI NO: 21780274 NR Description: chitinase KBchit5-3-1 [Leucaena leucocephala]
  misc_feature (43)..(317): Homolog of NCBI NO: 1705807 NR Description: Endochitinase A2 precursor
  misc_feature (74)..(312): Homolog of NCBI NO: 17932712 NR Description: putative chitinase [Musa acuminata]
  misc_feature (3)..(315): Homolog of NCBI NO: 116347 NR Description: ENDOCHITINASE PRECURSOR >gi|169331|gb|AAA33756.1|
  misc_feature (53)..(319): Homolog of NCBI NO: 3334147 NR Description: ENDOCHITINASE 1 PRECURSOR >gi|7435367|pir||T10802
MKRKTRNKIIVWTLALAAVAILVGGTIALVLTAGTWKAKIKKSQEKICNKGWECSGSKYCCNDTITDFFKVYQFENLFAKRNTPVAHAVGFWDYQAFITAAALFEPQGFCTTGGKQMQMMELCAFLGHVGAKTSCGYGVATGGPTAWGLCYNHEMSPDQTYCDKTYTQYPCVEGAEYYGRGAIPVYWNYNYGAAGDGIKADLLHHPEYLEQNATLAFMAAMWRWMTPIKKSQPSAHDAFVGNWKPTKNDTLSKRLPGFGATMNILYGESICGKGYVDAMNVIISHYQYYLDLMGVGREHSGDNRDCAEQAPFNPSSPTDDQKQQQSGS

SEQ ID NO: 10780 - protein, 212 aa, Zea mays subsp. mays
  peptide (1)..(212): Ceres Seq. ID no. 12412088
  misc_feature (1)..(204): Homolog of NCBI NO: 27817867 NR Description: OJ1081_B12.16 [Oryza sativa (japonica
  misc_feature (1)..(200): Homolog of NCBI NO: 15221283 NR Description: glycosyl hydrolase family 19 (chitinase); protein At1g05850.1, supported by cDNA: gi_12083323, supported by cDNA: supported by cDNA: gi_17226328, supported by cDNA: gi_21280934
  misc_feature (1)..(200): Homolog of NCBI NO: 15228911 NR Description: glycosyl hydrolase family 19 (chitinase); protein At3g16920.1, supported by cDNA: gi_15724261, supported by cDNA: [Arabidopsis thaliana] >gi|7670022|dbj|BAA94976.1| basic
  misc_feature (1)..(202): Homolog of NCBI NO: 17932710 NR Description: putative chitinase [Musa acuminata]
  misc_feature (1)..(196): Homolog of NCBI NO: 7798632 NR Description: class I chitinase [Arabis holboellii]
  misc_feature (1)..(203): Homolog of NCBI NO: 21780274 NR Description: chitinase KBchit5-3-1 [Leucaena leucocephala]
  misc_feature (1)..(201): Homolog of NCBI NO: 1705807 NR Description: Endochitinase A2 precursor
  misc_feature (1)..(196): Homolog of NCBI NO: 17932712 NR Description: putative chitinase [Musa acuminata]
  misc_feature (1)..(199): Homolog of NCBI NO: 116347 NR Description: ENDOCHITINASE PRECURSOR >gi|169331|gb|AAA33756.1|
  misc_feature (1)..(203): Homolog of NCBI NO: 3334147 NR Description: ENDOCHITINASE 1 PRECURSOR >gi|7435367|pir||T10802
MQMMELCAFLGHVGAKTSCGYGVATGGPTAWGLCYNHEMSPDQTYCDKTYTQYPCVEGAEYYGRGAIPVYWNYNYGAAGDGIKADLLHHPEYLEQNATLAFMAAMWRWMTPIKKSQPSAHDAFVGNWKPTKNDTLSKRLPGFGATMNILYGESICGKGYVDAMNVIISHYQYYLDLMGVGREHSGDNRDCAEQAPFNPSSPTDDQKQQQSGS

SEQ ID NO: 10781 - protein, 210 aa, Zea mays subsp. mays
  peptide (1)..(210): Ceres Seq. ID no. 12412089
  misc_feature (1)..(202): Homolog of NCBI NO: 27817867 NR Description: OJ1081_B12.16 [Oryza sativa (japonica
  misc_feature (1)..(198): Homolog of NCBI NO: 15221283 NR Description: glycosyl hydrolase family 19 (chitinase); protein At1g05850.1, supported by cDNA: gi_12083323, supported by cDNA: supported by cDNA: gi_17226328, supported by cDNA: gi_21280934
  misc_feature (1)..(198): Homolog of NCBI NO: 15228911 NR Description: glycosyl hydrolase family 19 (chitinase); protein At3g16920.1, supported by cDNA: gi_15724261, supported by cDNA: [Arabidopsis thaliana] >gi|7670022|dbj|BAA94976.1| basic
  misc_feature (1)..(200): Homolog of NCBI NO: 17932710 NR Description: putative chitinase [Musa acuminata]
  misc_feature (1)..(194): Homolog of NCBI NO: 7798632 NR Description: class I chitinase [Arabis holboellii]
  misc_feature (1)..(201): Homolog of NCBI NO: 21780274 NR Description: chitinase KBchit5-3-1 [Leucaena leucocephala]
  misc_feature (1)..(199): Homolog of NCBI NO: 1705807 NR Description: Endochitinase A2 precursor
  misc_feature (1)..(194): Homolog of NCBI NO: 17932712 NR Description: putative chitinase [Musa acuminata]
  misc_feature (1)..(197): Homolog of NCBI NO: 116347 NR Description: ENDOCHITINASE PRECURSOR >gi|169331|gb|AAA33756.1|
  misc_feature (1)..(201): Homolog of NCBI NO: 3334147 NR Description: ENDOCHITINASE 1 PRECURSOR >gi|7435367|pir||T10802
MMELCAFLGHVGAKTSCGYGVATGGPTAWGLCYNHEMSPDQTYCDKTYTQYPCVEGAEYYGRGAIPVYWNYNYGAAGDGIKADLLHHPEYLEQNATLAFMAAMWRWMTPIKKSQPSAHDAFVGNWKPTKNDTLSKRLPGFGATMNILYGESICGKGYVDAMNVIISHYQYYLDLMGVGREHSGDNRDCAEQAPFNPSSPTDDQKQQQSGS

SEQ ID NO: 10782 - DNA, 935 bp, Zea mays subsp. mays
  misc_feature (1)..(935): Ceres Seq. ID no. 12414433
  misc_feature: MA Experiment ID: 108535 Result: Up-regulated in Transcription
  misc_feature: MA Experiment 108535 PARAMETER Experiment Name: Zm_Meristem_P Parameter: Age (day) Value: 8
  misc_feature: MA Experiment 108535 PARAMETER Experiment Name: Zm_Meristem_P Parameter: Organism Value: Zea mays
  misc_feature: MA Experiment 108535 PARAMETER Experiment Name: Zm_Meristem_P Parameter: Plant Line Value: 35A19
  misc_feature: MA Experiment 108535 PARAMETER Experiment Name: Zm_Meristem_P Parameter: Tissue Value: Root Meristem vs. Above Root Meristem
  misc_feature: MA Experiment ID: 20000487 Result: Up-regulated in Transcription
  misc_feature: MA Experiment 20000487 PARAMETER Experiment Name: Zm_50mM_NH4NO3_L_to_H_P Parameter: Organism Value: Zea mays
  misc_feature: MA Experiment 20000487 PARAMETER Experiment Name: Zm_50mM_NH4NO3_L_to_H_P Parameter: Timepoint (hr) Value: 4
  misc_feature: MA Experiment 20000487 PARAMETER Experiment Name: Zm_50mM_NH4NO3_L_to_H_P Parameter: Tissue Value: Leaves
  misc_feature: MA Experiment 20000487 PARAMETER Experiment Name: Zm_50mM_NH4NO3_L_to_H_P Parameter: Treatment Value: 50mM NH4NO3 vs. 100mM Mannitol
  misc_feature: MA Experiment ID: 20000488 Result: Up-regulated in Transcription
  misc_feature: MA Experiment 20000488 PARAMETER Experiment Name: Zm_50mM_NH4NO3_L_to_H_P Parameter: Organism Value: Zea mays
  misc_feature: MA Experiment 20000488 PARAMETER Experiment Name: Zm_50mM_NH4NO3_L_to_H_P Parameter: Timepoint (hr) Value: 8
  misc_feature: MA Experiment 20000488 PARAMETER Experiment Name: Zm_50mM_NH4NO3_L_to_H_P Parameter: Tissue Value: Leaves
  misc_feature: MA Experiment 20000488 PARAMETER Experiment Name: Zm_50mM_NH4NO3_L_to_H_P Parameter: Treatment Value: 50mM NH4NO3 vs. 100mM Mannitol
  misc_feature: MA Experiment ID: 20000492 Result: Up-regulated in Transcription
  misc_feature: MA Experiment 20000492 PARAMETER Experiment Name: Zm_Hybrid_Seed_Dev_P Parameter: DAP Value: 12
  misc_feature: MA Experiment 20000492 PARAMETER Experiment Name: Zm_Hybrid_Seed_Dev_P Parameter: Organism Value: Zea mays
  misc_feature: MA Experiment 20000492 PARAMETER Experiment Name: Zm_Hybrid_Seed_Dev_P Parameter: Plant Line Value: 35A19
  misc_feature: MA Experiment 20000492 PARAMETER Experiment Name: Zm_Hybrid_Seed_Dev_P Parameter: Tissue Value: Fert Kernel vs. Unfert Floret
  misc_feature: MA Experiment ID: 20000626 Result: Up-regulated in Transcription
  misc_feature: MA Experiment 20000626 PARAMETER Experiment Name: Zm_Herbicide-Treatments_P Parameter: Timepoint (hr) Value: 12
  misc_feature: MA Experiment 20000626 PARAMETER Experiment Name: Zm_Herbicide-Treatments_P Parameter: Tissue Value: Aerial
  misc_feature: MA Experiment 20000626 PARAMETER Experiment Name: Zm_Herbicide-Treatments_P Parameter: Treatment Value: Roundup vs. No Treatment
agtttatgggctggaatgggccgctcaaactggcccgttacgtgaatttggcggggctgccgctgggatccgagacgtggtggctgcacagcgacgtccgtgggagcgggcgggcgactgcaggcagagggtttcgtccgaaccctagtgtcctccacacgccgtcgccatggccgccgcccgcgccgccctccgcctgcagcgccagtgcctcgccgccaacccctttctcttctccgggcatggcctccgctaccgcaagcttgaggtcatcctcaccacgactattgataagctggggaaagcaggcgaggtggtcaaggtggcgcctggccacttccgcaaccaccttatgcccaagatgctcgcagtcccgaacctggacaaattcgccatactaatccgagagcagcgcaagctctatcaacgcgaagaggaggtcgcggtgaaacaagtcacggagaaagatgatgatgcacggctacaggaagaaagaatgaagcagtaccaaacggcagcaaagcggctagataacgcactcttggtgttgaggaggttcatctcgactggaaacgagctgcgtactcctgtaacaaaagacgaaattgtttccgaggtggcgaggcagctcaacatcaacatccatccggagaacctgcatctgcagtcacctttggcgtcgctcggcgaatttgagttgcccctccggttaccgcagaacataccgtgcccagaaggtaagctccagtggactctgaaggtgaagatcaggagaaaatgagcgcaggaactggggaagtttcttttgcccccccacaatctggtgtatggtaccaaaccattgttagctccgaaacaatggtaccaaaccattggttatgcaagtttagctccgaaacatttttttctgatgtataataaaagagtaaggttgc

SEQ ID NO: 10783 - protein, 203 aa, Zea mays subsp. mays
  peptide (1)..(203): Ceres Seq. ID no. 12414434
  misc_feature (32)..(81): Pfam Name: Ribosomal protein L9, N-terminal domain Pfam Description: Ribosomal protein L9, N-terminal domain
  misc_feature (18)..(201): Homolog of NCBI NO: 15237342 NR Description: putative protein; protein id: At5g53070.1 thaliana] >gi|8809596|dbj|BAA97147.1| contains similarity to protein L9~gene_id:MNB8.13 [Arabidopsis thaliana]
  misc_feature (30)..(99): Homolog of NCBI NO: 22299956 NR Description: 50S ribosomal protein L9 [Thermosynechococcus BP- 1] >gi|133034|sp|P25904|RL9_SYNEL 50S ribosomal protein L9
MAAARAALRLQRQCLAANPFLFSGHGLRYRKLEVILTTTIDKLGKAGEVVKVAPGHFRNHLMPKMLAVPNLDKFAILIREQRKLYQREEEVAVKQVTEKDDDARLQEERMKQYQTAAKRLDNALLVLRRFISTGNELRTPVTKDEIVSEVARQLNINIHPENLHLQSPLASLGEFELPLRLPQNIPCPEGKLQWTLKVKIRRK

SEQ ID NO: 10784 - protein, 142 aa, Zea mays subsp. mays
  peptide (1)..(142): Ceres Seq. ID no. 12414435
  misc_feature (1)..(140): Homolog of NCBI NO: 15237342 NR Description: putative protein; protein id: At5g53070.1 thaliana] >gi|8809596|dbj|BAA97147.1| contains similarity to protein L9~gene_id:MNB8.13 [Arabidopsis thaliana]
  misc_feature (1)..(38): Homolog of NCBI NO: 22299956 NR Description: 50S ribosomal protein L9 [Thermosynechococcus BP- 1] >gi|133034|sp|P25904|RL9_SYNEL 50S ribosomal protein L9
MPKMLAVPNLDKFAILIREQRKLYQREEEVAVKQVTEKDDDARLQEERMKQYQTAAKRLDNALLVLRRFISTGNELRTPVTKDEIVSEVARQLNINIHPENLHLQSPLASLGEFELPLRLPQNIPCPEGKLQWTLKVKIRRK

SEQ ID NO: 10785 - protein, 139 aa, Zea mays subsp. mays
  peptide (1)..(139): Ceres Seq. ID no. 12414436
  misc_feature (1)..(137): Homolog of NCBI NO: 15237342 NR Description: putative protein; protein id: At5g53070.1 thaliana] >gi|8809596|dbj|BAA97147.1| contains similarity to protein L9~gene_id:MNB8.13 [Arabidopsis thaliana]
  misc_feature (1)..(35): Homolog of NCBI NO: 22299956 NR Description: 50S ribosomal protein L9 [Thermosynechococcus BP- 1] >gi|133034|sp|P25904|RL9_SYNEL 50S ribosomal protein L9
MLAVPNLDKFAILIREQRKLYQREEEVAVKQVTEKDDDARLQEERMKQYQTAAKRLDNALLVLRRFISTGNELRTPVTKDEIVSEVARQLNINIHPENLHLQSPLASLGEFELPLRLPQNIPCPEGKLQWTLKVKIRRK

SEQ ID NO: 10786 - DNA, 1599 bp, Zea mays subsp. mays
  misc_feature (1)..(1599): Ceres Seq. ID no. 12340954
  misc_feature: MA Experiment ID: 108522 Result: Down-regulated in Transcription
  misc_feature: MA Experiment 108522 PARAMETER Experiment Name: Zm_42deg_Heat_P Parameter: Age (day) Value: 8
  misc_feature: MA Experiment 108522 PARAMETER Experiment Name: Zm_42deg_Heat_P Parameter: Organism Value: Zea mays
  misc_feature: MA Experiment 108522 PARAMETER Experiment Name: Zm_42deg_Heat_P Parameter: Plant Line Value: 35A19
  misc_feature: MA Experiment 108522 PARAMETER Experiment Name: Zm_42deg_Heat_P Parameter: Temperature (deg C) Value: 42 vs. 22
  misc_feature: MA Experiment 108522 PARAMETER Experiment Name: Zm_42deg_Heat_P Parameter: Timepoint (hr) Value: 1
  misc_feature: MA Experiment 108522 PARAMETER Experiment Name: Zm_42deg_Heat_P Parameter: Tissue Value: Aerial
  misc_feature: MA Experiment ID: 108530 Result: Down-regulated in Transcription
  misc_feature: MA Experiment 108530 PARAMETER Experiment Name: Zm_Imbibed_Seeds_P Parameter: Age (day) Value: 6 vs. 2
  misc_feature: MA Experiment 108530 PARAMETER Experiment Name: Zm_Imbibed_Seeds_P Parameter: Organism Value: Zea mays
  misc_feature: MA Experiment 108530 PARAMETER Experiment Name: Zm_Imbibed_Seeds_P Parameter: Plant Line Value: 35A19
  misc_feature: MA Experiment 108530 PARAMETER Experiment Name: Zm_Imbibed_Seeds_P Parameter: Tissue Value: Aerial vs. Embryo
  misc_feature: MA Experiment ID: 108535 Result: Up-regulated in Transcription
  misc_feature: MA Experiment 108535 PARAMETER Experiment Name: Zm_Meristem_P Parameter: Age (day) Value: 8
  misc_feature: MA Experiment 108535 PARAMETER Experiment Name: Zm_Meristem_P Parameter: Organism Value: Zea mays
  misc_feature: MA Experiment 108535 PARAMETER Experiment Name: Zm_Meristem_P Parameter: Plant Line Value: 35A19
  misc_feature: MA Experiment 108535 PARAMETER Experiment Name: Zm_Meristem_P Parameter: Tissue Value: Root Meristem vs. Above Root Meristem
  misc_feature: MA Experiment ID: 108544 Result: Down-regulated in Transcription
  misc_feature: MA Experiment ID: 20000480 Result: Down-regulated in Transcription
  misc_feature: MA Experiment 20000480 PARAMETER Experiment Name: Zm_Drought_P Parameter: Age (day) Value: 11
  misc_feature: MA Experiment 20000480 PARAMETER Experiment Name: Zm_Drought_P Parameter: Organism Value: Zea mays
  misc_feature: MA Experiment 20000480 PARAMETER Experiment Name: Zm_Drought_P Parameter: Plant Line Value: 35A19
  misc_feature: MA Experiment 20000480 PARAMETER Experiment Name: Zm_Drought_P Parameter: Timepoint (hr) Value: 72
  misc_feature: MA Experiment 20000480 PARAMETER Experiment Name: Zm_Drought_P Parameter: Tissue Value: Aerial
  misc_feature: MA Experiment 20000480 PARAMETER Experiment Name: Zm_Drought_P Parameter: Treatment Value: Drought vs. No Drought
  misc_feature: MA Experiment ID: 20000487 Result: Up-regulated in Transcription
  misc_feature: MA Experiment 20000487 PARAMETER Experiment Name: Zm_50mM_NH4NO3_L_to_H_P Parameter: Organism Value: Zea mays
  misc_feature: MA Experiment 20000487 PARAMETER Experiment Name: Zm_50mM_NH4NO3_L_to_H_P Parameter: Timepoint (hr) Value: 4
  misc_feature: MA Experiment 20000487 PARAMETER Experiment Name: Zm_50mM_NH4NO3_L_to_H_P Parameter: Tissue Value: Leaves
  misc_feature: MA Experiment 20000487 PARAMETER Experiment Name: Zm_50mM_NH4NO3_L_to_H_P Parameter: Treatment Value: 50mM NH4NO3 vs. 100mM Mannitol
  misc_feature: MA Experiment ID: 20000488 Result: Up-regulated in Transcription
  misc_feature: MA Experiment 20000488 PARAMETER Experiment Name: Zm_50mM_NH4NO3_L_to_H_P Parameter: Organism Value: Zea mays
  misc_feature: MA Experiment 20000488 PARAMETER Experiment Name: Zm_50mM_NH4NO3_L_to_H_P Parameter: Timepoint (hr) Value: 8
  misc_feature: MA Experiment 20000488 PARAMETER Experiment Name: Zm_50mM_NH4NO3_L_to_H_P Parameter: Tissue Value: Leaves
  misc_feature: MA Experiment 20000488 PARAMETER Experiment Name: Zm_50mM_NH4NO3_L_to_H_P Parameter: Treatment Value: 50mM NH4NO3 vs. 100mM Mannitol
  misc_feature: MA Experiment ID: 20000626 Result: Up-regulated in Transcription
  misc_feature: MA Experiment 20000626 PARAMETER Experiment Name: Zm_Herbicide-Treatments_P Parameter: Timepoint (hr) Value: 12
  misc_feature: MA Experiment 20000626 PARAMETER Experiment Name: Zm_Herbicide-Treatments_P Parameter: Tissue Value: Aerial
  misc_feature: MA Experiment 20000626 PARAMETER Experiment Name: Zm_Herbicide-Treatments_P Parameter: Treatment Value: Roundup vs. No Treatment
  misc_feature: MA Experiment ID: 20001605 Result: Up-regulated in Transcription
  misc_feature: MA Experiment 20001605 PARAMETER Experiment Name: Zm_50ppm_KNO3_L-to-H_P Parameter: Age (day) Value: 19
  misc_feature: MA Experiment 20001605 PARAMETER Experiment Name: Zm_50ppm_KNO3_L-to-H_P Parameter: Organism Value: Zea mays
  misc_feature: MA Experiment 20001605 PARAMETER Experiment Name: Zm_50ppm_KNO3_L-to-H_P Parameter: Plant Line Value: 35A19
  misc_feature: MA Experiment 20001605 PARAMETER Experiment Name: Zm_50ppm_KNO3_L-to-H_P Parameter: Timepoint (hr) Value: 4
  misc_feature: MA Experiment 20001605 PARAMETER Experiment Name: Zm_50ppm_KNO3_L-to-H_P Parameter: Tissue Value: Shoots
  misc_feature: MA Experiment 20001605 PARAMETER Experiment Name: Zm_50ppm_KNO3_L-to-H_P Parameter: Treatment Value: 50ppm KNO3 vs. 50ppm KCl
  misc_feature: MA Experiment ID: 20001606 Result: Up-regulated in Transcription
  misc_feature: MA Experiment 20001606 PARAMETER Experiment Name: Zm_50ppm_KNO3_L-to-H_P Parameter: Age (day) Value: 19
  misc_feature: MA Experiment 20001606 PARAMETER Experiment Name: Zm_50ppm_KNO3_L-to-H_P Parameter: Organism Value: Zea mays
  misc_feature: MA Experiment 20001606 PARAMETER Experiment Name: Zm_50ppm_KNO3_L-to-H_P Parameter: Plant Line Value: 35A19
  misc_feature: MA Experiment 20001606 PARAMETER Experiment Name: Zm_50ppm_KNO3_L-to-H_P Parameter: Timepoint (hr) Value: 8
  misc_feature: MA Experiment 20001606 PARAMETER Experiment Name: Zm_50ppm_KNO3_L-to-H_P Parameter: Tissue Value: Shoots
  misc_feature: MA Experiment 20001606 PARAMETER Experiment Name: Zm_50ppm_KNO3_L-to-H_P Parameter: Treatment Value: 50ppm KNO3 vs. 50ppm KCl
  misc_feature: MA Experiment ID: 20001612 Result: Up-regulated in Transcription
  misc_feature: MA Experiment 20001612 PARAMETER Experiment Name: Zm_50ppm_KNO3_L-to-H_P Parameter: Age (day) Value: 19
  misc_feature: MA Experiment 20001612 PARAMETER Experiment Name: Zm_50ppm_KNO3_L-to-H_P Parameter: Organism Value: Zea mays
  misc_feature: MA Experiment 20001612 PARAMETER Experiment Name: Zm_50ppm_KNO3_L-to-H_P Parameter: Plant Line Value: 35A19
  misc_feature: MA Experiment 20001612 PARAMETER Experiment Name: Zm_50ppm_KNO3_L-to-H_P Parameter: Timepoint (hr) Value: 8
  misc_feature: MA Experiment 20001612 PARAMETER Experiment Name: Zm_50ppm_KNO3_L-to-H_P Parameter: Tissue Value: Roots
  misc_feature: MA Experiment 20001612 PARAMETER Experiment Name: Zm_50ppm_KNO3_L-to-H_P Parameter: Treatment Value: 50ppm KNO3 vs. 50ppm KCl
aggtcgatcactcgctgcgcgcctccacccttttccaccccgccgccgaagccaccgtgccgctagccttccccgccgccgcaaaatggccgcctccgcgcgacccctggttaccgtgagggccctggagggcgacatggccacggactccgccggtgttccgctggcggacgtcctccgcgcaccgatccgcccggacatcgttcgcttcgtccacaagctcctgtcctgcaacagccgccaaccctatgcggtgtcgcgtcgcgccggacaccagacctccgcggagtcctggggcacggggcgtgcggtatcccgtatcccccgcgttcctggcggtggtacccaccgcgccggccagggagcgttcggcaacatgtgtcgtggtggacgcatgttcgcgcccaccaagatctggcgccgctggcaccgtcgcgtcaacatacaccttcgccgtgtcgccatcgcctccgcactctccgccaccgccgttccgtcccttgttctcgcacgtggccaccgcgtggagtctgtgcccgagctcccgctggtcgtttcggactccgcggagtccattgagaagacagcccaggccatcaatatcctcaaacagctcggtgcctacgccgatgctgagaaggccaaggattctgttggcatccgccccggcaagggcaagatgcgcaaccgccgctacatcaatcgtaagggacccctcgttgtctacggcactgagggctctaaggtcgtcaaggcctttcgcaacctccctggcgttgatgttgccaatgtcgagcgcctcaacctgctcgatctcgcccctggtggccaccttggccggttcgtcatctggaccgagtgcgcattcaagaagctggatgaggtgtacggtaccttcaacgcaccatcagcgaagaagaagggtttcgtgctcccgaggcccaagatggcaaacgctgacctatccaggcttatcaactctgacgaggtgcaatctgtagtgaagcccatcaataaggatgtgaagcgtagggagcctaggaagaacccactgaataatatggctgcagtgctcaagctgaacccgtacctcggtactgcacgcaagatggcagccctagccgaggcagcgcgtgtcaaggccaggaagcagaagcttgattccaagaggaccaagctcagcccagaggaggcttctaaggtcaaggctgctggaaaggcgtggtacaagaccatggtttcagacagcgactacacagagtttgagaacttcaccaagtggcttggtgttacacagtgattgtctggtccaacccttattgttttgccaattcagagattatgattttgatcgctgttgtcaaatatcctttgttattggtatattctgacattagttttggctttggtagtttttttttaccgctggatgtttacttccagacacctattacaccttttatggaaacgaagtatatcgattctcaacactcaccgtgcttctgtttttggcagtattggttactcgagtattcatgttcagttgtattagtgtatgcattttctttgtgcccttctgtttgttgggtatataatagt

SEQ ID NO: 10787 - protein, 432 aa, Zea mays subsp. mays
  peptide (1)..(432): Ceres Seq. ID no. 12340955
  misc_feature (53)..(295): Pfam Name: Ribosomal protein L4/L1 family Pfam Description: Ribosomal protein L4/L1 family
  misc_feature (29)..(432): Homolog of NCBI NO: 34897236 NR Description: putative 60S ribosomal protein L1 [Oryza sativa
  misc_feature (29)..(432): Homolog of NCBI NO: 34393487 NR Description: putative 60S ribosomal protein L4/L1 [Oryza
  misc_feature (30)..(432): Homolog of NCBI NO: 15232723 NR Description: putative 60S ribosomal protein L1; protein id: supported by cDNA: 39947., supported by cDNA: gi_15982714 thaliana] >gi|17369604|sp|Q9SF40|RL4B_ARATH 60S putative 60S
  misc_feature (30)..(432): Homolog of NCBI NO: 17367847 NR Description: 60S ribosomal protein L4 (L1)
  misc_feature (30)..(432): Homolog of NCBI NO: 21593543 NR Description: 60S ribosomal protein L4-B (L1) [Arabidopsis
  misc_feature (30)..(432): Homolog of NCBI NO: 15242558 NR Description: 60S ribosomal protein - like; protein id: supported by cDNA: gi_13605830, supported by cDNA: gi_15450797, by cDNA: gi_16649032, supported by cDNA: gi_17064751, supported
  misc_feature (30)..(432): Homolog of NCBI NO: 26450328 NR Description: putative 60S ribosomal protein [Arabidopsis
  misc_feature (126)..(432): Homolog of NCBI NO: 13605831 NR Description: AT5g02870/F9G14_180 [Arabidopsis thaliana]
  misc_feature (32)..(399): Homolog of NCBI NO: 1350686 NR Description: 60S RIBOSOMAL PROTEIN L4 (L1)
  misc_feature (78)..(432): Homolog of NCBI NO: 6441068 NR Description: 60S ribosomal protein L4 [Chlamydomonas sp. HS-5]
GRSLAARLHPFPPRRRSHRAASLPRRRKMAASARPLVTVRALEGDMATDSAGVPLADVLRAPIRPDIVRFVHKLLSCNSRQPYAVSRRAGHQTSAESWGTGRAVSRIPRVPGGGTHRAGQGAFGNMCRGGRMFAPTKIWRRWHRRVNIHLRRVAIASALSATAVPSLVLARGHRVESVPELPLVVSDSAESIEKTAQAINILKQLGAYADAEKAKDSVGIRPGKGKMRNRRYINRKGPLVVYGTEGSKVVKAFRNLPGVDVANVERLNLLDLAPGGHLGRFVIWTECAFKKLDEVYGTFNAPSAKKKGFVLPRPKMANADLSRLINSDEVQSVVKPINKDVKRREPRKNPLNNMAAVLKLNPYLGTARKMAALAEAARVKARKQKLDSKRTKLSPEEASKVKAAGKAWYKTMVSDSDYTEFENFTKWLGVTQ

SEQ ID NO: 10788 - protein, 404 aa, Zea mays subsp. mays
  peptide (1)..(404): Ceres Seq. ID no. 12340956
  misc_feature (25)..(267): Pfam Name: Ribosomal protein L4/L1 family Pfam Description: Ribosomal protein L4/L1 family
  misc_feature (1)..(404): Homolog of NCBI NO: 34897236 NR Description: putative 60S ribosomal protein L1 [Oryza sativa
  misc_feature (1)..(404): Homolog of NCBI NO: 34393487 NR Description: putative 60S ribosomal protein L4/L1 [Oryza
  misc_feature (2)..(404): Homolog of NCBI NO: 15232723 NR Description: putative 60S ribosomal protein L1; protein id: supported by cDNA: 39947., supported by cDNA: gi_15982714 thaliana] >gi|17369604|sp|Q9SF40|RL4B_ARATH 60S putative 60S
  misc_feature (2)..(404): Homolog of NCBI NO: 17367847 NR Description: 60S ribosomal protein L4 (L1)
  misc_feature (2)..(404): Homolog of NCBI NO: 21593543 NR Description: 60S ribosomal protein L4-B (L1) [Arabidopsis
  misc_feature (2)..(404): Homolog of NCBI NO: 15242558 NR Description: 60S ribosomal protein - like; protein id: supported by cDNA: gi_13605830, supported by cDNA: gi_15450797, by cDNA: gi_16649032, supported by cDNA: gi_17064751, supported
  misc_feature (2)..(404): Homolog of NCBI NO: 26450328 NR Description: putative 60S ribosomal protein [Arabidopsis
  misc_feature (98)..(404): Homolog of NCBI NO: 13605831 NR Description: AT5g02870/F9G14_180 [Arabidopsis thaliana]
  misc_feature (4)..(371): Homolog of NCBI NO: 1350686 NR Description: 60S RIBOSOMAL PROTEIN L4 (L1)
  misc_feature (50)..(404): Homolog of NCBI NO: 6441068 NR Description: 60S ribosomal protein L4 [Chlamydomonas sp. HS-5]
MAASARPLVTVRALEGDMATDSAGVPLADVLRAPIRPDIVRFVHKLLSCNSRQPYAVSRRAGHQTSAESWGTGRAVSRIPRVPGGGTHRAGQGAFGNMCRGGRMFAPTKIWRRWHRRVNIHLRRVAIASALSATAVPSLVLARGHRVESVPELPLVVSDSAESIEKTAQAINILKQLGAYADAEKAKDSVGIRPGKGKMRNRRYINRKGPLVVYGTEGSKVVKAFRNLPGVDVANVERLNLLDLAPGGHLGRFVIWTECAFKKLDEVYGTFNAPSAKKKGFVLPRPKMANADLSRLINSDEVQSVVKPINKDVKRREPRKNPLNNMAAVLKLNPYLGTARKMAALAEAARVKARKQKLDSKRTKLSPEEASKVKAAGKAWYKTMVSDSDYTEFENFTKWLGVTQ

SEQ ID NO: 10789 - protein, 387 aa, Zea mays subsp. mays
  peptide (1)..(387): Ceres Seq. ID no. 12340957
  misc_feature (8)..(250): Pfam Name: Ribosomal protein L4/L1 family Pfam Description: Ribosomal protein L4/L1 family
  misc_feature (1)..(387): Homolog of NCBI NO: 34393487 NR Description: putative 60S ribosomal protein L4/L1 [Oryza
  misc_feature (1)..(387): Homolog of NCBI NO: 15232723 NR Description: putative 60S ribosomal protein L1; protein id: supported by cDNA: 39947., supported by cDNA: gi_15982714 thaliana] >gi|17369604|sp|Q9SF40|RL4B_ARATH 60S putative 60S
  misc_feature (1)..(387): Homolog of NCBI NO: 17367847 NR Description: 60S ribosomal protein L4 (L1)
  misc_feature (1)..(387): Homolog of NCBI NO: 21593543 NR Description: 60S ribosomal protein L4-B (L1) [Arabidopsis
  misc_feature (1)..(387): Homolog of NCBI NO: 15242558 NR Description: 60S ribosomal protein - like; protein id: supported by cDNA: gi_13605830, supported by cDNA: gi_15450797, by cDNA: gi_16649032, supported by cDNA: gi_17064751, supported
  misc_feature (1)..(387): Homolog of NCBI NO: 34897236 NR Description: putative 60S ribosomal protein L1 [Oryza sativa
  misc_feature (1)..(387): Homolog of NCBI NO: 26450328 NR Description: putative 60S ribosomal protein [Arabidopsis
  misc_feature (81)..(387): Homolog of NCBI NO: 13605831 NR Description: AT5g02870/F9G14_180 [Arabidopsis thaliana]
  misc_feature (1)..(354): Homolog of NCBI NO: 1350686 NR Description: 60S RIBOSOMAL PROTEIN L4 (L1)
  misc_feature (33)..(387): Homolog of NCBI NO: 6441068 NR Description: 60S ribosomal protein L4 [Chlamydomonas sp. HS-5]
MATDSAGVPLADVLRAPIRPDIVRFVHKLLSCNSRQPYAVSRRAGHQTSAESWGTGRAVSRIPRVPGGGTHRAGQGAFGNMCRGGRMFAPTKIWRRWHRRVNIHLRRVAIASALSATAVPSLVLARGHRVESVPELPLVVSDSAESIEKTAQAINILKQLGAYADAEKAKDSVGIRPGKGKMRNRRYINRKGPLVVYGTEGSKVVKAFRNLPGVDVANVERLNLLDLAPGGHLGRFVIWTECAFKKLDEVYGTFNAPSAKKKGFVLPRPKMANADLSRLINSDEVQSVVKPINKDVKRREPRKNPLNNMAAVLKLNPYLGTARKMAALAEAARVKARKQKLDSKRTKLSPEEASKVKAAGKAWYKTMVSDSDYTEFENFTKWLGVTQ

SEQ ID NO: 10790 - DNA, 645 bp, Zea mays subsp. mays
  misc_feature (1)..(645): Ceres Seq. ID no. 12405959
  misc_feature: MA Experiment ID: 108534 Result: Up-regulated in Transcription
  misc_feature: MA Experiment 108534 PARAMETER Experiment Name: Zm_4deg_Cold_P Parameter: Age (hr) Value: 8
  misc_feature: MA Experiment 108534 PARAMETER Experiment Name: Zm_4deg_Cold_P Parameter: Organism Value: Zea mays
  misc_feature: MA Experiment 108534 PARAMETER Experiment Name: Zm_4deg_Cold_P Parameter: Plant Line Value: 35A19
  misc_feature: MA Experiment 108534 PARAMETER Experiment Name: Zm_4deg_Cold_P Parameter: Temperature (deg C) Value: 4 vs. 22
  misc_feature: MA Experiment 108534 PARAMETER Experiment Name: Zm_4deg_Cold_P Parameter: Timepoint (hr) Value: 6
  misc_feature: MA Experiment 108534 PARAMETER Experiment Name: Zm_4deg_Cold_P Parameter: Tissue Value: Aerial
  misc_feature: MA Experiment ID: 20000479 Result: Up-regulated in Transcription
  misc_feature: MA Experiment 20000479 PARAMETER Experiment Name: Zm_Drought_P Parameter: Age (day) Value: 10
  misc_feature: MA Experiment 20000479 PARAMETER Experiment Name: Zm_Drought_P Parameter: Organism Value: Zea mays
  misc_feature: MA Experiment 20000479 PARAMETER Experiment Name: Zm_Drought_P Parameter: Plant Line Value: 35A19
  misc_feature: MA Experiment 20000479 PARAMETER Experiment Name: Zm_Drought_P Parameter: Timepoint (hr) Value: 48
  misc_feature: MA Experiment 20000479 PARAMETER Experiment Name: Zm_Drought_P Parameter: Tissue Value: Aerial
  misc_feature: MA Experiment 20000479 PARAMETER Experiment Name: Zm_Drought_P Parameter: Treatment Value: Drought vs. No Drought
  misc_feature: MA Experiment ID: 20000534 Result: Up-regulated in Transcription
  misc_feature: MA Experiment 20000534 PARAMETER Experiment Name: Zm_Hybrid_Pollen_P Parameter: Age (day) Value: 8
  misc_feature: MA Experiment 20000534 PARAMETER Experiment Name: Zm_Hybrid_Pollen_P Parameter: Organism Value: Zea mays
  misc_feature: MA Experiment 20000534 PARAMETER Experiment Name: Zm_Hybrid_Pollen_P Parameter: Plant Line Value: 35A19
  misc_feature: MA Experiment 20000534 PARAMETER Experiment Name: Zm_Hybrid_Pollen_P Parameter: Tissue Value: Pollen vs. Aerial
  misc_feature: MA Experiment ID: 20000535 Result: Up-regulated in Transcription
  misc_feature: MA Experiment 20000535 PARAMETER Experiment Name: Zm_Hybrid_Seed_Dev_P Parameter: DAP Value: 30 vs. 12
  misc_feature: MA Experiment 20000535 PARAMETER Experiment Name: Zm_Hybrid_Seed_Dev_P Parameter: Organism Value: Zea mays
  misc_feature: MA Experiment 20000535 PARAMETER Experiment Name: Zm_Hybrid_Seed_Dev_P Parameter: Plant Line Value: 35A19
  misc_feature: MA Experiment 20000535 PARAMETER Experiment Name: Zm_Hybrid_Seed_Dev_P Parameter: Tissue Value: Embryo vs. Unfert Floret
tatccagtcgcatctccctctccgaaatcaaggtagcgtacaccgctgcagtttctagagccctctctgccactcgtgatcccactagtcacaatgcctgccctcgccaagcccgcctcccgcaccgccaagcccgccgcggctccgaagccgaagcctgccgccgccaagccgaaggcggccaccgctggtgcctcccacccgccttacttcgagatgatcaaggaggctatcacggcgctcaaggagagggcaggcattgtgactagtgggatcccaaggtgtctggccatgatttggctcgttgggtcgaaaaggaaaagcaaatgattgacaaggagatggagcgaggggtggtctaccttatgggggaagccaatgtcattgcaggaccagaatcatctgccgcaaagaagatagtggtagactatgtctacgcattcttgaggaagaacttgacggagggggagaaggtgctctccattccgaaagaccaactactcaaagtagggataacatacgagatatagggattatgctgggcctcaagttacaatcctatgtatcaacttggcctttagtcataaagtttatgtatatcgagagattcaagattcaatgtaaattattcaattttattccttc

SEQ ID NO: 10791 - protein, 88 aa, Zea mays subsp. mays
  peptide (1)..(88): Ceres Seq. ID no. 12405960
  misc_feature (56)..(88): Homolog of NCBI NO: 7489431 NR Description: probable potassium transport protein - barley
SSRISLSEIKVAYTAAVSRALSATRDPTSHNACPRQARLPHRQARRGSEAEACRRQAEGGHRWCLPPALLRDDQGGYHGAQGEGRHCD

SEQ ID NO: 10792 - protein, 78 aa, Zea mays subsp. mays
  peptide (1)..(78): Ceres Seq. ID no. 12405961
  misc_feature (1)..(63): Homolog of NCBI NO: 22135471 NR Description: histone H1-like protein HON101 [Zea mays]
MPALAKPASRTAKPAAAPKPKPAAAKPKAATAGASHPPYFEMIKEAITALKERAGIVTSGIPRCLAMIWLVGSKRKSK

SEQ ID NO: 10793 - protein, 67 aa, Zea mays subsp. mays
  peptide (1)..(67): Ceres Seq. ID no. 12405962
  misc_feature (1)..(67): Pfam Name: K+ potassium transporter Pfam Description: K+ potassium transporter
  misc_feature (1)..(67): Homolog of NCBI NO: 12862378 NR Description: high-affinity potassium transporter [Phragmites
  misc_feature (1)..(67): Homolog of NCBI NO: 12862382 NR Description: high-affinity potassium transporter [Phragmites
  misc_feature (1)..(67): Homolog of NCBI NO: 12862380 NR Description: high-affinity potassium transporter [Phragmites
  misc_feature (1)..(67): Homolog of NCBI NO: 12862384 NR Description: high-affinity potassium transporter [Phragmites
  misc_feature (1)..(67): Homolog of NCBI NO: 7489431 NR Description: probable potassium transport protein - barley
  misc_feature (1)..(67): Homolog of NCBI NO: 18426983 NR Description: putative potassium transporter [Oryza sativa
  misc_feature (1)..(67): Homolog of NCBI NO: 21740625 NR Description: OSJNBb0012E08.7 [Oryza sativa (japonica
  misc_feature (1)..(67): Homolog of NCBI NO: 34538929 NR Description: KUP1 [Oryza sativa (japonica cultivar-group)]
  misc_feature (1)..(67): Homolog of NCBI NO: 38093744 NR Description: putative potassium transporter [Oryza sativa
  misc_feature (1)..(67): Homolog of NCBI NO: 38175466 NR Description: putative high-affinity potassium transporter
MIDKEMERGVVYLMGEANVIAGPESSAAKKIVVDYVYAFLRKNLTEGEKVLSIPKDQLLKVGITYEI

SEQ ID NO: 10794 - DNA, 1005 bp, Zea mays subsp. mays
  misc_feature (1)..(1005): Ceres Seq. ID no. 12413435
  misc_feature: MA Experiment ID: 108504 Result: Down-regulated in Transcription
  misc_feature: MA Experiment 108504 PARAMETER Experiment Name: Zm_Drought_P Parameter: Age (day) Value: 8
  misc_feature: MA Experiment 108504 PARAMETER Experiment Name: Zm_Drought_P Parameter: Organism Value: Zea mays
  misc_feature: MA Experiment 108504 PARAMETER Experiment Name: Zm_Drought_P Parameter: Plant Line Value: 35A19
  misc_feature: MA Experiment 108504 PARAMETER Experiment Name: Zm_Drought_P Parameter: Timepoint (hr) Value: 12
  misc_feature: MA Experiment 108504 PARAMETER Experiment Name: Zm_Drought_P Parameter: Tissue Value: Aerial
  misc_feature: MA Experiment 108504 PARAMETER Experiment Name: Zm_Drought_P Parameter: Treatment Value: Drought vs. No Drought
  misc_feature: MA Experiment ID: 108523 Result: Down-regulated in Transcription
  misc_feature: MA Experiment 108523 PARAMETER Experiment Name: Zm_42deg_Heat_P Parameter: Age (day) Value: 8
  misc_feature: MA Experiment 108523 PARAMETER Experiment Name: Zm_42deg_Heat_P Parameter: Organism Value: Zea mays
  misc_feature: MA Experiment 108523 PARAMETER Experiment Name: Zm_42deg_Heat_P Parameter: Plant Line Value: 35A19
  misc_feature: MA Experiment 108523 PARAMETER Experiment Name: Zm_42deg_Heat_P Parameter: Temperature (deg C) Value: 42 vs. 22
  misc_feature: MA Experiment 108523 PARAMETER Experiment Name: Zm_42deg_Heat_P Parameter: Timepoint (hr) Value: 6
  misc_feature: MA Experiment 108523 PARAMETER Experiment Name: Zm_42deg_Heat_P Parameter: Tissue Value: Aerial
  misc_feature: MA Experiment ID: 108527 Result: Down-regulated in Transcription
  misc_feature: MA Experiment 108527 PARAMETER Experiment Name: Zm_5mM_NO_P Parameter: Age (day) Value: 8
  misc_feature: MA Experiment 108527 PARAMETER Experiment Name: Zm_5mM_NO_P Parameter: Organism Value: Zea mays
  misc_feature: MA Experiment 108527 PARAMETER Experiment Name: Zm_5mM_NO_P Parameter: Plant Line Value: 35A19
  misc_feature: MA Experiment 108527 PARAMETER Experiment Name: Zm_5mM_NO_P Parameter: Timepoint (hr) Value: 6
  misc_feature: MA Experiment 108527 PARAMETER Experiment Name: Zm_5mM_NO_P Parameter: Tissue Value: Aerial
  misc_feature: MA Experiment 108527 PARAMETER Experiment Name: Zm_5mM_NO_P Parameter: Treatment Value: 5mM NO vs. No Treatment
  misc_feature: MA Experiment ID: 108528 Result: Down-regulated in Transcription
  misc_feature: MA Experiment 108528 PARAMETER Experiment Name: Zm_Imbibed_Seeds_P Parameter: Age (day) Value: 5 vs. 2
  misc_feature: MA Experiment 108528 PARAMETER Experiment Name: Zm_Imbibed_Seeds_P Parameter: Organism Value: Zea mays
  misc_feature: MA Experiment 108528 PARAMETER Experiment Name: Zm_Imbibed_Seeds_P Parameter: Plant Line Value: 35A19
  misc_feature: MA Experiment 108528 PARAMETER Experiment Name: Zm_Imbibed_Seeds_P Parameter: Tissue Value: Aerial vs. Embryo
  misc_feature: MA Experiment ID: 108530 Result: Down-regulated in Transcription
  misc_feature: MA Experiment 108530 PARAMETER Experiment Name: Zm_Imbibed_Seeds_P Parameter: Age (day) Value: 6 vs. 2
  misc_feature: MA Experiment 108530 PARAMETER Experiment Name: Zm_Imbibed_Seeds_P Parameter: Organism Value: Zea mays
  misc_feature: MA Experiment 108530 PARAMETER Experiment Name: Zm_Imbibed_Seeds_P Parameter: Plant Line Value: 35A19
  misc_feature: MA Experiment 108530 PARAMETER Experiment Name: Zm_Imbibed_Seeds_P Parameter: Tissue Value: Aerial vs. Embryo
  misc_feature: MA Experiment ID: 108535 Result: Up-regulated in Transcription
  misc_feature: MA Experiment 108535 PARAMETER Experiment Name: Zm_Meristem_P Parameter: Age (day) Value: 8
  misc_feature: MA Experiment 108535 PARAMETER Experiment Name: Zm_Meristem_P Parameter: Organism Value: Zea mays
  misc_feature: MA Experiment 108535 PARAMETER Experiment Name: Zm_Meristem_P Parameter: Plant Line Value: 35A19
  misc_feature: MA Experiment 108535 PARAMETER Experiment Name: Zm_Meristem_P Parameter: Tissue Value: Root Meristem vs. Above Root Meristem
  misc_feature: MA Experiment ID: 108544 Result: Down-regulated in Transcription
  misc_feature: MA Experiment ID: 108556 Result: Down-regulated in Transcription
  misc_feature: MA Experiment 108556 PARAMETER Experiment Name: Zm_Drought_P Parameter: Age (day) Value: 9
  misc_feature: MA Experiment 108556 PARAMETER Experiment Name: Zm_Drought_P Parameter: Organism Value: Zea mays
  misc_feature: MA Experiment 108556 PARAMETER Experiment Name: Zm_Drought_P Parameter: Plant Line Value: 35A19
  misc_feature: MA Experiment 108556 PARAMETER Experiment Name: Zm_Drought_P Parameter: Timepoint (hr) Value: 24
  misc_feature: MA Experiment 108556 PARAMETER Experiment Name: Zm_Drought_P Parameter: Tissue Value: Aerial
  misc_feature: MA Experiment 108556 PARAMETER Experiment Name: Zm_Drought_P Parameter: Treatment Value: Drought vs. No Drought
  misc_feature: MA Experiment ID: 108559 Result: Down-regulated in Transcription
  misc_feature: MA Experiment 108559 PARAMETER Experiment Name: Zm_5mM_NO_P Parameter: Age (day) Value: 8
  misc_feature: MA Experiment 108559 PARAMETER Experiment Name: Zm_5mM_NO_P Parameter: Organism Value: Zea mays
  misc_feature: MA Experiment 108559 PARAMETER Experiment Name: Zm_5mM_NO_P Parameter: Plant Line Value: 35A19
  misc_feature: MA Experiment 108559 PARAMETER Experiment Name: Zm_5mM_NO_P Parameter: Timepoint (hr) Value: 12
  misc_feature: MA Experiment 108559 PARAMETER Experiment Name: Zm_5mM_NO_P Parameter: Tissue Value: Aerial
  misc_feature: MA Experiment 108559 PARAMETER Experiment Name: Zm_5mM_NO_P Parameter: Treatment Value: 5mM NO vs. No Treatment
  misc_feature: MA Experiment ID: 108597 Result: Down-regulated in Transcription
  misc_feature: MA Experiment 108597 PARAMETER Experiment Name: Zm_100uM_ABA_P Parameter: Age (day) Value: 9
  misc_feature: MA Experiment 108597 PARAMETER Experiment Name: Zm_100uM_ABA_P Parameter: Organism Value: Zea mays
  misc_feature: MA Experiment 108597 PARAMETER Experiment Name: Zm_100uM_ABA_P Parameter: Plant Line Value: 35A19
  misc_feature: MA Experiment 108597 PARAMETER Experiment Name: Zm_100uM_ABA_P Parameter: Timepoint (hr) Value: 24
  misc_feature: MA Experiment 108597 PARAMETER Experiment Name: Zm_100uM_ABA_P Parameter: Tissue Value: Aerial
  misc_feature: MA Experiment 108597 PARAMETER Experiment Name: Zm_100uM_ABA_P Parameter: Treatment Value: 100uM ABA vs. No Treatment
  misc_feature: MA Experiment ID: 108687 Result: Down-regulated in Transcription
  misc_feature: MA Experiment 108687 PARAMETER Experiment Name: Zm_Embryos-Flowers__P Parameter: Tissue Value: Embryo vs. Aerial+
  misc_feature: MA Experiment ID: 108689 Result: Down-regulated in Transcription
  misc_feature: MA Experiment 108689 PARAMETER Experiment Name: Zm_Drought_Roots_P Parameter: Age (day) Value: 9
  misc_feature: MA Experiment 108689 PARAMETER Experiment Name: Zm_Drought_Roots_P Parameter: Organism Value: Zea mays
  misc_feature: MA Experiment 108689 PARAMETER Experiment Name: Zm_Drought_Roots_P Parameter: Plant Line Value: 35A19
  misc_feature: MA Experiment 108689 PARAMETER Experiment Name: Zm_Drought_Roots_P Parameter: Timepoint (hr) Value: 24
  misc_feature: MA Experiment 108689 PARAMETER Experiment Name: Zm_Drought_Roots_P Parameter: Tissue Value: Roots
  misc_feature: MA Experiment 108689 PARAMETER Experiment Name: Zm_Drought_Roots_P Parameter: Treatment Value: Drought vs. No Drought
  misc_feature: MA Experiment ID: 20000477 Result: Down-regulated in Transcription
  misc_feature: MA Experiment 20000477 PARAMETER Experiment Name: Zm_5mM_SA_P Parameter: Age (day) Value: 10
  misc_feature: MA Experiment 20000477 PARAMETER Experiment Name: Zm_5mM_SA_P Parameter: Organism Value: Zea mays
  misc_feature: MA Experiment 20000477 PARAMETER Experiment Name: Zm_5mM_SA_P Parameter: Plant Line Value: 35A19
  misc_feature: MA Experiment 20000477 PARAMETER Experiment Name: Zm_5mM_SA_P Parameter: Timepoint (hr) Value: 48
  misc_feature: MA Experiment 20000477 PARAMETER Experiment Name: Zm_5mM_SA_P Parameter: Tissue Value: Aerial
  misc_feature: MA Experiment 20000477 PARAMETER Experiment Name: Zm_5mM_SA_P Parameter: Treatment Value: 5mM SA vs. No Treatment
  misc_feature: MA Experiment ID: 20000478 Result: Down-regulated in Transcription
  misc_feature: MA Experiment 20000478 PARAMETER Experiment Name: Zm_5mM_SA_P Parameter: Age (day) Value: 11
  misc_feature: MA Experiment 20000478 PARAMETER Experiment Name: Zm_5mM_SA_P Parameter: Organism Value: Zea mays
  misc_feature: MA Experiment 20000478 PARAMETER Experiment Name: Zm_5mM_SA_P Parameter: Plant Line Value: 35A19
  misc_feature: MA Experiment 20000478 PARAMETER Experiment Name: Zm_5mM_SA_P Parameter: Timepoint (hr) Value: 72
  misc_feature: MA Experiment 20000478 PARAMETER Experiment Name: Zm_5mM_SA_P Parameter: Tissue Value: Aerial
  misc_feature: MA Experiment 20000478 PARAMETER Experiment Name: Zm_5mM_SA_P Parameter: Treatment Value: 5mM SA vs. No Treatment
  misc_feature: MA Experiment ID: 20000480 Result: Down-regulated in Transcription
  misc_feature: MA Experiment 20000480 PARAMETER Experiment Name: Zm_Drought_P Parameter: Age (day) Value: 11
  misc_feature: MA Experiment 20000480 PARAMETER Experiment Name: Zm_Drought_P Parameter: Organism Value: Zea mays
  misc_feature: MA Experiment 20000480 PARAMETER Experiment Name: Zm_Drought_P Parameter: Plant Line Value: 35A19
  misc_feature: MA Experiment 20000480 PARAMETER Experiment Name: Zm_Drought_P Parameter: Timepoint (hr) Value: 72
  misc_feature: MA Experiment 20000480 PARAMETER Experiment Name: Zm_Drought_P Parameter: Tissue Value: Aerial
  misc_feature: MA Experiment 20000480 PARAMETER Experiment Name: Zm_Drought_P Parameter: Treatment Value: Drought vs. No Drought
  misc_feature: MA Experiment ID: 20000487 Result: Down-regulated in Transcription
  misc_feature: MA Experiment 20000487 PARAMETER Experiment Name: Zm_50mM_NH4NO3_L_to_H_P Parameter: Organism Value: Zea mays
  misc_feature: MA Experiment 20000487 PARAMETER Experiment Name: Zm_50mM_NH4NO3_L_to_H_P Parameter: Timepoint (hr) Value: 4
  misc_feature: MA Experiment 20000487 PARAMETER Experiment Name: Zm_50mM_NH4NO3_L_to_H_P Parameter: Tissue Value: Leaves
  misc_feature: MA Experiment 20000487 PARAMETER Experiment Name: Zm_50mM_NH4NO3_L_to_H_P Parameter: Treatment Value: 50mM NH4NO3 vs. 100mM Mannitol
  misc_feature: MA Experiment ID: 20000492 Result: Up-regulated in Transcription
  misc_feature: MA Experiment 20000492 PARAMETER Experiment Name: Zm_Hybrid_Seed_Dev_P Parameter: DAP Value: 12
  misc_feature: MA Experiment 20000492 PARAMETER Experiment Name: Zm_Hybrid_Seed_Dev_P Parameter: Organism Value: Zea mays
  misc_feature: MA Experiment 20000492 PARAMETER Experiment Name: Zm_Hybrid_Seed_Dev_P Parameter: Plant Line Value: 35A19
  misc_feature: MA Experiment 20000492 PARAMETER Experiment Name: Zm_Hybrid_Seed_Dev_P Parameter: Tissue Value: Fert Kernel vs. Unfert Floret
  misc_feature: MA Experiment ID: 20000626 Result: Down-regulated in Transcription
  misc_feature: MA Experiment 20000626 PARAMETER Experiment Name: Zm_Herbicide-Treatments_P Parameter: Timepoint (hr) Value: 12
  misc_feature: MA Experiment 20000626 PARAMETER Experiment Name: Zm_Herbicide-Treatments_P Parameter: Tissue Value: Aerial
  misc_feature: MA Experiment 20000626 PARAMETER Experiment Name: Zm_Herbicide-Treatments_P Parameter: Treatment Value: Roundup vs. No Treatment
  misc_feature: MA Experiment ID: 20000632 Result: Down-regulated in Transcription
  misc_feature: MA Experiment 20000632 PARAMETER Experiment Name: Zm_Herbicide-Treatments_P Parameter: Timepoint (hr) Value: 4
  misc_feature: MA Experiment 20000632 PARAMETER Experiment Name: Zm_Herbicide-Treatments_P Parameter: Tissue Value: Aerial
  misc_feature: MA Experiment 20000632 PARAMETER Experiment Name: Zm_Herbicide-Treatments_P Parameter: Treatment Value: Glean vs. No Treatment
  misc_feature: MA Experiment ID: 20000633 Result: Down-regulated in Transcription
  misc_feature: MA Experiment 20000633 PARAMETER Experiment Name: Zm_Herbicide-Treatments_P Parameter: Timepoint (hr) Value: 4
  misc_feature: MA Experiment 20000633 PARAMETER Experiment Name: Zm_Herbicide-Treatments_P Parameter: Tissue Value: Aerial
  misc_feature: MA Experiment 20000633 PARAMETER Experiment Name: Zm_Herbicide-Treatments_P Parameter: Treatment Value: Trimec vs. No Treatment
  misc_feature: MA Experiment ID: 20001606 Result: Up-regulated in Transcription
  misc_feature: MA Experiment 20001606 PARAMETER Experiment Name: Zm_50ppm_KNO3_L-to-H_P Parameter: Age (day) Value: 19
  misc_feature: MA Experiment 20001606 PARAMETER Experiment Name: Zm_50ppm_KNO3_L-to-H_P Parameter: Organism Value: Zea mays
  misc_feature: MA Experiment 20001606 PARAMETER Experiment Name: Zm_50ppm_KNO3_L-to-H_P Parameter: Plant Line Value: 35A19
  misc_feature: MA Experiment 20001606 PARAMETER Experiment Name: Zm_50ppm_KNO3_L-to-H_P Parameter: Timepoint (hr) Value: 8
  misc_feature: MA Experiment 20001606 PARAMETER Experiment Name: Zm_50ppm_KNO3_L-to-H_P Parameter: Tissue Value: Shoots
  misc_feature: MA Experiment 20001606 PARAMETER Experiment Name: Zm_50ppm_KNO3_L-to-H_P Parameter: Treatment Value: 50ppm KNO3 vs. 50ppm KCl
  misc_feature: MA Experiment ID: 20001608 Result: Up-regulated in Transcription
  misc_feature: MA Experiment 20001608 PARAMETER Experiment Name: Zm_50ppm_KNO3_L-to-H_P Parameter: Age (day) Value: 21
  misc_feature: MA Experiment 20001608 PARAMETER Experiment Name: Zm_50ppm_KNO3_L-to-H_P Parameter: Organism Value: Zea mays
  misc_feature: MA Experiment 20001608 PARAMETER Experiment Name: Zm_50ppm_KNO3_L-to-H_P Parameter: Plant Line Value: 35A19
  misc_feature: MA Experiment 20001608 PARAMETER Experiment Name: Zm_50ppm_KNO3_L-to-H_P Parameter: Timepoint (hr) Value: 48
  misc_feature: MA Experiment 20001608 PARAMETER Experiment Name: Zm_50ppm_KNO3_L-to-H_P Parameter: Tissue Value: Shoots
  misc_feature: MA Experiment 20001608 PARAMETER Experiment Name: Zm_50ppm_KNO3_L-to-H_P Parameter: Treatment Value: 50ppm KNO3 vs. 50ppm KCl
ctcgcatcgcatcgatcctcccatctgcgcacccgcaagcctattctccgcacctcctcaggtgaccgggaagatgatgccgttgagccaaaccgacttctcgccgtcgcagttcacctcctcccagaatgccgccgccgactccaccacgccttccaagatgcgcggcgcgtccagcaccatgccgctcaccgtgaagcaggtcgtcgacgcgcagcagtctggcacgggcgagaagggcgctccgttcatcgtcaatggcgtcgagatggctaacattcgacttgtggggatggtcaatgccaaggtggagcggacgaccgatgtgaccttcacgctcgacgatggcaccggccgcctcgatttcatcagatgggtgaatgatgcttcagattcttttgaaactgctgctattcagaatggtatgtacattgcggtcattggaagcctcaagggactgcaagagaggaagcgtgctactgctttctcaatcaggcctataaccgatttcaatgaggttacgctgcatttcattcagtgtgttcggatgcatatagagaacattgaattaaaggctggcagtcctgcacgaatcagttcttctatgggagtgtcattctcaaatggattcagtgaatcaagcacaccgacatctttgaaatccagtcccgcaccggtgaccagcgggtcatccgatactgatctgcacacgcaggtcctgaatttttttaatgaaccagcgaacctcgagagtgagcatggggtgcacgttgatgaagtactcaagcggttcaaacttttgccgaagaagcagatcacggatgctattgattacaatatggactcggggcgtctttactcaacaattgatgaattccactacaaggcaacttaaccgatttgaaggccagcctgctggaaatggcagaggactaagtatcacttgtactaaaccaaagtctggaaatgtcatgttgtgtcatgaaatgcatggttggtttatgg

SEQ ID NO: 10795 - protein, 297 aa, Zea mays subsp. mays
  peptide (1)..(297): Ceres Seq. ID no. 12413436
  misc_feature (93)..(167): Pfam Name: OB-fold nucleic acid binding domain Pfam Description: OB-fold nucleic acid binding domain
  misc_feature (25)..(296): Homolog of NCBI NO: 9801268 NR Description: replication protein A2 [Oryza sativa]
  misc_feature (25)..(296): Homolog of NCBI NO: 13516746 NR Description: replication protein A 30kDa [Oryza sativa
  misc_feature (33)..(295): Homolog of NCBI NO: 18400560 NR Description: putative replication protein A1; protein id: supported by cDNA: 7536. [Arabidopsis thaliana] putative replication protein A1 [Arabidopsis thaliana]
  misc_feature (33)..(297): Homolog of NCBI NO: 18396383 NR Description: putative replication factor A; protein id: supported by cDNA: 118359. [Arabidopsis thaliana] putative replication factor A [Arabidopsis thaliana]
  misc_feature (33)..(297): Homolog of NCBI NO: 6728969 NR Description: putative replication factor A [Arabidopsis
  misc_feature (33)..(189): Homolog of NCBI NO: 25347925 NR Description: probable replication protein A1 [imported] -
  misc_feature (34)..(297): Homolog of NCBI NO: 2498847 NR Description: REPLICATION PROTEIN A 32 KD SUBUNIT (RP-A) (RF-A)
  misc_feature (34)..(297): Homolog of NCBI NO: 34871794 NR Description: p32-subunit of replication protein A [Rattus
  misc_feature (34)..(185): Homolog of NCBI NO: 19074286 NR Description: REPLICATION FACTOR A PROTEIN 2 (32KDA SUBUNIT) cuniculi] >gi|19068928|emb|CAD25396.1| REPLICATION FACTOR A
SHRIDPPICAPASLFSAPPQVTGKMMPLSQTDFSPSQFTSSQNAAADSTTPSKMRGASSTMPLTVKQVVDAQQSGTGEKGAPFIVNGVEMANIRLVGMVNAKVERTTDVTFTLDDGTGRLDFIRWVNDASDSFETAAIQNGMYIAVIGSLKGLQERKRATAFSIRPITDFNEVTLHFIQCVRMHIENIELKAGSPARISSSMGVSFSNGFSESSTPTSLKSSPAPVTSGSSDTDLHTQVLNFFNEPANLESEHGVHVDEVLKRFKLLPKKQITDAIDYNMDSGRLYSTIDEFHYKAT

SEQ ID NO: 10796 - protein, 273 aa, Zea mays subsp. mays
  peptide (1)..(273): Ceres Seq. ID no. 12413437
  misc_feature (69)..(143): Pfam Name: OB-fold nucleic acid binding domain Pfam Description: OB-fold nucleic acid binding domain
  misc_feature (1)..(272): Homolog of NCBI NO: 9801268 NR Description: replication protein A2 [Oryza sativa]
  misc_feature (1)..(272): Homolog of NCBI NO: 13516746 NR Description: replication protein A 30kDa [Oryza sativa
  misc_feature (9)..(271): Homolog of NCBI NO: 18400560 NR Description: putative replication protein A1; protein id: supported by cDNA: 7536. [Arabidopsis thaliana] putative replication protein A1 [Arabidopsis thaliana]
  misc_feature (9)..(273): Homolog of NCBI NO: 18396383 NR Description: putative replication factor A; protein id: supported by cDNA: 118359. [Arabidopsis thaliana] putative replication factor A [Arabidopsis thaliana]
  misc_feature (9)..(273): Homolog of NCBI NO: 6728969 NR Description: putative replication factor A [Arabidopsis
  misc_feature (9)..(165): Homolog of NCBI NO: 25347925 NR Description: probable replication protein A1 [imported] -
  misc_feature (10)..(273): Homolog of NCBI NO: 2498847 NR Description: REPLICATION PROTEIN A 32 KD SUBUNIT (RP-A) (RF-A)
  misc_feature (10)..(273): Homolog of NCBI NO: 34871794 NR Description: p32-subunit of replication protein A [Rattus
  misc_feature (10)..(161): Homolog of NCBI NO: 19074286 NR Description: REPLICATION FACTOR A PROTEIN 2 (32KDA SUBUNIT) cuniculi] >gi|19068928|emb|CAD25396.1| REPLICATION FACTOR A
MMPLSQTDFSPSQFTSSQNAAADSTTPSKMRGASSTMPLTVKQVVDAQQSGTGEKGAPFIVNGVEMANIRLVGMVNAKVERTTDVTFTLDDGTGRLDFIRWVNDASDSFETAAIQNGMYIAVIGSLKGLQERKRATAFSIRPITDFNEVTLHFIQCVRMHIENIELKAGSPARISSSMGVSFSNGFSESSTPTSLKSSPAPVTSGSSDTDLHTQVLNFFNEPANLESEHGVHVDEVLKRFKLLPKKQITDAIDYNMDSGRLYSTIDEFHYKAT

SEQ ID NO: 10797 - protein, 272 aa, Zea mays subsp. mays
  peptide (1)..(272): Ceres Seq. ID no. 12413438
  misc_feature (68)..(142): Pfam Name: OB-fold nucleic acid binding domain Pfam Description: OB-fold nucleic acid binding domain
  misc_feature (1)..(271): Homolog of NCBI NO: 9801268 NR Description: replication protein A2 [Oryza sativa]
  misc_feature (1)..(271): Homolog of NCBI NO: 13516746 NR Description: replication protein A 30kDa [Oryza sativa
  misc_feature (8)..(270): Homolog of NCBI NO: 18400560 NR Description: putative replication protein A1; protein id: supported by cDNA: 7536. [Arabidopsis thaliana] putative replication protein A1 [Arabidopsis thaliana]
  misc_feature (8)..(272): Homolog of NCBI NO: 18396383 NR Description: putative replication factor A; protein id: supported by cDNA: 118359. [Arabidopsis thaliana] putative replication factor A [Arabidopsis thaliana]
  misc_feature (8)..(272): Homolog of NCBI NO: 6728969 NR Description: putative replication factor A [Arabidopsis
  misc_feature (8)..(164): Homolog of NCBI NO: 25347925 NR Description: probable replication protein A1 [imported] -
  misc_feature (9)..(272): Homolog of NCBI NO: 2498847 NR Description: REPLICATION PROTEIN A 32 KD SUBUNIT (RP-A) (RF-A)
  misc_feature (9)..(272): Homolog of NCBI NO: 34871794 NR Description: p32-subunit of replication protein A [Rattus
  misc_feature (9)..(160): Homolog of NCBI NO: 19074286 NR Description: REPLICATION FACTOR A PROTEIN 2 (32KDA SUBUNIT) cuniculi] >gi|19068928|emb|CAD25396.1| REPLICATION FACTOR A
MPLSQTDFSPSQFTSSQNAAADSTTPSKMRGASSTMPLTVKQVVDAQQSGTGEKGAPFIVNGVEMANIRLVGMVNAKVERTTDVTFTLDDGTGRLDFIRWVNDASDSFETAAIQNGMYIAVIGSLKGLQERKRATAFSIRPITDFNEVTLHFIQCVRMHIENIELKAGSPARISSSMGVSFSNGFSESSTPTSLKSSPAPVTSGSSDTDLHTQVLNFFNEPANLESEHGVHVDEVLKRFKLLPKKQITDAIDYNMDSGRLYSTIDEFHYKAT

SEQ ID NO: 10798 - DNA, 957 bp, Zea mays subsp. mays
  misc_feature (1)..(957): Ceres Seq. ID no. 12345627
  misc_feature: MA Experiment ID: 108543 Result: Up-regulated in Transcription
  misc_feature: MA Experiment ID: 20000478 Result: Down-regulated in Transcription
  misc_feature: MA Experiment 20000478 PARAMETER Experiment Name: Zm_5mM_SA_P Parameter: Age (day) Value: 11
  misc_feature: MA Experiment 20000478 PARAMETER Experiment Name: Zm_5mM_SA_P Parameter: Organism Value: Zea mays
  misc_feature: MA Experiment 20000478 PARAMETER Experiment Name: Zm_5mM_SA_P Parameter: Plant Line Value: 35A19
  misc_feature: MA Experiment 20000478 PARAMETER Experiment Name: Zm_5mM_SA_P Parameter: Timepoint (hr) Value: 72
  misc_feature: MA Experiment 20000478 PARAMETER Experiment Name: Zm_5mM_SA_P Parameter: Tissue Value: Aerial
  misc_feature: MA Experiment 20000478 PARAMETER Experiment Name: Zm_5mM_SA_P Parameter: Treatment Value: 5mM SA vs. No Treatment
  misc_feature: MA Experiment ID: 20000479 Result: Down-regulated in Transcription
  misc_feature: MA Experiment 20000479 PARAMETER Experiment Name: Zm_Drought_P Parameter: Age (day) Value: 10
  misc_feature: MA Experiment 20000479 PARAMETER Experiment Name: Zm_Drought_P Parameter: Organism Value: Zea mays
  misc_feature: MA Experiment 20000479 PARAMETER Experiment Name: Zm_Drought_P Parameter: Plant Line Value: 35A19
  misc_feature: MA Experiment 20000479 PARAMETER Experiment Name: Zm_Drought_P Parameter: Timepoint (hr) Value: 48
  misc_feature: MA Experiment 20000479 PARAMETER Experiment Name: Zm_Drought_P Parameter: Tissue Value: Aerial
  misc_feature: MA Experiment 20000479 PARAMETER Experiment Name: Zm_Drought_P Parameter: Treatment Value: Drought vs. No Drought
  misc_feature: MA Experiment ID: 20000480 Result: Down-regulated in Transcription
  misc_feature: MA Experiment 20000480 PARAMETER Experiment Name: Zm_Drought_P Parameter: Age (day) Value: 11
  misc_feature: MA Experiment 20000480 PARAMETER Experiment Name: Zm_Drought_P Parameter: Organism Value: Zea mays
  misc_feature: MA Experiment 20000480 PARAMETER Experiment Name: Zm_Drought_P Parameter: Plant Line Value: 35A19
  misc_feature: MA Experiment 20000480 PARAMETER Experiment Name: Zm_Drought_P Parameter: Timepoint (hr) Value: 72
  misc_feature: MA Experiment 20000480 PARAMETER Experiment Name: Zm_Drought_P Parameter: Tissue Value: Aerial
  misc_feature: MA Experiment 20000480 PARAMETER Experiment Name: Zm_Drought_P Parameter: Treatment Value: Drought vs. No Drought
  misc_feature: MA Experiment ID: 20000626 Result: Down-regulated in Transcription
  misc_feature: MA Experiment 20000626 PARAMETER Experiment Name: Zm_Herbicide-Treatments_P Parameter: Timepoint (hr) Value: 12
  misc_feature: MA Experiment 20000626 PARAMETER Experiment Name: Zm_Herbicide-Treatments_P Parameter: Tissue Value: Aerial
  misc_feature: MA Experiment 20000626 PARAMETER Experiment Name: Zm_Herbicide-Treatments_P Parameter: Treatment Value: Roundup vs. No Treatment
  misc_feature: MA Experiment ID: 20001608 Result: Down-regulated in Transcription
  misc_feature: MA Experiment 20001608 PARAMETER Experiment Name: Zm_50ppm_KNO3_L-to-H_P Parameter: Age (day) Value: 21
  misc_feature: MA Experiment 20001608 PARAMETER Experiment Name: Zm_50ppm_KNO3_L-to-H_P Parameter: Organism Value: Zea mays
  misc_feature: MA Experiment 20001608 PARAMETER Experiment Name: Zm_50ppm_KNO3_L-to-H_P Parameter: Plant Line Value: 35A19
  misc_feature: MA Experiment 20001608 PARAMETER Experiment Name: Zm_50ppm_KNO3_L-to-H_P Parameter: Timepoint (hr) Value: 48
  misc_feature: MA Experiment 20001608 PARAMETER Experiment Name: Zm_50ppm_KNO3_L-to-H_P Parameter: Tissue Value: Shoots
  misc_feature: MA Experiment 20001608 PARAMETER Experiment Name: Zm_50ppm_KNO3_L-to-H_P Parameter: Treatment Value: 50ppm KNO3 vs. 50ppm KCl
aggagctgcccttcctcgtcttccacgctcgtcagtcatcagcatctcagcacccagagtcgacaaaattgaagaacatctagccggcgaaacatgagggggaagctcgacgagtgctgggacgagtgctgcgacaagtggggcgagtggaagtactgcctgctgtgcctcggcatcgtggtggccatcgtcctcatcgtggtgttcgtcgccgccttcggtttcgtgcgccacatcgacgtctccgtggacgacgcttcgctgacgcggttcgagctggcgacgtcgccggtgacgtcgctgtcgtacaacctgtccgtgaccctggtgatccgcaacccgaactgggccatgagcctcaagaacaccaagccgctggaggcgcagtacaagttcgacgaccagatgttcgaccgcttccagctggccgacaagggcgacaagcaccccgcccggcaagaccagagtgtaccacatcgcgcccccgggcacgacgagtagcgtcatgctcgggaacgccggcgaggccgagttccggaaggagaacgccacggggacgttccaggtggaggtggccgtcgacggggaggtgcgctacacggcgcgctacaccaagtgcaagatccaggcgtcgtgcccgctcaagctgcagctggcgccgccgggcaccgccgccgtcgtgttccagaaggtcacgtgcaagctcgccaaggcggagaagaactgttagatctagcttgcatagctggtggcatggcacacaagccttattgcattgcgttcgtgttgcgcggttttgtattcgtccatcggtggtggcgacgatttgattatgtttgttgacttttgttctgattgctgtgtgtggtgtgctcggttaatcaggatttctgctgtctgtacccgtgtgattgcaattttgcgcggaatgtgatctgtttcagctcagtttgtctg

SEQ ID NO: 10799 - protein, 135 aa, Zea mays subsp. mays
  peptide (1)..(135): Ceres Seq. ID no. 12345628
  misc_feature (7)..(120): Homolog of NCBI NO: 34900810 NR Description: hypothetical protein~predicted by FGENESH etc.
  misc_feature (3)..(134): Homolog of NCBI NO: 34900820 NR Description: hypothetical protein~predicted by FGENESH etc.
  misc_feature (6)..(135): Homolog of NCBI NO: 34900798 NR Description: hypothetical protein~predicted by GENSCAN etc.
  misc_feature (8)..(124): Homolog of NCBI NO: 40714669 NR Description: putative harpin inducing protein [Oryza sativa
MRGKLDECWDECCDKWGEWKYCLLCLGIVVAIVLIVVFVAAFGFVRHIDVSVDDASLTRFELATSPVTSLSYNLSVTLVIRNPNWAMSLKNTKPLEAQYKFDDQMFDRFQLADKGDKHPARQDQSVPHRAPGHDE

SEQ ID NO: 10800 - protein, 74 aa, Zea mays subsp. mays
  peptide (1)..(74): Ceres Seq. ID no. 12345629
  misc_feature (1)..(74): Homolog of NCBI NO: 34900810 NR Description: hypothetical protein~predicted by FGENESH etc.
  misc_feature (1)..(74): Homolog of NCBI NO: 34900820 NR Description: hypothetical protein~predicted by FGENESH etc.
  misc_feature (1)..(74): Homolog of NCBI NO: 34900798 NR Description: hypothetical protein~predicted by GENSCAN etc.
  misc_feature (1)..(73): Homolog of NCBI NO: 40714669 NR Description: putative harpin inducing protein [Oryza sativa
  misc_feature (1)..(73): Homolog of NCBI NO: 40714673 NR Description: putative harpin inducing protein [Oryza sativa
MLGNAGEAEFRKENATGTFQVEVAVDGEVRYTARYTKCKIQASCPLKLQLAPPGTAAVVFQKVTCKLAKAEKNC

SEQ ID NO: 10801 - DNA, 1462 bp, Zea mays subsp. mays
  misc_feature (1)..(1462): Ceres Seq. ID no. 13579635
  misc_feature: MA Experiment ID: 108522 Result: Up-regulated in Transcription
  misc_feature: MA Experiment 108522 PARAMETER Experiment Name: Zm_42deg_Heat_P Parameter: Age (day) Value: 8
  misc_feature: MA Experiment 108522 PARAMETER Experiment Name: Zm_42deg_Heat_P Parameter: Organism Value: Zea mays
  misc_feature: MA Experiment 108522 PARAMETER Experiment Name: Zm_42deg_Heat_P Parameter: Plant Line Value: 35A19
  misc_feature: MA Experiment 108522 PARAMETER Experiment Name: Zm_42deg_Heat_P Parameter: Temperature (deg C) Value: 42 vs. 22
  misc_feature: MA Experiment 108522 PARAMETER Experiment Name: Zm_42deg_Heat_P Parameter: Timepoint (hr) Value: 1
  misc_feature: MA Experiment 108522 PARAMETER Experiment Name: Zm_42deg_Heat_P Parameter: Tissue Value: Aerial
  misc_feature: MA Experiment ID: 108527 Result: Up-regulated in Transcription
  misc_feature: MA Experiment 108527 PARAMETER Experiment Name: Zm_5mM_NO_P Parameter: Age (day) Value: 8
  misc_feature: MA Experiment 108527 PARAMETER Experiment Name: Zm_5mM_NO_P Parameter: Organism Value: Zea mays
  misc_feature: MA Experiment 108527 PARAMETER Experiment Name: Zm_5mM_NO_P Parameter: Plant Line Value: 35A19
  misc_feature: MA Experiment 108527 PARAMETER Experiment Name: Zm_5mM_NO_P Parameter: Timepoint (hr) Value: 6
  misc_feature: MA Experiment 108527 PARAMETER Experiment Name: Zm_5mM_NO_P Parameter: Tissue Value: Aerial
  misc_feature: MA Experiment 108527 PARAMETER Experiment Name: Zm_5mM_NO_P Parameter: Treatment Value: 5mM NO vs. No Treatment
  misc_feature: MA Experiment ID: 108543 Result: Down-regulated in Transcription
cccaacctcatcttctctccctttgctcggaacgcacacaccgcccggtctccgatctccgatccccgatcccctcgtcgatccaagatgcagatcttcgtcaagactctcactggaaagactatcaccctcgaggtggagtcctctgacaccattgacaacgtcaaggccaagatccaggacaaggaaggcattcccccggaccagcagcggctcatcttcgctggcaagcagctcgaggacgggcgcacacttgccgactacaacatccagaaggagagcaccctccaccttgttctccgcctcaggggaggcatgcagatcttcgtcaagaccctcactggaaagactatcaccctcgaggtggagtcttctgacaccatcgacaacgtcaaggccaagatccaggacaaggaggggattcctccggaccagcagcgcctgatctttgctggcaagcagctcgaggacgggcgcacgctggccgactacaacattcagaaggagagcaccctccacttggtgttgcgtctcaggggcggcatgcagatcttcgtgaagactctgactggcaagactatcacccttgaggtcgagtcttctgataccattgacaatgtcaaggccaagatccaggacaaggagggcatccctccggaccagcagcggctcatttttgccggcaagcagctcgaggacgggcgcacgcttgccgactacaacattcagaaggagagcaccctccacttggtgctgcgtctcaggggtggcatgcagatcttcgtgaagacacttactggcaagacgatcacccttgaggtggagtcctcggacaccatcgacaatgtcaaggccaagatccaggacaaggagggcattccaccggaccagcagcgcctgatctttgctggcaagcagctggaggatggccgtaccctcgccgactacaacatccagaaggagagcaccctccacctggtcgtccgcttgcgaggtggtatgcagatctttgtgaagaccttgactggcaagaccataaccctggaggttgagagctccgacaccatcgacaacgtgaaggcgaagatccaggacaaagagggcatccctccagaccagcagcgtctgatctttgccggcaagcagctggaggatggccgcaccctagcagactacaacatccagaaggagagcactctccacctggtgctccgcctccgcggtggtcagtaagccatggttcatttaagctgctgctgtacctgggtatctgcgtcgtctggtgccctctggtgtacctctatatggatgtcgtcgtctaataaacatctgtggtttgtgtgtcatgaatcgtggttgtggcttcgttggtttaatggacctgttgtgtcctctgtgttgtacccaaaactcttctgcagcagtatggcttgaatccttatgaagtttgatatttgaactt

SEQ ID NO: 10802 - protein, 410 aa, Zea mays subsp. mays
  peptide (1)..(410): Ceres Seq. ID no. 13579636
  misc_feature (30)..(103): Pfam Name: Ubiquitin family Pfam Description: Ubiquitin family
  misc_feature (30)..(103): Pfam Name: Ubiquitin family Pfam Description: Ubiquitin family
  misc_feature (30)..(103): Pfam Name: Ubiquitin family Pfam Description: Ubiquitin family
  misc_feature (30)..(103): Pfam Name: Ubiquitin family Pfam Description: Ubiquitin family
  misc_feature (27)..(409): Homolog of NCBI NO: 902584 NR Description: polyubiquitin containing 7 ubiquitin monomers
  misc_feature (27)..(410): Homolog of NCBI NO: 902584 NR Description: polyubiquitin containing 7 ubiquitin monomers
  misc_feature (30)..(410): Homolog of NCBI NO: 4809266 NR Description: polyubiquitin [Sporobolus stapfianus]
  misc_feature (27)..(409): Homolog of NCBI NO: 100524 NR Description: polyubiquitin 6 - common sunflower hexaubiquitin protein [Helianthus annuus]
  misc_feature (27)..(410): Homolog of NCBI NO: 481477 NR Description: polyubiquitin 6 - rice >gi|416038|emb|CAA53665.1|
  misc_feature (27)..(410): Homolog of NCBI NO: 481477 NR Description: polyubiquitin 6 - rice >gi|416038|emb|CAA53665.1|
  misc_feature (27)..(409): Homolog of NCBI NO: 902584 NR Description: polyubiquitin containing 7 ubiquitin monomers
  misc_feature (30)..(410): Homolog of NCBI NO: 899608 NR Description: polyubiquitin
  misc_feature (27)..(410): Homolog of NCBI NO: 481477 NR Description: polyubiquitin 6 - rice >gi|416038|emb|CAA53665.1|
  misc_feature (27)..(410): Homolog of NCBI NO: 100934 NR Description: polyubiquitin - maize >gi|248337|gb|AAB21993.1|
  misc_feature (27)..(409): Homolog of NCBI NO: 100934 NR Description: polyubiquitin - maize >gi|248337|gb|AAB21993.1|
  misc_feature (27)..(409): Homolog of NCBI NO: 4115337 NR Description: ubiquitin [Pisum sativum]
  misc_feature (27)..(409): Homolog of NCBI NO: 16660462 NR Description: polyubiquitin OUB2 [Olea europaea]
  misc_feature (27)..(409): Homolog of NCBI NO: 100524 NR Description: polyubiquitin 6 - common sunflower hexaubiquitin protein [Helianthus annuus]
  misc_feature (30)..(410): Homolog of NCBI NO: 4809266 NR Description: polyubiquitin [Sporobolus stapfianus]
  misc_feature (27)..(410): Homolog of NCBI NO: 902584 NR Description: polyubiquitin containing 7 ubiquitin monomers
  misc_feature (27)..(409): Homolog of NCBI NO: 100934 NR Description: polyubiquitin - maize >gi|248337|gb|AAB21993.1|
  misc_feature (27)..(409): Homolog of NCBI NO: 4115337 NR Description: ubiquitin [Pisum sativum]
  misc_feature (27)..(409): Homolog of NCBI NO: 16660462 NR Description: polyubiquitin OUB2 [Olea europaea]
  misc_feature (27)..(409): Homolog of NCBI NO: 100524 NR Description: polyubiquitin 6 - common sunflower hexaubiquitin protein [Helianthus annuus]
  misc_feature (30)..(410): Homolog of NCBI NO: 4809266 NR Description: polyubiquitin [Sporobolus stapfianus]
  misc_feature (27)..(410): Homolog of NCBI NO: 902584 NR Description: polyubiquitin containing 7 ubiquitin monomers
  misc_feature (27)..(409): Homolog of NCBI NO: 902584 NR Description: polyubiquitin containing 7 ubiquitin monomers
  misc_feature (30)..(410): Homolog of NCBI NO: 899608 NR Description: polyubiquitin
  misc_feature (27)..(410): Homolog of NCBI NO: 481477 NR Description: polyubiquitin 6 - rice >gi|416038|emb|CAA53665.1|
  misc_feature (27)..(410): Homolog of NCBI NO: 100934 NR Description: polyubiquitin - maize >gi|248337|gb|AAB21993.1|
  misc_feature (27)..(409): Homolog of NCBI NO: 100934 NR Description: polyubiquitin - maize >gi|248337|gb|AAB21993.1|
  misc_feature (27)..(409): Homolog of NCBI NO: 4115337 NR Description: ubiquitin [Pisum sativum]
  misc_feature (27)..(409): Homolog of NCBI NO: 16660462 NR Description: polyubiquitin OUB2 [Olea europaea]
  misc_feature (27)..(409): Homolog of NCBI NO: 100524 NR Description: polyubiquitin 6 - common sunflower hexaubiquitin protein [Helianthus annuus]
  misc_feature (30)..(410): Homolog of NCBI NO: 4809266 NR Description: polyubiquitin [Sporobolus stapfianus]
  misc_feature (27)..(410): Homolog of NCBI NO: 902584 NR Description: polyubiquitin containing 7 ubiquitin monomers
  misc_feature (27)..(409): Homolog of NCBI NO: 902584 NR Description: polyubiquitin containing 7 ubiquitin monomers
  misc_feature (30)..(410): Homolog of NCBI NO: 899608 NR Description: polyubiquitin
  misc_feature (27)..(410): Homolog of NCBI NO: 100934 NR Description: polyubiquitin - maize >gi|248337|gb|AAB21993.1|
  misc_feature (30)..(410): Homolog of NCBI NO: 899608 NR Description: polyubiquitin
  misc_feature (27)..(410): Homolog of NCBI NO: 100934 NR Description: polyubiquitin - maize >gi|248337|gb|AAB21993.1|
  misc_feature (27)..(409): Homolog of NCBI NO: 16660462 NR Description: polyubiquitin OUB2 [Olea europaea]
  misc_feature (27)..(409): Homolog of NCBI NO: 4115337 NR Description: ubiquitin [Pisum sativum]
  misc_feature (27)..(409): Homolog of NCBI NO: 100934 NR Description: polyubiquitin - maize >gi|248337|gb|AAB21993.1|
PNLIFSPFARNAHTARSPISDPRSPRRSKMQIFVKTLTGKTITLEVESSDTIDNVKAKIQDKEGIPPDQQRLIFAGKQLEDGRTLADYNIQKESTLHLVLRLRGGMQIFVKTLTGKTITLEVESSDTIDNVKAKIQDKEGIPPDQQRLIFAGKQLEDGRTLADYNIQKESTLHLVLRLRGGMQIFVKTLTGKTITLEVESSDTIDNVKAKIQDKEGIPPDQQRLIFAGKQLEDGRTLADYNIQKESTLHLVLRLRGGMQIFVKTLTGKTITLEVESSDTIDNVKAKIQDKEGIPPDQQRLIFAGKQLEDGRTLADYNIQKESTLHLVVRLRGGMQIFVKTLTGKTITLEVESSDTIDNVKAKIQDKEGIPPDQQRLIFAGKQLEDGRTLADYNIQKESTLHLVLRLRGGQ

SEQ ID NO: 10803 - protein, 381 aa, Zea mays subsp. mays
  peptide (1)..(381): Ceres Seq. ID no. 13579637
  misc_feature (1)..(74): Pfam Name: Ubiquitin family Pfam Description: Ubiquitin family
  misc_feature (1)..(74): Pfam Name: Ubiquitin family Pfam Description: Ubiquitin family
  misc_feature (1)..(74): Pfam Name: Ubiquitin family Pfam Description: Ubiquitin family
  misc_feature (1)..(74): Pfam Name: Ubiquitin family Pfam Description: Ubiquitin family
  misc_feature (1)..(381): Homolog of NCBI NO: 100934 NR Description: polyubiquitin - maize >gi|248337|gb|AAB21993.1|
  misc_feature (1)..(381): Homolog of NCBI NO: 481477 NR Description: polyubiquitin 6 - rice >gi|416038|emb|CAA53665.1|
  misc_feature (1)..(381): Homolog of NCBI NO: 899608 NR Description: polyubiquitin
  misc_feature (1)..(380): Homolog of NCBI NO: 902584 NR Description: polyubiquitin containing 7 ubiquitin monomers
  misc_feature (1)..(381): Homolog of NCBI NO: 902584 NR Description: polyubiquitin containing 7 ubiquitin monomers
  misc_feature (1)..(381): Homolog of NCBI NO: 4809266 NR Description: polyubiquitin [Sporobolus stapfianus]
  misc_feature (1)..(381): Homolog of NCBI NO: 481477 NR Description: polyubiquitin 6 - rice >gi|416038|emb|CAA53665.1|
  misc_feature (1)..(381): Homolog of NCBI NO: 899608 NR Description: polyubiquitin
  misc_feature (1)..(381): Homolog of NCBI NO: 481477 NR Description: polyubiquitin 6 - rice >gi|416038|emb|CAA53665.1|
  misc_feature (1)..(381): Homolog of NCBI NO: 100934 NR Description: polyubiquitin - maize >gi|248337|gb|AAB21993.1|
  misc_feature (1)..(380): Homolog of NCBI NO: 418854 NR Description: polyubiquitin 6 - parsley polyubiquitin [Petroselinum crispum] >gi|288114|emb|CAA45622.1|
  misc_feature (1)..(380): Homolog of NCBI NO: 100524 NR Description: polyubiquitin 6 - common sunflower hexaubiquitin protein [Helianthus annuus]
  misc_feature (1)..(381): Homolog of NCBI NO: 4809266 NR Description: polyubiquitin [Sporobolus stapfianus]
  misc_feature (1)..(381): Homolog of NCBI NO: 902584 NR Description: polyubiquitin containing 7 ubiquitin monomers
  misc_feature (1)..(380): Homolog of NCBI NO: 902584 NR Description: polyubiquitin containing 7 ubiquitin monomers
  misc_feature (1)..(381): Homolog of NCBI NO: 899608 NR Description: polyubiquitin
  misc_feature (1)..(380): Homolog of NCBI NO: 4115337 NR Description: ubiquitin [Pisum sativum]
  misc_feature (1)..(380): Homolog of NCBI NO: 16660462 NR Description: polyubiquitin OUB2 [Olea europaea]
  misc_feature (1)..(380): Homolog of NCBI NO: 418854 NR Description: polyubiquitin 6 - parsley polyubiquitin [Petroselinum crispum] >gi|288114|emb|CAA45622.1|
  misc_feature (1)..(380): Homolog of NCBI NO: 100524 NR Description: polyubiquitin 6 - common sunflower hexaubiquitin protein [Helianthus annuus]
  misc_feature (1)..(381): Homolog of NCBI NO: 4809266 NR Description: polyubiquitin [Sporobolus stapfianus]
  misc_feature (1)..(381): Homolog of NCBI NO: 902584 NR Description: polyubiquitin containing 7 ubiquitin monomers
  misc_feature (1)..(380): Homolog of NCBI NO: 902584 NR Description: polyubiquitin containing 7 ubiquitin monomers
  misc_feature (1)..(381): Homolog of NCBI NO: 899608 NR Description: polyubiquitin
  misc_feature (1)..(381): Homolog of NCBI NO: 481477 NR Description: polyubiquitin 6 - rice >gi|416038|emb|CAA53665.1|
  misc_feature (1)..(381): Homolog of NCBI NO: 100934 NR Description: polyubiquitin - maize >gi|248337|gb|AAB21993.1|
  misc_feature (1)..(380): Homolog of NCBI NO: 4115337 NR Description: ubiquitin [Pisum sativum]
  misc_feature (1)..(380): Homolog of NCBI NO: 16660462 NR Description: polyubiquitin OUB2 [Olea europaea]
  misc_feature (1)..(380): Homolog of NCBI NO: 418854 NR Description: polyubiquitin 6 - parsley polyubiquitin [Petroselinum crispum] >gi|288114|emb|CAA45622.1|
  misc_feature (1)..(380): Homolog of NCBI NO: 100524 NR Description: polyubiquitin 6 - common sunflower hexaubiquitin protein [Helianthus annuus]
  misc_feature (1)..(381): Homolog of NCBI NO: 4809266 NR Description: polyubiquitin [Sporobolus stapfianus]
  misc_feature (1)..(381): Homolog of NCBI NO: 902584 NR Description: polyubiquitin containing 7 ubiquitin monomers
  misc_feature (1)..(380): Homolog of NCBI NO: 902584 NR Description: polyubiquitin containing 7 ubiquitin monomers
  misc_feature (1)..(381): Homolog of NCBI NO: 100934 NR Description: polyubiquitin - maize >gi|248337|gb|AAB21993.1|
  misc_feature (1)..(380): Homolog of NCBI NO: 100524 NR Description: polyubiquitin 6 - common sunflower hexaubiquitin protein [Helianthus annuus]
  misc_feature (1)..(380): Homolog of NCBI NO: 418854 NR Description: polyubiquitin 6 - parsley polyubiquitin [Petroselinum crispum] >gi|288114|emb|CAA45622.1|
  misc_feature (1)..(380): Homolog of NCBI NO: 16660462 NR Description: polyubiquitin OUB2 [Olea europaea]
  misc_feature (1)..(380): Homolog of NCBI NO: 4115337 NR Description: ubiquitin [Pisum sativum]
  misc_feature (1)..(380): Homolog of NCBI NO: 16660462 NR Description: polyubiquitin OUB2 [Olea europaea]
  misc_feature (1)..(380): Homolog of NCBI NO: 4115337 NR Description: ubiquitin [Pisum sativum]
MQIFVKTLTGKTITLEVESSDTIDNVKAKIQDKEGIPPDQQRLIFAGKQLEDGRTLADYNIQKESTLHLVLRLRGGMQIFVKTLTGKTITLEVESSDTIDNVKAKIQDKEGIPPDQQRLIFAGKQLEDGRTLADYNIQKESTLHLVLRLRGGMQIFVKTLTGKTITLEVESSDTIDNVKAKIQDKEGIPPDQQRLIFAGKQLEDGRTLADYNIQKESTLHLVLRLRGGMQIFVKTLTGKTITLEVESSDTIDNVKAKIQDKEGIPPDQQRLIFAGKQLEDGRTLADYNIQKESTLHLVVRLRGGMQIFVKTLTGKTITLEVESSDTIDNVKAKIQDKEGIPPDQQRLIFAGKQLEDGRTLADYNIQKESTLHLVLRLRGGQ

SEQ ID NO: 10804 - protein, 305 aa, Zea mays subsp. mays
  peptide (1)..(305): Ceres Seq. ID no. 13579638
  misc_feature (1)..(74): Pfam Name: Ubiquitin family Pfam Description: Ubiquitin family
  misc_feature (1)..(74): Pfam Name: Ubiquitin family Pfam Description: Ubiquitin family
  misc_feature (1)..(74): Pfam Name: Ubiquitin family Pfam Description: Ubiquitin family
  misc_feature (1)..(74): Pfam Name: Ubiquitin family Pfam Description: Ubiquitin family
  misc_feature (1)..(305): Homolog of NCBI NO: 100934 NR Description: polyubiquitin - maize >gi|248337|gb|AAB21993.1|
  misc_feature (1)..(305): Homolog of NCBI NO: 481477 NR Description: polyubiquitin 6 - rice >gi|416038|emb|CAA53665.1|
  misc_feature (1)..(305): Homolog of NCBI NO: 899608 NR Description: polyubiquitin
  misc_feature (1)..(304): Homolog of NCBI NO: 902584 NR Description: polyubiquitin containing 7 ubiquitin monomers
  misc_feature (1)..(305): Homolog of NCBI NO: 902584 NR Description: polyubiquitin containing 7 ubiquitin monomers
  misc_feature (1)..(305): Homolog of NCBI NO: 481477 NR Description: polyubiquitin 6 - rice >gi|416038|emb|CAA53665.1|
  misc_feature (1)..(304): Homolog of NCBI NO: 902584 NR Description: polyubiquitin containing 7 ubiquitin monomers
  misc_feature (1)..(305): Homolog of NCBI NO: 899608 NR Description: polyubiquitin
  misc_feature (1)..(305): Homolog of NCBI NO: 481477 NR Description: polyubiquitin 6 - rice >gi|416038|emb|CAA53665.1|
  misc_feature (1)..(305): Homolog of NCBI NO: 100934 NR Description: polyubiquitin - maize >gi|248337|gb|AAB21993.1|
  misc_feature (1)..(304): Homolog of NCBI NO: 170352 NR Description: hexameric polyubiquitin >gi|870792|gb|AAA68878.1| >gi|4115333|gb|AAD03341.1| ubiquitin [Pisum sativum] ubiquitin [Pisum sativum] >gi|22655101|gb|AAM98141.1|
  misc_feature (1)..(304): Homolog of NCBI NO: 4115337 NR Description: ubiquitin [Pisum sativum]
  misc_feature (1)..(304): Homolog of NCBI NO: 16660462 NR Description: polyubiquitin OUB2 [Olea europaea]
  misc_feature (1)..(304): Homolog of NCBI NO: 100524 NR Description: polyubiquitin 6 - common sunflower hexaubiquitin protein [Helianthus annuus]
  misc_feature (1)..(305): Homolog of NCBI NO: 4809266 NR Description: polyubiquitin [Sporobolus stapfianus]
  misc_feature (1)..(305): Homolog of NCBI NO: 902584 NR Description: polyubiquitin containing 7 ubiquitin monomers
  misc_feature (1)..(304): Homolog of NCBI NO: 170352 NR Description: hexameric polyubiquitin >gi|870792|gb|AAA68878.1| >gi|4115333|gb|AAD03341.1| ubiquitin [Pisum sativum] ubiquitin [Pisum sativum] >gi|22655101|gb|AAM98141.1|
  misc_feature (1)..(304): Homolog of NCBI NO: 4115337 NR Description: ubiquitin [Pisum sativum]
  misc_feature (1)..(304): Homolog of NCBI NO: 16660462 NR Description: polyubiquitin OUB2 [Olea europaea]
  misc_feature (1)..(304): Homolog of NCBI NO: 100524 NR Description: polyubiquitin 6 - common sunflower hexaubiquitin protein [Helianthus annuus]
  misc_feature (1)..(305): Homolog of NCBI NO: 4809266 NR Description: polyubiquitin [Sporobolus stapfianus]
  misc_feature (1)..(305): Homolog of NCBI NO: 902584 NR Description: polyubiquitin containing 7 ubiquitin monomers
  misc_feature (1)..(304): Homolog of NCBI NO: 902584 NR Description: polyubiquitin containing 7 ubiquitin monomers
  misc_feature (1)..(305): Homolog of NCBI NO: 899608 NR Description: polyubiquitin
  misc_feature (1)..(305): Homolog of NCBI NO: 481477 NR Description: polyubiquitin 6 - rice >gi|416038|emb|CAA53665.1|
  misc_feature (1)..(305): Homolog of NCBI NO: 100934 NR Description: polyubiquitin - maize >gi|248337|gb|AAB21993.1|
  misc_feature (1)..(304): Homolog of NCBI NO: 170352 NR Description: hexameric polyubiquitin >gi|870792|gb|AAA68878.1| >gi|4115333|gb|AAD03341.1| ubiquitin [Pisum sativum] ubiquitin [Pisum sativum] >gi|22655101|gb|AAM98141.1|
  misc_feature (1)..(304): Homolog of NCBI NO: 4115337 NR Description: ubiquitin [Pisum sativum]
  misc_feature (1)..(304): Homolog of NCBI NO: 16660462 NR Description: polyubiquitin OUB2 [Olea europaea]
  misc_feature (1)..(304): Homolog of NCBI NO: 100524 NR Description: polyubiquitin 6 - common sunflower hexaubiquitin protein [Helianthus annuus]
  misc_feature (1)..(305): Homolog of NCBI NO: 4809266 NR Description: polyubiquitin [Sporobolus stapfianus]
  misc_feature (1)..(305): Homolog of NCBI NO: 902584 NR Description: polyubiquitin containing 7 ubiquitin monomers
  misc_feature (1)..(304): Homolog of NCBI NO: 902584 NR Description: polyubiquitin containing 7 ubiquitin monomers
  misc_feature (1)..(305): Homolog of NCBI NO: 899608 NR Description: polyubiquitin
  misc_feature (1)..(305): Homolog of NCBI NO: 100934 NR Description: polyubiquitin - maize >gi|248337|gb|AAB21993.1|
  misc_feature (1)..(305): Homolog of NCBI NO: 4809266 NR Description: polyubiquitin [Sporobolus stapfianus]
  misc_feature (1)..(304): Homolog of NCBI NO: 100524 NR Description: polyubiquitin 6 - common sunflower hexaubiquitin protein [Helianthus annuus]
  misc_feature (1)..(304): Homolog of NCBI NO: 16660462 NR Description: polyubiquitin OUB2 [Olea europaea]
  misc_feature (1)..(304): Homolog of NCBI NO: 4115337 NR Description: ubiquitin [Pisum sativum]
  misc_feature (1)..(304): Homolog of NCBI NO: 170352 NR Description: hexameric polyubiquitin >gi|870792|gb|AAA68878.1| >gi|4115333|gb|AAD03341.1| ubiquitin [Pisum sativum] ubiquitin [Pisum sativum] >gi|22655101|gb|AAM98141.1|
MQIFVKTLTGKTITLEVESSDTIDNVKAKIQDKEGIPPDQQRLIFAGKQLEDGRTLADYNIQKESTLHLVLRLRGGMQIFVKTLTGKTITLEVESSDTIDNVKAKIQDKEGIPPDQQRLIFAGKQLEDGRTLADYNIQKESTLHLVLRLRGGMQIFVKTLTGKTITLEVESSDTIDNVKAKIQDKEGIPPDQQRLIFAGKQLEDGRTLADYNIQKESTLHLVVRLRGGMQIFVKTLTGKTITLEVESSDTIDNVKAKIQDKEGIPPDQQRLIFAGKQLEDGRTLADYNIQKESTLHLVLRLRGGQ

SEQ ID NO: 10805 - DNA, 1984 bp, Zea mays subsp. mays
  misc_feature (1)..(1984): Ceres Seq. ID no. 12405663
  misc_feature: MA Experiment ID: 108515 Result: Up-regulated in Transcription
  misc_feature: MA Experiment 108515 PARAMETER Experiment Name: Zm_2mM_SA_P Parameter: Age (day) Value: 8
  misc_feature: MA Experiment 108515 PARAMETER Experiment Name: Zm_2mM_SA_P Parameter: Organism Value: Zea mays
  misc_feature: MA Experiment 108515 PARAMETER Experiment Name: Zm_2mM_SA_P Parameter: Plant Line Value: 35A19
  misc_feature: MA Experiment 108515 PARAMETER Experiment Name: Zm_2mM_SA_P Parameter: Timepoint (hr) Value: 12
  misc_feature: MA Experiment 108515 PARAMETER Experiment Name: Zm_2mM_SA_P Parameter: Tissue Value: Aerial
  misc_feature: MA Experiment 108515 PARAMETER Experiment Name: Zm_2mM_SA_P Parameter: Treatment Value: 2mM SA vs. No Treatment
  misc_feature: MA Experiment ID: 108527 Result: Up-regulated in Transcription
  misc_feature: MA Experiment 108527 PARAMETER Experiment Name: Zm_5mM_NO_P Parameter: Age (day) Value: 8
  misc_feature: MA Experiment 108527 PARAMETER Experiment Name: Zm_5mM_NO_P Parameter: Organism Value: Zea mays
  misc_feature: MA Experiment 108527 PARAMETER Experiment Name: Zm_5mM_NO_P Parameter: Plant Line Value: 35A19
  misc_feature: MA Experiment 108527 PARAMETER Experiment Name: Zm_5mM_NO_P Parameter: Timepoint (hr) Value: 6
  misc_feature: MA Experiment 108527 PARAMETER Experiment Name: Zm_5mM_NO_P Parameter: Tissue Value: Aerial
  misc_feature: MA Experiment 108527 PARAMETER Experiment Name: Zm_5mM_NO_P Parameter: Treatment Value: 5mM NO vs. No Treatment
  misc_feature: MA Experiment ID: 108528 Result: Down-regulated in Transcription
  misc_feature: MA Experiment 108528 PARAMETER Experiment Name: Zm_Imbibed_Seeds_P Parameter: Age (day) Value: 5 vs. 2
  misc_feature: MA Experiment 108528 PARAMETER Experiment Name: Zm_Imbibed_Seeds_P Parameter: Organism Value: Zea mays
  misc_feature: MA Experiment 108528 PARAMETER Experiment Name: Zm_Imbibed_Seeds_P Parameter: Plant Line Value: 35A19
  misc_feature: MA Experiment 108528 PARAMETER Experiment Name: Zm_Imbibed_Seeds_P Parameter: Tissue Value: Aerial vs. Embryo
  misc_feature: MA Experiment ID: 108529 Result: Down-regulated in Transcription
  misc_feature: MA Experiment 108529 PARAMETER Experiment Name: Zm_Imbibed_Seeds_P Parameter: Age (day) Value: 5 vs. 2
  misc_feature: MA Experiment 108529 PARAMETER Experiment Name: Zm_Imbibed_Seeds_P Parameter: Organism Value: Zea mays
  misc_feature: MA Experiment 108529 PARAMETER Experiment Name: Zm_Imbibed_Seeds_P Parameter: Plant Line Value: 35A19
  misc_feature: MA Experiment 108529 PARAMETER Experiment Name: Zm_Imbibed_Seeds_P Parameter: Tissue Value: Roots vs. Embryo
  misc_feature: MA Experiment ID: 108530 Result: Down-regulated in Transcription
  misc_feature: MA Experiment 108530 PARAMETER Experiment Name: Zm_Imbibed_Seeds_P Parameter: Age (day) Value: 6 vs. 2
  misc_feature: MA Experiment 108530 PARAMETER Experiment Name: Zm_Imbibed_Seeds_P Parameter: Organism Value: Zea mays
  misc_feature: MA Experiment 108530 PARAMETER Experiment Name: Zm_Imbibed_Seeds_P Parameter: Plant Line Value: 35A19
  misc_feature: MA Experiment 108530 PARAMETER Experiment Name: Zm_Imbibed_Seeds_P Parameter: Tissue Value: Aerial vs. Embryo
  misc_feature: MA Experiment ID: 108535 Result: Up-regulated in Transcription
  misc_feature: MA Experiment 108535 PARAMETER Experiment Name: Zm_Meristem_P Parameter: Age (day) Value: 8
  misc_feature: MA Experiment 108535 PARAMETER Experiment Name: Zm_Meristem_P Parameter: Organism Value: Zea mays
  misc_feature: MA Experiment 108535 PARAMETER Experiment Name: Zm_Meristem_P Parameter: Plant Line Value: 35A19
  misc_feature: MA Experiment 108535 PARAMETER Experiment Name: Zm_Meristem_P Parameter: Tissue Value: Root Meristem vs. Above Root Meristem
  misc_feature: MA Experiment ID: 108542 Result: Up-regulated in Transcription
  misc_feature: MA Experiment 108542 PARAMETER Experiment Name: Zm_150mM_NaCl_P Parameter: Age (day) Value: 8
  misc_feature: MA Experiment 108542 PARAMETER Experiment Name: Zm_150mM_NaCl_P Parameter: Organism Value: Zea mays
  misc_feature: MA Experiment 108542 PARAMETER Experiment Name: Zm_150mM_NaCl_P Parameter: Plant Line Value: 35A19
  misc_feature: MA Experiment 108542 PARAMETER Experiment Name: Zm_150mM_NaCl_P Parameter: Timepoint (hr) Value: 6
  misc_feature: MA Experiment 108542 PARAMETER Experiment Name: Zm_150mM_NaCl_P Parameter: Tissue Value: Aerial
  misc_feature: MA Experiment 108542 PARAMETER Experiment Name: Zm_150mM_NaCl_P Parameter: Treatment Value: 150mM NaCl vs. No Treatment
  misc_feature: MA Experiment ID: 108543 Result: Down-regulated in Transcription
  misc_feature: MA Experiment ID: 108544 Result: Down-regulated in Transcription
  misc_feature: MA Experiment ID: 108545 Result: Down-regulated in Transcription
  misc_feature: MA Experiment 108545 PARAMETER Experiment Name: Zm_Imbibed_Seeds_P Parameter: Age (day) Value: 3 vs. 2
  misc_feature: MA Experiment 108545 PARAMETER Experiment Name: Zm_Imbibed_Seeds_P Parameter: Organism Value: Zea mays
  misc_feature: MA Experiment 108545 PARAMETER Experiment Name: Zm_Imbibed_Seeds_P Parameter: Plant Line Value: 35A19
  misc_feature: MA Experiment 108545 PARAMETER Experiment Name: Zm_Imbibed_Seeds_P Parameter: Tissue Value: Aerial vs. Embryo
  misc_feature: MA Experiment ID: 108546 Result: Down-regulated in Transcription
  misc_feature: MA Experiment 108546 PARAMETER Experiment Name: Zm_Imbibed_Seeds_P Parameter: Age (day) Value: 3 vs. 2
  misc_feature: MA Experiment 108546 PARAMETER Experiment Name: Zm_Imbibed_Seeds_P Parameter: Organism Value: Zea mays
  misc_feature: MA Experiment 108546 PARAMETER Experiment Name: Zm_Imbibed_Seeds_P Parameter: Plant Line Value: 35A19
  misc_feature: MA Experiment 108546 PARAMETER Experiment Name: Zm_Imbibed_Seeds_P Parameter: Tissue Value: Roots vs. Embryo
  misc_feature: MA Experiment ID: 108547 Result: Down-regulated in Transcription
  misc_feature: MA Experiment 108547 PARAMETER Experiment Name: Zm_Imbibed_Seeds_P Parameter: Age (day) Value: 4 vs. 2
  misc_feature: MA Experiment 108547 PARAMETER Experiment Name: Zm_Imbibed_Seeds_P Parameter: Organism Value: Zea mays
  misc_feature: MA Experiment 108547 PARAMETER Experiment Name: Zm_Imbibed_Seeds_P Parameter: Plant Line Value: 35A19
  misc_feature: MA Experiment 108547 PARAMETER Experiment Name: Zm_Imbibed_Seeds_P Parameter: Tissue Value: Aerial vs. Embryo
  misc_feature: MA Experiment ID: 108556 Result: Up-regulated in Transcription
  misc_feature: MA Experiment 108556 PARAMETER Experiment Name: Zm_Drought_P Parameter: Age (day) Value: 9
  misc_feature: MA Experiment 108556 PARAMETER Experiment Name: Zm_Drought_P Parameter: Organism Value: Zea mays
  misc_feature: MA Experiment 108556 PARAMETER Experiment Name: Zm_Drought_P Parameter: Plant Line Value: 35A19
  misc_feature: MA Experiment 108556 PARAMETER Experiment Name: Zm_Drought_P Parameter: Timepoint (hr) Value: 24
  misc_feature: MA Experiment 108556 PARAMETER Experiment Name: Zm_Drought_P Parameter: Tissue Value: Aerial
  misc_feature: MA Experiment 108556 PARAMETER Experiment Name: Zm_Drought_P Parameter: Treatment Value: Drought vs. No Drought
  misc_feature: MA Experiment ID: 108559 Result: Up-regulated in Transcription
  misc_feature: MA Experiment 108559 PARAMETER Experiment Name: Zm_5mM_NO_P Parameter: Age (day) Value: 8
  misc_feature: MA Experiment 108559 PARAMETER Experiment Name: Zm_5mM_NO_P Parameter: Organism Value: Zea mays
  misc_feature: MA Experiment 108559 PARAMETER Experiment Name: Zm_5mM_NO_P Parameter: Plant Line Value: 35A19
  misc_feature: MA Experiment 108559 PARAMETER Experiment Name: Zm_5mM_NO_P Parameter: Timepoint (hr) Value: 12
  misc_feature: MA Experiment 108559 PARAMETER Experiment Name: Zm_5mM_NO_P Parameter: Tissue Value: Aerial
  misc_feature: MA Experiment 108559 PARAMETER Experiment Name: Zm_5mM_NO_P Parameter: Treatment Value: 5mM NO vs. No Treatment
  misc_feature: MA Experiment ID: 20000477 Result: Up-regulated in Transcription
  misc_feature: MA Experiment 20000477 PARAMETER Experiment Name: Zm_5mM_SA_P Parameter: Age (day) Value: 10
  misc_feature: MA Experiment 20000477 PARAMETER Experiment Name: Zm_5mM_SA_P Parameter: Organism Value: Zea mays
  misc_feature: MA Experiment 20000477 PARAMETER Experiment Name: Zm_5mM_SA_P Parameter: Plant Line Value: 35A19
  misc_feature: MA Experiment 20000477 PARAMETER Experiment Name: Zm_5mM_SA_P Parameter: Timepoint (hr) Value: 48
  misc_feature: MA Experiment 20000477 PARAMETER Experiment Name: Zm_5mM_SA_P Parameter: Tissue Value: Aerial
  misc_feature: MA Experiment 20000477 PARAMETER Experiment Name: Zm_5mM_SA_P Parameter: Treatment Value: 5mM SA vs. No Treatment
  misc_feature: MA Experiment ID: 20000478 Result: Up-regulated in Transcription
  misc_feature: MA Experiment 20000478 PARAMETER Experiment Name: Zm_5mM_SA_P Parameter: Age (day) Value: 11
  misc_feature: MA Experiment 20000478 PARAMETER Experiment Name: Zm_5mM_SA_P Parameter: Organism Value: Zea mays
  misc_feature: MA Experiment 20000478 PARAMETER Experiment Name: Zm_5mM_SA_P Parameter: Plant Line Value: 35A19
  misc_feature: MA Experiment 20000478 PARAMETER Experiment Name: Zm_5mM_SA_P Parameter: Timepoint (hr) Value: 72
  misc_feature: MA Experiment 20000478 PARAMETER Experiment Name: Zm_5mM_SA_P Parameter: Tissue Value: Aerial
  misc_feature: MA Experiment 20000478 PARAMETER Experiment Name: Zm_5mM_SA_P Parameter: Treatment Value: 5mM SA vs. No Treatment
  misc_feature: MA Experiment ID: 20000479 Result: Up-regulated in Transcription
  misc_feature: MA Experiment 20000479 PARAMETER Experiment Name: Zm_Drought_P Parameter: Age (day) Value: 10
  misc_feature: MA Experiment 20000479 PARAMETER Experiment Name: Zm_Drought_P Parameter: Organism Value: Zea mays
  misc_feature: MA Experiment 20000479 PARAMETER Experiment Name: Zm_Drought_P Parameter: Plant Line Value: 35A19
  misc_feature: MA Experiment 20000479 PARAMETER Experiment Name: Zm_Drought_P Parameter: Timepoint (hr) Value: 48
  misc_feature: MA Experiment 20000479 PARAMETER Experiment Name: Zm_Drought_P Parameter: Tissue Value: Aerial
  misc_feature: MA Experiment 20000479 PARAMETER Experiment Name: Zm_Drought_P Parameter: Treatment Value: Drought vs. No Drought
  misc_feature: MA Experiment ID: 20000480 Result: Up-regulated in Transcription
  misc_feature: MA Experiment 20000480 PARAMETER Experiment Name: Zm_Drought_P Parameter: Age (day) Value: 11
  misc_feature: MA Experiment 20000480 PARAMETER Experiment Name: Zm_Drought_P Parameter: Organism Value: Zea mays
  misc_feature: MA Experiment 20000480 PARAMETER Experiment Name: Zm_Drought_P Parameter: Plant Line Value: 35A19
  misc_feature: MA Experiment 20000480 PARAMETER Experiment Name: Zm_Drought_P Parameter: Timepoint (hr) Value: 72
  misc_feature: MA Experiment 20000480 PARAMETER Experiment Name: Zm_Drought_P Parameter: Tissue Value: Aerial
  misc_feature: MA Experiment 20000480 PARAMETER Experiment Name: Zm_Drought_P Parameter: Treatment Value: Drought vs. No Drought
  misc_feature: MA Experiment ID: 20000492 Result: Down-regulated in Transcription
  misc_feature: MA Experiment 20000492 PARAMETER Experiment Name: Zm_Hybrid_Seed_Dev_P Parameter: DAP Value: 12
  misc_feature: MA Experiment 20000492 PARAMETER Experiment Name: Zm_Hybrid_Seed_Dev_P Parameter: Organism Value: Zea mays
  misc_feature: MA Experiment 20000492 PARAMETER Experiment Name: Zm_Hybrid_Seed_Dev_P Parameter: Plant Line Value: 35A19
  misc_feature: MA Experiment 20000492 PARAMETER Experiment Name: Zm_Hybrid_Seed_Dev_P Parameter: Tissue Value: Fert Kernel vs. Unfert Floret
  misc_feature: MA Experiment ID: 20000532 Result: Up-regulated in Transcription
  misc_feature: MA Experiment 20000532 PARAMETER Experiment Name: Zm_0.001percent_MeJA_P Parameter: Age (day) Value: 10
  misc_feature: MA Experiment 20000532 PARAMETER Experiment Name: Zm_0.001percent_MeJA_P Parameter: Organism Value: Zea mays
  misc_feature: MA Experiment 20000532 PARAMETER Experiment Name: Zm_0.001percent_MeJA_P Parameter: Plant Line Value: 35A19
  misc_feature: MA Experiment 20000532 PARAMETER Experiment Name: Zm_0.001percent_MeJA_P Parameter: Timepoint (hr) Value: 48
  misc_feature: MA Experiment 20000532 PARAMETER Experiment Name: Zm_0.001percent_MeJA_P Parameter: Tissue Value: Aerial
  misc_feature: MA Experiment 20000532 PARAMETER Experiment Name: Zm_0.001percent_MeJA_P Parameter: Treatment Value: 0.001percent MeJA vs. No Treatment
  misc_feature: MA Experiment ID: 20000533 Result: Up-regulated in Transcription
  misc_feature: MA Experiment 20000533 PARAMETER Experiment Name: Zm_0.001percent_MeJA_P Parameter: Age (day) Value: 11
  misc_feature: MA Experiment 20000533 PARAMETER Experiment Name: Zm_0.001percent_MeJA_P Parameter: Organism Value: Zea mays
  misc_feature: MA Experiment 20000533 PARAMETER Experiment Name: Zm_0.001percent_MeJA_P Parameter: Plant Line Value: 35A19
  misc_feature: MA Experiment 20000533 PARAMETER Experiment Name: Zm_0.001percent_MeJA_P Parameter: Timepoint (hr) Value: 72
  misc_feature: MA Experiment 20000533 PARAMETER Experiment Name: Zm_0.001percent_MeJA_P Parameter: Tissue Value: Aerial
  misc_feature: MA Experiment 20000533 PARAMETER Experiment Name: Zm_0.001percent_MeJA_P Parameter: Treatment Value: 0.001percent MeJA vs. No Treatment
  misc_feature: MA Experiment ID: 20000626 Result: Up-regulated in Transcription
  misc_feature: MA Experiment 20000626 PARAMETER Experiment Name: Zm_Herbicide-Treatments_P Parameter: Timepoint (hr) Value: 12
  misc_feature: MA Experiment 20000626 PARAMETER Experiment Name: Zm_Herbicide-Treatments_P Parameter: Tissue Value: Aerial
  misc_feature: MA Experiment 20000626 PARAMETER Experiment Name: Zm_Herbicide-Treatments_P Parameter: Treatment Value: Roundup vs. No Treatment
  misc_feature: MA Experiment ID: 20000630 Result: Up-regulated in Transcription
  misc_feature: MA Experiment 20000630 PARAMETER Experiment Name: Zm_Herbicide-Treatments_P Parameter: Timepoint (hr) Value: 4
  misc_feature: MA Experiment 20000630 PARAMETER Experiment Name: Zm_Herbicide-Treatments_P Parameter: Tissue Value: Aerial
  misc_feature: MA Experiment 20000630 PARAMETER Experiment Name: Zm_Herbicide-Treatments_P Parameter: Treatment Value: Roundup vs. No Treatment
  misc_feature: MA Experiment ID: 20001610 Result: Up-regulated in Transcription
  misc_feature: MA Experiment 20001610 PARAMETER Experiment Name: Zm_50ppm_KNO3_L-to-H_P Parameter: Age (day) Value: 19
  misc_feature: MA Experiment 20001610 PARAMETER Experiment Name: Zm_50ppm_KNO3_L-to-H_P Parameter: Organism Value: Zea mays
  misc_feature: MA Experiment 20001610 PARAMETER Experiment Name: Zm_50ppm_KNO3_L-to-H_P Parameter: Plant Line Value: 35A19
  misc_feature: MA Experiment 20001610 PARAMETER Experiment Name: Zm_50ppm_KNO3_L-to-H_P Parameter: Timepoint (hr) Value: 2
  misc_feature: MA Experiment 20001610 PARAMETER Experiment Name: Zm_50ppm_KNO3_L-to-H_P Parameter: Tissue Value: Roots
  misc_feature: MA Experiment 20001610 PARAMETER Experiment Name: Zm_50ppm_KNO3_L-to-H_P Parameter: Treatment Value: 50ppm KNO3 vs. 50ppm KCl
  misc_feature: MA Experiment ID: 20001612 Result: Up-regulated in Transcription
  misc_feature: MA Experiment 20001612 PARAMETER Experiment Name: Zm_50ppm_KNO3_L-to-H_P Parameter: Age (day) Value: 19
  misc_feature: MA Experiment 20001612 PARAMETER Experiment Name: Zm_50ppm_KNO3_L-to-H_P Parameter: Organism Value: Zea mays
  misc_feature: MA Experiment 20001612 PARAMETER Experiment Name: Zm_50ppm_KNO3_L-to-H_P Parameter: Plant Line Value: 35A19
  misc_feature: MA Experiment 20001612 PARAMETER Experiment Name: Zm_50ppm_KNO3_L-to-H_P Parameter: Timepoint (hr) Value: 8
  misc_feature: MA Experiment 20001612 PARAMETER Experiment Name: Zm_50ppm_KNO3_L-to-H_P Parameter: Tissue Value: Roots
  misc_feature: MA Experiment 20001612 PARAMETER Experiment Name: Zm_50ppm_KNO3_L-to-H_P Parameter: Treatment Value: 50ppm KNO3 vs. 50ppm KCl
  misc_feature: MA Experiment ID: 20001613 Result: Up-regulated in Transcription
  misc_feature: MA Experiment 20001613 PARAMETER Experiment Name: Zm_50ppm_KNO3_L-to-H_P Parameter: Age (day) Value: 20
  misc_feature: MA Experiment 20001613 PARAMETER Experiment Name: Zm_50ppm_KNO3_L-to-H_P Parameter: Organism Value: Zea mays
  misc_feature: MA Experiment 20001613 PARAMETER Experiment Name: Zm_50ppm_KNO3_L-to-H_P Parameter: Plant Line Value: 35A19
  misc_feature: MA Experiment 20001613 PARAMETER Experiment Name: Zm_50ppm_KNO3_L-to-H_P Parameter: Timepoint (hr) Value: 24
  misc_feature: MA Experiment 20001613 PARAMETER Experiment Name: Zm_50ppm_KNO3_L-to-H_P Parameter: Tissue Value: Roots
  misc_feature: MA Experiment 20001613 PARAMETER Experiment Name: Zm_50ppm_KNO3_L-to-H_P Parameter: Treatment Value: 50ppm KNO3 vs. 50ppm KCl
agtccgtagccgcttgccctgttcgcatcttcgcgcgtggcgcacaccgctccagctctccttcgacgggcacggccgagccgccttcgtcttggccgcagcggtgcgcgctctccatggcgtcctaattagcctagccgcaacgccgcgcccgtgcctgcgaagtagggtgtaaagttttgtatatgatgccaggcatggatgaaccccttcttggcaatggtcttaagaccagcgggaaaagagagagcctggtagtggccgaggtcagaaaacagatgtaccttgctgggccactcatcgctgcatggatcctacagaacattgtccagatgatatctatcatgtttgtcggtcaccttggtgagcttgccctctccagtgcctccatcgccacctcctttgcaggcgttactggcttcagcttattgtctggcatggcgagcagcttggacacactgtgtgggcaatcgttcggggcaaagcagtactatcttcttggcatctacaagcagagggcaatccttgtgctcactctagtcagccttgtggttgcgattatttggtcatacactggacagatccttctactctttggtcaggatccagagattgcagctggggcagggagctatatccggtggatgattcctgcgctatttgtgtatggtccactacagtgccatgtccggtttctgcaaacgcagaacatagtcctcccagtgatgctgagctcaggtgccacagcactgaaccatctgctggtgtgctggctgctggtgtacaagattggtatgggcaacaagggtgctgccttggccaatgccatctcatactttaccaatgtatcaatcctggcaatttacgtcaggcttgcaccagcctgtagaaacacctggagagggttctcaaaggaggcttttcatgacataaccagcttcttgaggcttggtattccatctgcgctgatggtttgcttggagtggtggtcatttgagctcctggtacttctttctggacttctccccaatccaaagcttgagacatcggttttgtccatttccttaaacacaggctctttagcgtttatgatcccttttgggcttagcgcagccataagcacccgtgtttcaaatgaacttggtgctgggcgaccccatgctgcccatctggctacccgtgtggtcatggtgctggccatcgtggttggcgtattaatcggactagctatgattttggtgcgcaatatctgggggtatgcatacagtaatgagaaggaggtggtcaaatacatctccaaaatgatgccgatcctagccgtgtcattcttgttcgattgcgtgcagtgtgttctttcaggtgttgctaggggctgtggatggcaaaagattggggcttgtgttaatcttggtgcatactaccttataggaattccagctgccttctgtttcgcctttatgtaccatctaggtggaatgggactttggttgggaataatctgcgcactcgtcatacagatgctattgcttctcacaattaccttgtgcagcaactgggagaaagaagctttgaaggcaaaggacagagtatttagtacatccgtaccagctgacatgatgacatgatatttctgaagatatttttttgaaggaaatgcccatgaaactttgccaaggaacatactaagaattggttgttcagattcaaggcctttctccatgccatcagaatgatgcttgggtctagtaatagctcctgagcagtctgttttttacttttggtcaatactcaatacatggaagatgtttggtttgaagaaccacgccatcctagatgaggtggtatattataagttgatataacggctccatactagttattgaggaatgagacgatgattatctcatgtaataataatgcttttccccctctagttattgatgtaagacaattgaggcaaatgaacaaaatgtcacatttgatt

SEQ ID NO: 10806 - protein, 479 aa, Zea mays subsp. mays
  peptide (1)..(479): Ceres Seq. ID no. 12405664
  misc_feature (37)..(197): Pfam Name: MatE Pfam Description: MatE
  misc_feature (3)..(477): Homolog of NCBI NO: 38346676 NR Description: OSJNBa0069D17.7 [Oryza sativa (japonica
  misc_feature (5)..(460): Homolog of NCBI NO: 22138480 NR Description: hypothetical protein [Oryza sativa (japonica
  misc_feature (11)..(474): Homolog of NCBI NO: 37533148 NR Description: putative transmembrane protein [Oryza sativa
  misc_feature (5)..(474): Homolog of NCBI NO: 37533146 NR Description: putative integral membrane protein [Oryza sativa
  misc_feature (18)..(476): Homolog of NCBI NO: 15237158 NR Description: MATE efflux family protein, putative; protein id: supported by cDNA: gi_15028278, supported by cDNA: gi_19310632 thaliana] >gi|10177411|dbj|BAB10542.1|
  misc_feature (18)..(478): Homolog of NCBI NO: 16797803 NR Description: hypothetical membrane protein-1 [Marchantia
  misc_feature (8)..(460): Homolog of NCBI NO: 15226290 NR Description: hypothetical protein; protein id: At2g34360.1
  misc_feature (1)..(471): Homolog of NCBI NO: 15219524 NR Description: putative integral membrane protein; protein id: supported by cDNA: 125771. [Arabidopsis thaliana]
  misc_feature (1)..(471): Homolog of NCBI NO: 21537267 NR Description: putative integral membrane protein [Arabidopsis
  misc_feature (27)..(468): Homolog of NCBI NO: 15223961 NR Description: hypothetical protein; protein id: At1g71140.1
MMPGMDEPLLGNGLKTSGKRESLVVAEVRKQMYLAGPLIAAWILQNIVQMISIMFVGHLGELALSSASIATSFAGVTGFSLLSGMASSLDTLCGQSFGAKQYYLLGIYKQRAILVLTLVSLVVAIIWSYTGQILLLFGQDPEIAAGAGSYIRWMIPALFVYGPLQCHVRFLQTQNIVLPVMLSSGATALNHLLVCWLLVYKIGMGNKGAALANAISYFTNVSILAIYVRLAPACRNTWRGFSKEAFHDITSFLRLGIPSALMVCLEWWSFELLVLLSGLLPNPKLETSVLSISLNTGSLAFMIPFGLSAAISTRVSNELGAGRPHAAHLATRVVMVLAIVVGVLIGLAMILVRNIWGYAYSNEKEVVKYISKMMPILAVSFLFDCVQCVLSGVARGCGWQKIGACVNLGAYYLIGIPAAFCFAFMYHLGGMGLWLGIICALVIQMLLLLTITLCSNWEKEALKAKDRVFSTSVPADMMT

SEQ ID NO: 10807 - protein, 478 aa, Zea mays subsp. mays
  peptide (1)..(478): Ceres Seq. ID no. 12405665
  misc_feature (36)..(196): Pfam Name: MatE Pfam Description: MatE
  misc_feature (2)..(476): Homolog of NCBI NO: 38346676 NR Description: OSJNBa0069D17.7 [Oryza sativa (japonica
  misc_feature (4)..(459): Homolog of NCBI NO: 22138480 NR Description: hypothetical protein [Oryza sativa (japonica
  misc_feature (10)..(473): Homolog of NCBI NO: 37533148 NR Description: putative transmembrane protein [Oryza sativa
  misc_feature (4)..(473): Homolog of NCBI NO: 37533146 NR Description: putative integral membrane protein [Oryza sativa
  misc_feature (17)..(475): Homolog of NCBI NO: 15237158 NR Description: MATE efflux family protein, putative; protein id: supported by cDNA: gi_15028278, supported by cDNA: gi_19310632 thaliana] >gi|10177411|dbj|BAB10542.1|
  misc_feature (17)..(477): Homolog of NCBI NO: 16797803 NR Description: hypothetical membrane protein-1 [Marchantia
  misc_feature (7)..(459): Homolog of NCBI NO: 15226290 NR Description: hypothetical protein; protein id: At2g34360.1
  misc_feature (1)..(470): Homolog of NCBI NO: 15219524 NR Description: putative integral membrane protein; protein id: supported by cDNA: 125771. [Arabidopsis thaliana]
  misc_feature (1)..(470): Homolog of NCBI NO: 21537267 NR Description: putative integral membrane protein [Arabidopsis
  misc_feature (26)..(467): Homolog of NCBI NO: 15223961 NR Description: hypothetical protein; protein id: At1g71140.1
MPGMDEPLLGNGLKTSGKRESLVVAEVRKQMYLAGPLIAAWILQNIVQMISIMFVGHLGELALSSASIATSFAGVTGFSLLSGMASSLDTLCGQSFGAKQYYLLGIYKQRAILVLTLVSLVVAIIWSYTGQILLLFGQDPEIAAGAGSYIRWMIPALFVYGPLQCHVRFLQTQNIVLPVMLSSGATALNHLLVCWLLVYKIGMGNKGAALANAISYFTNVSILAIYVRLAPACRNTWRGFSKEAFHDITSFLRLGIPSALMVCLEWWSFELLVLLSGLLPNPKLETSVLSISLNTGSLAFMIPFGLSAAISTRVSNELGAGRPHAAHLATRVVMVLAIVVGVLIGLAMILVRNIWGYAYSNEKEVVKYISKMMPILAVSFLFDCVQCVLSGVARGCGWQKIGACVNLGAYYLIGIPAAFCFAFMYHLGGMGLWLGIICALVIQMLLLLTITLCSNWEKEALKAKDRVFSTSVPADMMT

SEQ ID NO: 10808 - protein, 475 aa, Zea mays subsp. mays
  peptide (1)..(475): Ceres Seq. ID no. 12405666
  misc_feature (33)..(193): Pfam Name: MatE Pfam Description: MatE
  misc_feature (23)..(464): Homolog of NCBI NO: 15223961 NR Description: hypothetical protein; protein id: At1g71140.1
  misc_feature (1)..(473): Homolog of NCBI NO: 38346676 NR Description: OSJNBa0069D17.7 [Oryza sativa (japonica
  misc_feature (1)..(456): Homolog of NCBI NO: 22138480 NR Description: hypothetical protein [Oryza sativa (japonica
  misc_feature (7)..(470): Homolog of NCBI NO: 37533148 NR Description: putative transmembrane protein [Oryza sativa
  misc_feature (1)..(470): Homolog of NCBI NO: 37533146 NR Description: putative integral membrane protein [Oryza sativa
  misc_feature (14)..(472): Homolog of NCBI NO: 15237158 NR Description: MATE efflux family protein, putative; protein id: supported by cDNA: gi_15028278, supported by cDNA: gi_19310632 thaliana] >gi|10177411|dbj|BAB10542.1|
  misc_feature (14)..(474): Homolog of NCBI NO: 16797803 NR Description: hypothetical membrane protein-1 [Marchantia
  misc_feature (4)..(456): Homolog of NCBI NO: 15226290 NR Description: hypothetical protein; protein id: At2g34360.1
  misc_feature (1)..(467): Homolog of NCBI NO: 15219524 NR Description: putative integral membrane protein; protein id: supported by cDNA: 125771. [Arabidopsis thaliana]
  misc_feature (1)..(467): Homolog of NCBI NO: 21537267 NR Description: putative integral membrane protein [Arabidopsis
MDEPLLGNGLKTSGKRESLVVAEVRKQMYLAGPLIAAWILQNIVQMISIMFVGHLGELALSSASIATSFAGVTGFSLLSGMASSLDTLCGQSFGAKQYYLLGIYKQRAILVLTLVSLVVAIIWSYTGQILLLFGQDPEIAAGAGSYIRWMIPALFVYGPLQCHVRFLQTQNIVLPVMLSSGATALNHLLVCWLLVYKIGMGNKGAALANAISYFTNVSILAIYVRLAPACRNTWRGFSKEAFHDITSFLRLGIPSALMVCLEWWSFELLVLLSGLLPNPKLETSVLSISLNTGSLAFMIPFGLSAAISTRVSNELGAGRPHAAHLATRVVMVLAIVVGVLIGLAMILVRNIWGYAYSNEKEVVKYISKMMPILAVSFLFDCVQCVLSGVARGCGWQKIGACVNLGAYYLIGIPAAFCFAFMYHLGGMGLWLGIICALVIQMLLLLTITLCSNWEKEALKAKDRVFSTSVPADMMT

SEQ ID NO: 10809 - DNA, 1867 bp, Zea mays subsp. mays; identical to SEQ ID NO: 5557
  misc_feature (1)..(1867): Ceres Seq. ID no. 12595058
  misc_feature: MA Experiment ID: 108527 Result: Up-regulated in Transcription
  misc_feature: MA Experiment 108527 PARAMETER Experiment Name: Zm_5mM_NO_P Parameter: Age (day) Value: 8
  misc_feature: MA Experiment 108527 PARAMETER Experiment Name: Zm_5mM_NO_P Parameter: Organism Value: Zea mays
  misc_feature: MA Experiment 108527 PARAMETER Experiment Name: Zm_5mM_NO_P Parameter: Plant Line Value: 35A19
  misc_feature: MA Experiment 108527 PARAMETER Experiment Name: Zm_5mM_NO_P Parameter: Timepoint (hr) Value: 6
  misc_feature: MA Experiment 108527 PARAMETER Experiment Name: Zm_5mM_NO_P Parameter: Tissue Value: Aerial
  misc_feature: MA Experiment 108527 PARAMETER Experiment Name: Zm_5mM_NO_P Parameter: Treatment Value: 5mM NO vs. No Treatment
  misc_feature: MA Experiment ID: 20000488 Result: Up-regulated in Transcription
  misc_feature: MA Experiment 20000488 PARAMETER Experiment Name: Zm_50mM_NH4NO3_L_to_H_P Parameter: Organism Value: Zea mays
  misc_feature: MA Experiment 20000488 PARAMETER Experiment Name: Zm_50mM_NH4NO3_L_to_H_P Parameter: Timepoint (hr) Value: 8
  misc_feature: MA Experiment 20000488 PARAMETER Experiment Name: Zm_50mM_NH4NO3_L_to_H_P Parameter: Tissue Value: Leaves
  misc_feature: MA Experiment 20000488 PARAMETER Experiment Name: Zm_50mM_NH4NO3_L_to_H_P Parameter: Treatment Value: 50mM NH4NO3 vs. 100mM Mannitol
  misc_feature: MA Experiment ID: 20000535 Result: Down-regulated in Transcription
  misc_feature: MA Experiment 20000535 PARAMETER Experiment Name: Zm_Hybrid_Seed_Dev_P Parameter: DAP Value: 30 vs. 12
  misc_feature: MA Experiment 20000535 PARAMETER Experiment Name: Zm_Hybrid_Seed_Dev_P Parameter: Organism Value: Zea mays
  misc_feature: MA Experiment 20000535 PARAMETER Experiment Name: Zm_Hybrid_Seed_Dev_P Parameter: Plant Line Value: 35A19
  misc_feature: MA Experiment 20000535 PARAMETER Experiment Name: Zm_Hybrid_Seed_Dev_P Parameter: Tissue Value: Embryo vs. Unfert Floret

SEQ ID NO: 10810 - protein, 245 aa, Zea mays subsp. mays; identical to SEQ ID NO: 5558
  peptide (1)..(245): Ceres Seq. ID no. 12595059
  misc_feature (78)..(211): Homolog of NCBI NO: 34910020 NR Description: putative purple acid phosphatase [Oryza sativa
  misc_feature (92)..(211): Homolog of NCBI NO: 11262827 NR Description: acid phosphatase (EC 3.1.3.2) purple 1, precursor
  misc_feature (73)..(211): Homolog of NCBI NO: 27597229 NR Description: purple acid phosphatase [Nicotiana tabacum]
  misc_feature (92)..(211): Homolog of NCBI NO: 11262828 NR Description: acid phosphatase (EC 3.1.3.2) purple 2, precursor
  misc_feature (95)..(211): Homolog of NCBI NO: 15227205 NR Description: putative purple acid phosphatase precursor; id: At2g16430.1, supported by cDNA: gi_20257482, supported by gi_20260673 [Arabidopsis thaliana] >gi|25752261|pir||B84540 acid
  misc_feature (108)..(211): Homolog of NCBI NO: 11262830 NR Description: acid phosphatase (EC 3.1.3.2) purple PAP32,
  misc_feature (78)..(211): Homolog of NCBI NO: 34910020 NR Description: putative purple acid phosphatase [Oryza sativa
  misc_feature (92)..(211): Homolog of NCBI NO: 11262827 NR Description: acid phosphatase (EC 3.1.3.2) purple 1, precursor
  misc_feature (73)..(211): Homolog of NCBI NO: 27597229 NR Description: purple acid phosphatase [Nicotiana tabacum]
  misc_feature (92)..(211): Homolog of NCBI NO: 11262828 NR Description: acid phosphatase (EC 3.1.3.2) purple 2, precursor
  misc_feature (95)..(211): Homolog of NCBI NO: 15227205 NR Description: putative purple acid phosphatase precursor; id: At2g16430.1, supported by cDNA: gi_20257482, supported by gi_20260673 [Arabidopsis thaliana] >gi|25752261|pir||B84540 acid
  misc_feature (108)..(211): Homolog of NCBI NO: 11262830 NR Description: acid phosphatase (EC 3.1.3.2) purple PAP32,

SEQ ID NO: 10811 - protein, 227 aa, Zea mays subsp. mays; identical to SEQ ID NO: 5559
  peptide (1)..(227): Ceres Seq. ID no. 12595060
  misc_feature (1)..(115): Homolog of NCBI NO: 34910020 NR Description: putative purple acid phosphatase [Oryza sativa
  misc_feature (1)..(115): Homolog of NCBI NO: 11262827 NR Description: acid phosphatase (EC 3.1.3.2) purple 1, precursor
  misc_feature (1)..(115): Homolog of NCBI NO: 27597229 NR Description: purple acid phosphatase [Nicotiana tabacum]
  misc_feature (1)..(115): Homolog of NCBI NO: 11262828 NR Description: acid phosphatase (EC 3.1.3.2) purple 2, precursor
  misc_feature (1)..(115): Homolog of NCBI NO: 15227205 NR Description: putative purple acid phosphatase precursor; id: At2g16430.1, supported by cDNA: gi_20257482, supported by gi_20260673 [Arabidopsis thaliana] >gi|25752261|pir||B84540 acid
  misc_feature (1)..(115): Homolog of NCBI NO: 11262830 NR Description: acid phosphatase (EC 3.1.3.2) purple PAP32,
  misc_feature (1)..(115): Homolog of NCBI NO: 34910020 NR Description: putative purple acid phosphatase [Oryza sativa
  misc_feature (1)..(115): Homolog of NCBI NO: 11262827 NR Description: acid phosphatase (EC 3.1.3.2) purple 1, precursor
  misc_feature (1)..(115): Homolog of NCBI NO: 27597229 NR Description: purple acid phosphatase [Nicotiana tabacum]
  misc_feature (1)..(115): Homolog of NCBI NO: 11262828 NR Description: acid phosphatase (EC 3.1.3.2) purple 2, precursor
  misc_feature (1)..(115): Homolog of NCBI NO: 15227205 NR Description: putative purple acid phosphatase precursor; id: At2g16430.1, supported by cDNA: gi_20257482, supported by gi_20260673 [Arabidopsis thaliana] >gi|25752261|pir||B84540 acid
  misc_feature (1)..(115): Homolog of NCBI NO: 11262830 NR Description: acid phosphatase (EC 3.1.3.2) purple PAP32,

SEQ ID NO: 10812 - protein, 214 aa, Zea mays subsp. mays; identical to SEQ ID NO: 5560
  peptide (1)..(214): Ceres Seq. ID no. 12595061
  misc_feature (1)..(102): Homolog of NCBI NO: 34910020 NR Description: putative purple acid phosphatase [Oryza sativa
  misc_feature (1)..(102): Homolog of NCBI NO: 11262827 NR Description: acid phosphatase (EC 3.1.3.2) purple 1, precursor
  misc_feature (1)..(102): Homolog of NCBI NO: 27597229 NR Description: purple acid phosphatase [Nicotiana tabacum]
  misc_feature (1)..(102): Homolog of NCBI NO: 11262828 NR Description: acid phosphatase (EC 3.1.3.2) purple 2, precursor
  misc_feature (1)..(102): Homolog of NCBI NO: 15227205 NR Description: putative purple acid phosphatase precursor; id: At2g16430.1, supported by cDNA: gi_20257482, supported by gi_20260673 [Arabidopsis thaliana] >gi|25752261|pir||B84540 acid
  misc_feature (1)..(102): Homolog of NCBI NO: 11262830 NR Description: acid phosphatase (EC 3.1.3.2) purple PAP32,
  misc_feature (1)..(102): Homolog of NCBI NO: 34910020 NR Description: putative purple acid phosphatase [Oryza sativa
  misc_feature (1)..(102): Homolog of NCBI NO: 11262827 NR Description: acid phosphatase (EC 3.1.3.2) purple 1, precursor
  misc_feature (1)..(102): Homolog of NCBI NO: 27597229 NR Description: purple acid phosphatase [Nicotiana tabacum]
  misc_feature (1)..(102): Homolog of NCBI NO: 11262828 NR Description: acid phosphatase (EC 3.1.3.2) purple 2, precursor
  misc_feature (1)..(102): Homolog of NCBI NO: 15227205 NR Description: putative purple acid phosphatase precursor; id: At2g16430.1, supported by cDNA: gi_20257482, supported by gi_20260673 [Arabidopsis thaliana] >gi|25752261|pir||B84540 acid
  misc_feature (1)..(102): Homolog of NCBI NO: 11262830 NR Description: acid phosphatase (EC 3.1.3.2) purple PAP32,

SEQ ID NO: 10813 - protein, 173 aa, Zea mays subsp. mays; identical to SEQ ID NO: 5561
  peptide (1)..(173): Ceres Seq. ID no. 12595062
  misc_feature (6)..(139): Homolog of NCBI NO: 34910020 NR Description: putative purple acid phosphatase [Oryza sativa
  misc_feature (20)..(139): Homolog of NCBI NO: 11262827 NR Description: acid phosphatase (EC 3.1.3.2) purple 1, precursor
  misc_feature (1)..(139): Homolog of NCBI NO: 27597229 NR Description: purple acid phosphatase [Nicotiana tabacum]
  misc_feature (20)..(139): Homolog of NCBI NO: 11262828 NR Description: acid phosphatase (EC 3.1.3.2) purple 2, precursor
  misc_feature (23)..(139): Homolog of NCBI NO: 15227205 NR Description: putative purple acid phosphatase precursor; id: At2g16430.1, supported by cDNA: gi_20257482, supported by gi_20260673 [Arabidopsis thaliana] >gi|25752261|pir||B84540 acid
  misc_feature (36)..(139): Homolog of NCBI NO: 11262830 NR Description: acid phosphatase (EC 3.1.3.2) purple PAP32,
  misc_feature (6)..(139): Homolog of NCBI NO: 34910020 NR Description: putative purple acid phosphatase [Oryza sativa
  misc_feature (20)..(139): Homolog of NCBI NO: 11262827 NR Description: acid phosphatase (EC 3.1.3.2) purple 1, precursor
  misc_feature (1)..(139): Homolog of NCBI NO: 27597229 NR Description: purple acid phosphatase [Nicotiana tabacum]
  misc_feature (20)..(139): Homolog of NCBI NO: 11262828 NR Description: acid phosphatase (EC 3.1.3.2) purple 2, precursor
  misc_feature (23)..(139): Homolog of NCBI NO: 15227205 NR Description: putative purple acid phosphatase precursor; id: At2g16430.1, supported by cDNA: gi_20257482, supported by gi_20260673 [Arabidopsis thaliana] >gi|25752261|pir||B84540 acid
  misc_feature (36)..(139): Homolog of NCBI NO: 11262830 NR Description: acid phosphatase (EC 3.1.3.2) purple PAP32,

SEQ ID NO: 10814 - DNA, 1711 bp, Zea mays subsp. mays
  misc_feature (1)..(1711): Ceres Seq. ID no. 12361402
  misc_feature: MA Experiment ID: 108535 Result: Up-regulated in Transcription
  misc_feature: MA Experiment 108535 PARAMETER Experiment Name: Zm_Meristem_P Parameter: Age (day) Value: 8
  misc_feature: MA Experiment 108535 PARAMETER Experiment Name: Zm_Meristem_P Parameter: Organism Value: Zea mays
  misc_feature: MA Experiment 108535 PARAMETER Experiment Name: Zm_Meristem_P Parameter: Plant Line Value: 35A19
  misc_feature: MA Experiment 108535 PARAMETER Experiment Name: Zm_Meristem_P Parameter: Tissue Value: Root Meristem vs. Above Root Meristem
  misc_feature: MA Experiment ID: 108543 Result: Up-regulated in Transcription
  misc_feature: MA Experiment ID: 108544 Result: Down-regulated in Transcription
  misc_feature: MA Experiment ID: 108556 Result: Down-regulated in Transcription
  misc_feature: MA Experiment 108556 PARAMETER Experiment Name: Zm_Drought_P Parameter: Age (day) Value: 9
  misc_feature: MA Experiment 108556 PARAMETER Experiment Name: Zm_Drought_P Parameter: Organism Value: Zea mays
  misc_feature: MA Experiment 108556 PARAMETER Experiment Name: Zm_Drought_P Parameter: Plant Line Value: 35A19
  misc_feature: MA Experiment 108556 PARAMETER Experiment Name: Zm_Drought_P Parameter: Timepoint (hr) Value: 24
  misc_feature: MA Experiment 108556 PARAMETER Experiment Name: Zm_Drought_P Parameter: Tissue Value: Aerial
  misc_feature: MA Experiment 108556 PARAMETER Experiment Name: Zm_Drought_P Parameter: Treatment Value: Drought vs. No Drought
  misc_feature: MA Experiment ID: 20000478 Result: Down-regulated in Transcription
  misc_feature: MA Experiment 20000478 PARAMETER Experiment Name: Zm_5mM_SA_P Parameter: Age (day) Value: 11
  misc_feature: MA Experiment 20000478 PARAMETER Experiment Name: Zm_5mM_SA_P Parameter: Organism Value: Zea mays
  misc_feature: MA Experiment 20000478 PARAMETER Experiment Name: Zm_5mM_SA_P Parameter: Plant Line Value: 35A19
  misc_feature: MA Experiment 20000478 PARAMETER Experiment Name: Zm_5mM_SA_P Parameter: Timepoint (hr) Value: 72
  misc_feature: MA Experiment 20000478 PARAMETER Experiment Name: Zm_5mM_SA_P Parameter: Tissue Value: Aerial
  misc_feature: MA Experiment 20000478 PARAMETER Experiment Name: Zm_5mM_SA_P Parameter: Treatment Value: 5mM SA vs. No Treatment
  misc_feature: MA Experiment ID: 20000479 Result: Down-regulated in Transcription
  misc_feature: MA Experiment 20000479 PARAMETER Experiment Name: Zm_Drought_P Parameter: Age (day) Value: 10
  misc_feature: MA Experiment 20000479 PARAMETER Experiment Name: Zm_Drought_P Parameter: Organism Value: Zea mays
  misc_feature: MA Experiment 20000479 PARAMETER Experiment Name: Zm_Drought_P Parameter: Plant Line Value: 35A19
  misc_feature: MA Experiment 20000479 PARAMETER Experiment Name: Zm_Drought_P Parameter: Timepoint (hr) Value: 48
  misc_feature: MA Experiment 20000479 PARAMETER Experiment Name: Zm_Drought_P Parameter: Tissue Value: Aerial
  misc_feature: MA Experiment 20000479 PARAMETER Experiment Name: Zm_Drought_P Parameter: Treatment Value: Drought vs. No Drought
  misc_feature: MA Experiment ID: 20000480 Result: Down-regulated in Transcription
  misc_feature: MA Experiment 20000480 PARAMETER Experiment Name: Zm_Drought_P Parameter: Age (day) Value: 11
  misc_feature: MA Experiment 20000480 PARAMETER Experiment Name: Zm_Drought_P Parameter: Organism Value: Zea mays
  misc_feature: MA Experiment 20000480 PARAMETER Experiment Name: Zm_Drought_P Parameter: Plant Line Value: 35A19
  misc_feature: MA Experiment 20000480 PARAMETER Experiment Name: Zm_Drought_P Parameter: Timepoint (hr) Value: 72
  misc_feature: MA Experiment 20000480 PARAMETER Experiment Name: Zm_Drought_P Parameter: Tissue Value: Aerial
  misc_feature: MA Experiment 20000480 PARAMETER Experiment Name: Zm_Drought_P Parameter: Treatment Value: Drought vs. No Drought
  misc_feature: MA Experiment ID: 20000626 Result: Down-regulated in Transcription
  misc_feature: MA Experiment 20000626 PARAMETER Experiment Name: Zm_Herbicide-Treatments_P Parameter: Timepoint (hr) Value: 12
  misc_feature: MA Experiment 20000626 PARAMETER Experiment Name: Zm_Herbicide-Treatments_P Parameter: Tissue Value: Aerial
  misc_feature: MA Experiment 20000626 PARAMETER Experiment Name: Zm_Herbicide-Treatments_P Parameter: Treatment Value: Roundup vs. No Treatment
aactaaccagctccggcccaaacacagccacgagcacctacacccccccgctgtcacctctccttccatcgccacaggcggcccttctccgcggaagccggcgggccgccgcctcccttacccctctcgctgtgctcctccgcaccgtcattccctagcattccccacgggcgaggtaaagaaacattctcccaccccctccagccccataggtgccaccgggatttctcttgcggttgcttggcccagatctgcggcgcattcggcgtttctgatctcgcgtgcacctcgtttccctcggcggtggatcagtggcggcttggtcgagatgggcgatgcggttgatgacatcatctgtgcaacggatgcggcggtcgccgtcgaggatgcggccagtgggaagcccgcaatgctctctagcttaggggggcagggtgaggaagagcatgaggagaaggacaatgaggacaagtcaggcgagagcgaggtgatcaacccgccagaagacgctggcggggaggccacctcacccctggaagggttgaagcctcgcctttccaaggggaatcaaagccatggacctaatgctgtcaaatcaaagagcccaacgagtggagacgaaggtcagacgaggaaaaaggctcccaattcttctcttcctaaggcacccattgtccaggtgtcccatggtgacgctggtgtcggcagtaataaagatggcaagaatgagtctcgctcatcttccgtggatgcaacattgctggatgactccaaggagaaaaggaaaactcaaaagccattagcacagctcttttccatcaaaagtgacgaagaacagtcaaatggtgagagtgcaaagcctcgaaaagttggcagcattccatcatatggtttcaccttcaagtgtgatgagagatctgaaaaaagaagagagttctattcgaagcttgaggagaagattcatgcaagagagttagaaataagcaatttgcaagcgaaatcaaaggaaactgaagaagcagaactcaaaatgctgagaaagagtttgaacttcaaggcaacaccaatgccaagcttctataaggaaccaactcctgtcaaggttgaattgaaaaagatccccccaacaagagccaaatcgccaaagtttggtcgttctaaaaacaagtccacaccagagactgaagaaaatgctaccgcggaccagcctgcccacctgagcctcgaggagaatgtttctcaaaccggtgtgaaaaaaccaaccccgttgaatccagcaaagaagccccagaggaagtcactccccagactgccatctgaagaaaccggtccgcttgatgccacctcaaggcaacttataaagagcgccaagctggatgcagttagtgctccggagacaggatcagctacaggacaggcacaactacaaggaagtcagacggaaacagattctggtcaggggccagttgaagctggagctaatcctgatgaacaagacgccagcgaacagagtgttgtttagtgaagatcacgatgaccaaaccagctgatttgtgatgtgcatggtgttcctcggctttgtataatattgtgcttgcctgctagagtaacctgtagtctgtattatgttatgtgatatatactactactcctggtttattttcctggaattgagccgtatgttgcttatcaatctagatagcttttgttc

SEQ ID NO: 10815 - protein, 506 aa, Zea mays subsp. mays
  peptide (1)..(506): Ceres Seq. ID no. 12361403
  misc_feature (111)..(502): Homolog of NCBI NO: 18417986 NR Description: putative protein; protein id: At4g32330.1, by cDNA: gi_14334555, supported by cDNA: gi_21280970 [Arabidopsis >gi|14334556|gb|AAK59686.1| unknown protein [Arabidopsis
  misc_feature (115)..(504): Homolog of NCBI NO: 15224733 NR Description: unknown protein; protein id: At2g25480.1
  misc_feature (157)..(434): Homolog of NCBI NO: 18403980 NR Description: expressed protein; protein id: At2g35880.1, by cDNA: gi_16209719 [Arabidopsis thaliana] At2g35880/F11F19.21 [Arabidopsis thaliana]
  misc_feature (230)..(434): Homolog of NCBI NO: 25408425 NR Description: hypothetical protein At2g35880 [imported] -
  misc_feature (122)..(372): Homolog of NCBI NO: 7485356 NR Description: hypothetical protein F10M6.40 - Arabidopsis >gi|2864611|emb|CAA16958.1| putative protein [Arabidopsis
  misc_feature (122)..(372): Homolog of NCBI NO: 7486636 NR Description: hypothetical protein F8B4.30 - Arabidopsis >gi|4049335|emb|CAA22560.1| putative protein [Arabidopsis >gi|7270137|emb|CAB79950.1| putative protein [Arabidopsis
  misc_feature (96)..(435): Homolog of NCBI NO: 34897180 NR Description: unknown protein [Oryza sativa (japonica
  misc_feature (145)..(389): Homolog of NCBI NO: 9294199 NR Description: gb|AAF04893.1~gene_id:MXC7.13~similar to unknown
  misc_feature (145)..(389): Homolog of NCBI NO: 15228950 NR Description: unknown protein; protein id: At3g23090.1 thaliana] >gi|27765054|gb|AAO23648.1| At3g23090 [Arabidopsis
  misc_feature (264)..(389): Homolog of NCBI NO: 32395575 NR Description: seed specific protein Bn15D14A [Brassica napus]
TNQLRPKHSHEHLHPPAVTSPSIATGGPSPRKPAGRRLPYPSRCAPPHRHSLAFPTGEVKKHSPTPSSPIGATGISLAVAWPRSAAHSAFLISRAPRFPRRWISGGLVEMGDAVDDIICATDAAVAVEDAASGKPAMLSSLGGQGEEEHEEKDNEDKSGESEVINPPEDAGGEATSPLEGLKPRLSKGNQSHGPNAVKSKSPTSGDEGQTRKKAPNSSLPKAPIVQVSHGDAGVGSNKDGKNESRSSSVDATLLDDSKEKRKTQKPLAQLFSIKSDEEQSNGESAKPRKVGSIPSYGFTFKCDERSEKRREFYSKLEEKIHARELEISNLQAKSKETEEAELKMLRKSLNFKATPMPSFYKEPTPVKVELKKIPPTRAKSPKFGRSKNKSTPETEENATADQPAHLSLEENVSQTGVKKPTPLNPAKKPQRKSLPRLPSEETGPLDATSRQLIKSAKLDAVSAPETGSATGQAQLQGSQTETDSGQGPVEAGANPDEQDASEQSVV

SEQ ID NO: 10816 - protein, 397 aa, Zea mays subsp. mays
  peptide (1)..(397): Ceres Seq. ID no. 12361404
  misc_feature (2)..(393): Homolog of NCBI NO: 18417986 NR Description: putative protein; protein id: At4g32330.1, by cDNA: gi_14334555, supported by cDNA: gi_21280970 [Arabidopsis >gi|14334556|gb|AAK59686.1| unknown protein [Arabidopsis
  misc_feature (6)..(395): Homolog of NCBI NO: 15224733 NR Description: unknown protein; protein id: At2g25480.1
  misc_feature (48)..(325): Homolog of NCBI NO: 18403980 NR Description: expressed protein; protein id: At2g35880.1, by cDNA: gi_16209719 [Arabidopsis thaliana] At2g35880/F11F19.21 [Arabidopsis thaliana]
  misc_feature (121)..(325): Homolog of NCBI NO: 25408425 NR Description: hypothetical protein At2g35880 [imported] -
  misc_feature (13)..(263): Homolog of NCBI NO: 7485356 NR Description: hypothetical protein F10M6.40 - Arabidopsis >gi|2864611|emb|CAA16958.1| putative protein [Arabidopsis
  misc_feature (13)..(263): Homolog of NCBI NO: 7486636 NR Description: hypothetical protein F8B4.30 - Arabidopsis >gi|4049335|emb|CAA22560.1| putative protein [Arabidopsis >gi|7270137|emb|CAB79950.1| putative protein [Arabidopsis
  misc_feature (1)..(326): Homolog of NCBI NO: 34897180 NR Description: unknown protein [Oryza sativa (japonica
  misc_feature (36)..(280): Homolog of NCBI NO: 9294199 NR Description: gb|AAF04893.1~gene_id:MXC7.13~similar to unknown
  misc_feature (36)..(280): Homolog of NCBI NO: 15228950 NR Description: unknown protein; protein id: At3g23090.1 thaliana] >gi|27765054|gb|AAO23648.1| At3g23090 [Arabidopsis
  misc_feature (155)..(280): Homolog of NCBI NO: 32395575 NR Description: seed specific protein Bn15D14A [Brassica napus]
MGDAVDDIICATDAAVAVEDAASGKPAMLSSLGGQGEEEHEEKDNEDKSGESEVINPPEDAGGEATSPLEGLKPRLSKGNQSHGPNAVKSKSPTSGDEGQTRKKAPNSSLPKAPIVQVSHGDAGVGSNKDGKNESRSSSVDATLLDDSKEKRKTQKPLAQLFSIKSDEEQSNGESAKPRKVGSIPSYGFTFKCDERSEKRREFYSKLEEKIHARELEISNLQAKSKETEEAELKMLRKSLNFKATPMPSFYKEPTPVKVELKKIPPTRAKSPKFGRSKNKSTPETEENATADQPAHLSLEENVSQTGVKKPTPLNPAKKPQRKSLPRLPSEETGPLDATSRQLIKSAKLDAVSAPETGSATGQAQLQGSQTETDSGQGPVEAGANPDEQDASEQSVV

SEQ ID NO: 10817 - protein, 370 aa, Zea mays subsp. mays
  peptide (1)..(370): Ceres Seq. ID no. 12361405
  misc_feature (1)..(366): Homolog of NCBI NO: 18417986 NR Description: putative protein; protein id: At4g32330.1, by cDNA: gi_14334555, supported by cDNA: gi_21280970 [Arabidopsis >gi|14334556|gb|AAK59686.1| unknown protein [Arabidopsis
  misc_feature (1)..(368): Homolog of NCBI NO: 15224733 NR Description: unknown protein; protein id: At2g25480.1
  misc_feature (21)..(298): Homolog of NCBI NO: 18403980 NR Description: expressed protein; protein id: At2g35880.1, by cDNA: gi_16209719 [Arabidopsis thaliana] At2g35880/F11F19.21 [Arabidopsis thaliana]
  misc_feature (94)..(298): Homolog of NCBI NO: 25408425 NR Description: hypothetical protein At2g35880 [imported] -
  misc_feature (1)..(236): Homolog of NCBI NO: 7485356 NR Description: hypothetical protein F10M6.40 - Arabidopsis >gi|2864611|emb|CAA16958.1| putative protein [Arabidopsis
  misc_feature (1)..(236): Homolog of NCBI NO: 7486636 NR Description: hypothetical protein F8B4.30 - Arabidopsis >gi|4049335|emb|CAA22560.1| putative protein [Arabidopsis >gi|7270137|emb|CAB79950.1| putative protein [Arabidopsis
  misc_feature (1)..(299): Homolog of NCBI NO: 34897180 NR Description: unknown protein [Oryza sativa (japonica
  misc_feature (9)..(253): Homolog of NCBI NO: 9294199 NR Description: gb|AAF04893.1~gene_id:MXC7.13~similar to unknown
  misc_feature (9)..(253): Homolog of NCBI NO: 15228950 NR Description: unknown protein; protein id: At3g23090.1 thaliana] >gi|27765054|gb|AAO23648.1| At3g23090 [Arabidopsis
  misc_feature (128)..(253): Homolog of NCBI NO: 32395575 NR Description: seed specific protein Bn15D14A [Brassica napus]
MLSSLGGQGEEEHEEKDNEDKSGESEVINPPEDAGGEATSPLEGLKPRLSKGNQSHGPNAVKSKSPTSGDEGQTRKKAPNSSLPKAPIVQVSHGDAGVGSNKDGKNESRSSSVDATLLDDSKEKRKTQKPLAQLFSIKSDEEQSNGESAKPRKVGSIPSYGFTFKCDERSEKRREFYSKLEEKIHARELEISNLQAKSKETEEAELKMLRKSLNFKATPMPSFYKEPTPVKVELKKIPPTRAKSPKFGRSKNKSTPETEENATADQPAHLSLEENVSQTGVKKPTPLNPAKKPQRKSLPRLPSEETGPLDATSRQLIKSAKLDAVSAPETGSATGQAQLQGSQTETDSGQGPVEAGANPDEQDASEQSVV

SEQ ID NO: 10818 - DNA, 1185 bp, Zea mays subsp. mays
  misc_feature (1)..(1185): Ceres Seq. ID no. 12412074
  misc_feature: MA Experiment ID: 20000488 Result: Up-regulated in Transcription
  misc_feature: MA Experiment 20000488 PARAMETER Experiment Name: Zm_50mM_NH4NO3_L_to_H_P Parameter: Organism Value: Zea mays
  misc_feature: MA Experiment 20000488 PARAMETER Experiment Name: Zm_50mM_NH4NO3_L_to_H_P Parameter: Timepoint (hr) Value: 8
  misc_feature: MA Experiment 20000488 PARAMETER Experiment Name: Zm_50mM_NH4NO3_L_to_H_P Parameter: Tissue Value: Leaves
  misc_feature: MA Experiment 20000488 PARAMETER Experiment Name: Zm_50mM_NH4NO3_L_to_H_P Parameter: Treatment Value: 50mM NH4NO3 vs. 100mM Mannitol
  misc_feature: MA Experiment ID: 20000492 Result: Up-regulated in Transcription
  misc_feature: MA Experiment 20000492 PARAMETER Experiment Name: Zm_Hybrid_Seed_Dev_P Parameter: DAP Value: 12
  misc_feature: MA Experiment 20000492 PARAMETER Experiment Name: Zm_Hybrid_Seed_Dev_P Parameter: Organism Value: Zea mays
  misc_feature: MA Experiment 20000492 PARAMETER Experiment Name: Zm_Hybrid_Seed_Dev_P Parameter: Plant Line Value: 35A19
  misc_feature: MA Experiment 20000492 PARAMETER Experiment Name: Zm_Hybrid_Seed_Dev_P Parameter: Tissue Value: Fert Kernel vs. Unfert Floret
aattaggcccgcaaacaacaccgctagccatgtggcgccgcgcctcccacctcctcatccgcaccgccgccgccgccgccgccccgacccgccgcctcccacttcctcacccgccgctacccatcgccccaagagtggcctccgcatcctcatcctatgccacagcggtcgcggcgagggcaccgcggacggtagggaccctgctgcggctcaacgacctgtgtgacaacccgggcgcgcggaagcagaagacgcgcaagggacgcgggatcggctccggcaaggggaagacggcgggacgcgggccacaaggggcagaaagcgcgaggcaccgctaggttcggcttcgagggtggccagaccctgctccgccgccgcctgccccgccgtggattcaagaaccccttctcactcacatttcagccctgtggactggggaaaattgcaaaactcataaatgctgggaaaattgattcctctgaattgattaccatgaagacactaaaggaaacaggtgccattgggaagcaaataaaagattgaattcgtttaatgggccgtggagcagaagaaatcaaatggcctattcaccttgaggtgtcaagggcaactgcaagggccaaagctgccgtggaagctgctggtgggacagtaaggctggtgtactacaacaaacttggattccgggcactcctgaaacctgagtggtttgagaagaagggccgcctgttaccaaaagcagcaaggcctccacccaagcagcgagataaggtcgatagcattggccgcctgcccgcgccgacaaagccactccccttcacggtagaggagctggagtttgcagcccagcgtgaggctgcccgcgtgactgcataagatgggagcacgttggcagcacctttttttctgaaagcatgcgccactggatgtgtatcacattagctttagcaggacatgcataagaatggaccgttttgtcttttttttttcttttccctcaaggaatggactgttataaattaaatatccattcattggaatcagatgttgctgtaatttctgaacttaccttggggttttgattgataaatgccattttttctgaataggctcatgtatgatgtcattttacctgccaccttttgatcctgtaatgacaattgagaaatgccgtttatttctgtg

SEQ ID NO: 10819 - protein, 111 aa, Zea mays subsp. mays
  peptide (1)..(111): Ceres Seq. ID no. 12412075
  misc_feature (10)..(109): Homolog of NCBI NO: 34015188 NR Description: putative ribosomal protein L15 [Oryza sativa
  misc_feature (70)..(104): Homolog of NCBI NO: 40747057 NR Description: hypothetical protein AN1095.2 [Aspergillus
  misc_feature (68)..(107): Homolog of NCBI NO: 22966103 NR Description: hypothetical protein [Rhodospirillum rubrum]
  misc_feature (68)..(111): Homolog of NCBI NO: 27380492 NR Description: 50S ribosomal protein L15 [Bradyrhizobium >gi|27353656|dbj|BAC50646.1| 50S ribosomal protein L15
  misc_feature (68)..(111): Homolog of NCBI NO: 22965142 NR Description: hypothetical protein [Rhodopseudomonas palustris]
  misc_feature (38)..(109): Homolog of NCBI NO: 15237756 NR Description: putative protein; protein id: At5g64670.1, by cDNA: 14033., supported by cDNA: gi_19698998 [Arabidopsis >gi|10178070|dbj|BAB11434.1|
LGPQTTPLAMWRRASHLLIRTAAAAAAPTRRLPLPHPPLPIAPRVASASSSYATAVAARAPRTVGTLLRLNDLCDNPGARKQKTRKGRGIGSGKGKTAGRGPQGAESARHR

SEQ ID NO: 10820 - protein, 107 aa, Zea mays subsp. mays
  peptide (1)..(107): Ceres Seq. ID no. 12412076
  misc_feature (1)..(107): Homolog of NCBI NO: 34015188 NR Description: putative ribosomal protein L15 [Oryza sativa
  misc_feature (1)..(93): Homolog of NCBI NO: 15237756 NR Description: putative protein; protein id: At5g64670.1, by cDNA: 14033., supported by cDNA: gi_19698998 [Arabidopsis >gi|10178070|dbj|BAB11434.1|
  misc_feature (1)..(72): Homolog of NCBI NO: 6324045 NR Description: Mitochondrial ribosomal protein MRPL10 (YmL10); [Saccharomyces cerevisiae] >gi|1710599|sp|P36520|RM10_YEAST 60S PROTEIN L10, MITOCHONDRIAL PRECURSOR (YML10)
  misc_feature (1)..(34): Homolog of NCBI NO: 23014069 NR Description: hypothetical protein [Magnetospirillum
  misc_feature (1)..(37): Homolog of NCBI NO: 27380492 NR Description: 50S ribosomal protein L15 [Bradyrhizobium >gi|27353656|dbj|BAC50646.1| 50S ribosomal protein L15
  misc_feature (1)..(37): Homolog of NCBI NO: 22965142 NR Description: hypothetical protein [Rhodopseudomonas palustris]
  misc_feature (1)..(34): Homolog of NCBI NO: 22966103 NR Description: hypothetical protein [Rhodospirillum rubrum]
  misc_feature (1)..(97): Homolog of NCBI NO: 12846164 NR Description: unnamed protein product [Mus musculus]
  misc_feature (1)..(97): Homolog of NCBI NO: 12833990 NR Description: unnamed protein product [Mus musculus] unnamed protein product [Mus musculus]
  misc_feature (1)..(97): Homolog of NCBI NO: 34866074 NR Description: similar to mitochondrial ribosomal protein L15
MGRGAEEIKWPIHLEVSRATARAKAAVEAAGGTVRLVYYNKLGFRALLKPEWFEKKGRLLPKAARPPPKQRDKVDSIGRLPAPTKPLPFTVEELEFAAQREAARVTA

SEQ ID NO: 10821 - protein, 102 aa, Zea mays subsp. mays
  peptide (1)..(102): Ceres Seq. ID no. 12412077
  misc_feature (1)..(100): Homolog of NCBI NO: 34015188 NR Description: putative ribosomal protein L15 [Oryza sativa
  misc_feature (61)..(95): Homolog of NCBI NO: 40747057 NR Description: hypothetical protein AN1095.2 [Aspergillus
  misc_feature (59)..(98): Homolog of NCBI NO: 22966103 NR Description: hypothetical protein [Rhodospirillum rubrum]
  misc_feature (59)..(102): Homolog of NCBI NO: 27380492 NR Description: 50S ribosomal protein L15 [Bradyrhizobium >gi|27353656|dbj|BAC50646.1| 50S ribosomal protein L15
  misc_feature (59)..(102): Homolog of NCBI NO: 22965142 NR Description: hypothetical protein [Rhodopseudomonas palustris]
  misc_feature (29)..(100): Homolog of NCBI NO: 15237756 NR Description: putative protein; protein id: At5g64670.1, by cDNA: 14033., supported by cDNA: gi_19698998 [Arabidopsis >gi|10178070|dbj|BAB11434.1|
MWRRASHLLIRTAAAAAAPTRRLPLPHPPLPIAPRVASASSSYATAVAARAPRTVGTLLRLNDLCDNPGARKQKTRKGRGIGSGKGKTAGRGPQGAESARHR

SEQ ID NO: 10822 - DNA, 1606 bp, Zea mays subsp. mays
  misc_feature (1)..(1606): Ceres Seq. ID no. 12340958
  misc_feature: MA Experiment ID: 108523 Result: Down-regulated in Transcription
  misc_feature: MA Experiment 108523 PARAMETER Experiment Name: Zm_42deg_Heat_P Parameter: Age (day) Value: 8
  misc_feature: MA Experiment 108523 PARAMETER Experiment Name: Zm_42deg_Heat_P Parameter: Organism Value: Zea mays
  misc_feature: MA Experiment 108523 PARAMETER Experiment Name: Zm_42deg_Heat_P Parameter: Plant Line Value: 35A19
  misc_feature: MA Experiment 108523 PARAMETER Experiment Name: Zm_42deg_Heat_P Parameter: Temperature (deg C) Value: 42 vs. 22
  misc_feature: MA Experiment 108523 PARAMETER Experiment Name: Zm_42deg_Heat_P Parameter: Timepoint (hr) Value: 6
  misc_feature: MA Experiment 108523 PARAMETER Experiment Name: Zm_42deg_Heat_P Parameter: Tissue Value: Aerial
  misc_feature: MA Experiment ID: 20000477 Result: Up-regulated in Transcription
  misc_feature: MA Experiment 20000477 PARAMETER Experiment Name: Zm_5mM_SA_P Parameter: Age (day) Value: 10
  misc_feature: MA Experiment 20000477 PARAMETER Experiment Name: Zm_5mM_SA_P Parameter: Organism Value: Zea mays
  misc_feature: MA Experiment 20000477 PARAMETER Experiment Name: Zm_5mM_SA_P Parameter: Plant Line Value: 35A19
  misc_feature: MA Experiment 20000477 PARAMETER Experiment Name: Zm_5mM_SA_P Parameter: Timepoint (hr) Value: 48
  misc_feature: MA Experiment 20000477 PARAMETER Experiment Name: Zm_5mM_SA_P Parameter: Tissue Value: Aerial
  misc_feature: MA Experiment 20000477 PARAMETER Experiment Name: Zm_5mM_SA_P Parameter: Treatment Value: 5mM SA vs. No Treatment
  misc_feature: MA Experiment ID: 20000478 Result: Up-regulated in Transcription
  misc_feature: MA Experiment 20000478 PARAMETER Experiment Name: Zm_5mM_SA_P Parameter: Age (day) Value: 11
  misc_feature: MA Experiment 20000478 PARAMETER Experiment Name: Zm_5mM_SA_P Parameter: Organism Value: Zea mays
  misc_feature: MA Experiment 20000478 PARAMETER Experiment Name: Zm_5mM_SA_P Parameter: Plant Line Value: 35A19
  misc_feature: MA Experiment 20000478 PARAMETER Experiment Name: Zm_5mM_SA_P Parameter: Timepoint (hr) Value: 72
  misc_feature: MA Experiment 20000478 PARAMETER Experiment Name: Zm_5mM_SA_P Parameter: Tissue Value: Aerial
  misc_feature: MA Experiment 20000478 PARAMETER Experiment Name: Zm_5mM_SA_P Parameter: Treatment Value: 5mM SA vs. No Treatment
attcggatcgtgccgctgccgctcttcccttctcgtctagtcttgtttttctttcctcctctgttactccacctacagacctactactgccatcgggagggtaagctcttcggagccggagccgggtccacgttaacgccatcgagcgctgcgatgggcagcttaggagggagcgccggtgctggggacggcggcaaggtcgggctgccggcgcttgacgtgacgctcgcgttcccgcaggccacgccctcatcgctcttcccgccagccgtttcggactactaccaatttgatgatttgctgactgatgaagagaaggcactcaggaagaaggtccgaggtatcatggaaaaggaaattgcgcccattatgactgagtactgggagaaggctgaattcccattccatgccattcccagccttgccagtcttggtttagctggtggtacaataaaggggtatgggtgccctggactctcgcttacagctagtgctatttcgatagcagaagttgcacgggtcgatgcgagctgctccacatttattctagtgcactcctcgttggctatgtccacaattgccctttgtggatctgaggctcaaaagcagaaatacttaccatctcttacccagttcaaaactattggttgctgggcattgacagagccagattatggaagtgatgcaagctccctaaggactgcagcaaccaaggtacctggtggttggcatttagatggacaaaaacgctggataggtaacagcacttttgcagatgtcctcatcattttggctaggaatgcagatacaaaccaactaaatggatttattgtaaagaaaggagctcccggtctaaaagccacaaaaattgaaaataaaattggactcagaatggttcaaaatggagacataattctaaataaagtatttgtccctgaggaagacagattaacaggcatcaattcatttcaggatataaacaaggtcctcgctatgtctcgaattatggtggcatggcaaccaataggcatatcaatgggagtttatgacatctgccatcggtatttgaaagaaagaaagcaatttggagctccactggcagcttttcagctcaatcaagaaaagcttgtccgcatgcttggcaacattcaggctatgcttctcgttggatggcgactgtgcaagctgtatgagtcaggcaaaatgacaccaggccggtctagtttaggcaaggcatggacgtccaagaaggccagggaggtggtttctcttgggcgagagctactgggtggcaatggcattttggttgattttcttgtcgccaaggcattttgtgacgtggagcccattttctcgtacgagggcacctatgacattaatagcctggtggctggcagagagatcaccgggatcgcgagcttcaagcctgctgtgtcagcaaaatcacgcctgtgaaagttgtttttttctttgttccccaatgaagacagtagaaatcaaccttatacattcagatgattgggaataagaacggtaggaaagctgtaaaactcgacgtgcttcctcgtatgtactgttctgtttcaaattattcgacgttttgtcg

SEQ ID NO: 10823 - protein, 484 aa, Zea mays subsp. mays
  peptide (1)..(484): Ceres Seq. ID no. 12340959
  misc_feature (219)..(317): Pfam Name: Acyl-CoA dehydrogenase, middle domain Pfam Description: Acyl-CoA dehydrogenase, middle domain
  misc_feature (55)..(484): Homolog of NCBI NO: 34896018 NR Description: ESTs AU056822(S20908),C26441(C12328), correspond to a region of the predicted gene.~Similar to
  misc_feature (69)..(484): Homolog of NCBI NO: 15231059 NR Description: acyl-coA dehydrogenase; protein id: At3g51840.1, by cDNA: 3844., supported by cDNA: gi_1657620, supported by cDNA:
  misc_feature (105)..(474): Homolog of NCBI NO: 31195739 NR Description: ENSANGP00000000259 [Anopheles gambiae]
  misc_feature (89)..(483): Homolog of NCBI NO: 28829336 NR Description: similar to Arabidopsis thaliana (Mouse-ear
  misc_feature (74)..(474): Homolog of NCBI NO: 29827888 NR Description: putative glutaryl-CoA dehydrogenase [Streptomyces
  misc_feature (92)..(474): Homolog of NCBI NO: 29827260 NR Description: putative glutaryl-CoA dehydrogenase [Streptomyces
  misc_feature (92)..(474): Homolog of NCBI NO: 25026880 NR Description: putative acyl-CoA dehydrogenase [Corynebacterium
  misc_feature (86)..(474): Homolog of NCBI NO: 15805578 NR Description: glutaryl-CoA dehydrogenase, putative [Deinococcus
  misc_feature (76)..(474): Homolog of NCBI NO: 25027279 NR Description: putative glutaryl-CoA dehydrogenase precursor
  misc_feature (93)..(475): Homolog of NCBI NO: 11498596 NR Description: glutaryl-CoA dehydrogenase (gcdH) [Archaeoglobus
IRIVPLPLFPSRLVLFFFPPLLLHLQTYYCHREGKLFGAGAGSTLTPSSAAMGSLGGSAGAGDGGKVGLPALDVTLAFPQATPSSLFPPAVSDYYQFDDLLTDEEKALRKKVRGIMEKEIAPIMTEYWEKAEFPFHAIPSLASLGLAGGTIKGYGCPGLSLTASAISIAEVARVDASCSTFILVHSSLAMSTIALCGSEAQKQKYLPSLTQFKTIGCWALTEPDYGSDASSLRTAATKVPGGWHLDGQKRWIGNSTFADVLIILARNADTNQLNGFIVKKGAPGLKATKIENKIGLRMVQNGDIILNKVFVPEEDRLTGINSFQDINKVLAMSRIMVAWQPIGISMGVYDICHRYLKERKQFGAPLAAFQLNQEKLVRMLGNIQAMLLVGWRLCKLYESGKMTPGRSSLGKAWTSKKAREVVSLGRELLGGNGILVDFLVAKAFCDVEPIFSYEGTYDINSLVAGREITGIASFKPAVSAKSRL

SEQ ID NO: 10824 - protein, 433 aa, Zea mays subsp. mays
  peptide (1)..(433): Ceres Seq. ID no. 12340960
  misc_feature (168)..(266): Pfam Name: Acyl-CoA dehydrogenase, middle domain Pfam Description: Acyl-CoA dehydrogenase, middle domain
  misc_feature (4)..(433): Homolog of NCBI NO: 34896018 NR Description: ESTs AU056822(S20908),C26441(C12328), correspond to a region of the predicted gene.~Similar to
  misc_feature (18)..(433): Homolog of NCBI NO: 15231059 NR Description: acyl-coA dehydrogenase; protein id: At3g51840.1, by cDNA: 3844., supported by cDNA: gi_1657620, supported by cDNA:
  misc_feature (54)..(423): Homolog of NCBI NO: 31195739 NR Description: ENSANGP00000000259 [Anopheles gambiae]
  misc_feature (38)..(432): Homolog of NCBI NO: 28829336 NR Description: similar to Arabidopsis thaliana (Mouse-ear
  misc_feature (23)..(423): Homolog of NCBI NO: 29827888 NR Description: putative glutaryl-CoA dehydrogenase [Streptomyces
  misc_feature (41)..(423): Homolog of NCBI NO: 29827260 NR Description: putative glutaryl-CoA dehydrogenase [Streptomyces
  misc_feature (41)..(423): Homolog of NCBI NO: 25026880 NR Description: putative acyl-CoA dehydrogenase [Corynebacterium
  misc_feature (35)..(423): Homolog of NCBI NO: 15805578 NR Description: glutaryl-CoA dehydrogenase, putative [Deinococcus
  misc_feature (25)..(423): Homolog of NCBI NO: 25027279 NR Description: putative glutaryl-CoA dehydrogenase precursor
  misc_feature (42)..(424): Homolog of NCBI NO: 11498596 NR Description: glutaryl-CoA dehydrogenase (gcdH) [Archaeoglobus
MGSLGGSAGAGDGGKVGLPALDVTLAFPQATPSSLFPPAVSDYYQFDDLLTDEEKALRKKVRGIMEKEIAPIMTEYWEKAEFPFHAIPSLASLGLAGGTIKGYGCPGLSLTASAISIAEVARVDASCSTFILVHSSLAMSTIALCGSEAQKQKYLPSLTQFKTIGCWALTEPDYGSDASSLRTAATKVPGGWHLDGQKRWIGNSTFADVLIILARNADTNQLNGFIVKKGAPGLKATKIENKIGLRMVQNGDIILNKVFVPEEDRLTGINSFQDINKVLAMSRIMVAWQPIGISMGVYDICHRYLKERKQFGAPLAAFQLNQEKLVRMLGNIQAMLLVGWRLCKLYESGKMTPGRSSLGKAWTSKKAREVVSLGRELLGGNGILVDFLVAKAFCDVEPIFSYEGTYDINSLVAGREITGIASFKPAVSAKSRL

SEQ ID NO: 10825 - protein, 369 aa, Zea mays subsp. mays
  peptide (1)..(369): Ceres Seq. ID no. 12340961
  misc_feature (104)..(202): Pfam Name: Acyl-CoA dehydrogenase, middle domain Pfam Description: Acyl-CoA dehydrogenase, middle domain
  misc_feature (1)..(369): Homolog of NCBI NO: 34896018 NR Description: ESTs AU056822(S20908),C26441(C12328), correspond to a region of the predicted gene.~Similar to
  misc_feature (1)..(369): Homolog of NCBI NO: 15231059 NR Description: acyl-coA dehydrogenase; protein id: At3g51840.1, by cDNA: 3844., supported by cDNA: gi_1657620, supported by cDNA:
  misc_feature (1)..(359): Homolog of NCBI NO: 31195739 NR Description: ENSANGP00000000259 [Anopheles gambiae]
  misc_feature (1)..(368): Homolog of NCBI NO: 28829336 NR Description: similar to Arabidopsis thaliana (Mouse-ear
  misc_feature (1)..(359): Homolog of NCBI NO: 29827888 NR Description: putative glutaryl-CoA dehydrogenase [Streptomyces
  misc_feature (1)..(359): Homolog of NCBI NO: 29827260 NR Description: putative glutaryl-CoA dehydrogenase [Streptomyces
  misc_feature (1)..(359): Homolog of NCBI NO: 25026880 NR Description: putative acyl-CoA dehydrogenase [Corynebacterium
  misc_feature (1)..(359): Homolog of NCBI NO: 15805578 NR Description: glutaryl-CoA dehydrogenase, putative [Deinococcus
  misc_feature (1)..(359): Homolog of NCBI NO: 25027279 NR Description: putative glutaryl-CoA dehydrogenase precursor
  misc_feature (1)..(360): Homolog of NCBI NO: 11498596 NR Description: glutaryl-CoA dehydrogenase (gcdH) [Archaeoglobus
MEKEIAPIMTEYWEKAEFPFHAIPSLASLGLAGGTIKGYGCPGLSLTASAISIAEVARVDASCSTFILVHSSLAMSTIALCGSEAQKQKYLPSLTQFKTIGCWALTEPDYGSDASSLRTAATKVPGGWHLDGQKRWIGNSTFADVLIILARNADTNQLNGFIVKKGAPGLKATKIENKIGLRMVQNGDIILNKVFVPEEDRLTGINSFQDINKVLAMSRIMVAWQPIGISMGVYDICHRYLKERKQFGAPLAAFQLNQEKLVRMLGNIQAMLLVGWRLCKLYESGKMTPGRSSLGKAWTSKKAREVVSLGRELLGGNGILVDFLVAKAFCDVEPIFSYEGTYDINSLVAGREITGIASFKPAVSAKSRL

SEQ ID NO: 10826 - DNA, 1474 bp, Zea mays subsp. mays
  misc_feature (1)..(1474): Ceres Seq. ID no. 12408280
  misc_feature: MA Experiment ID: 108503 Result: Up-regulated in Transcription
  misc_feature: MA Experiment 108503 PARAMETER Experiment Name: Zm_Drought_P Parameter: Age (day) Value: 8
  misc_feature: MA Experiment 108503 PARAMETER Experiment Name: Zm_Drought_P Parameter: Organism Value: Zea mays
  misc_feature: MA Experiment 108503 PARAMETER Experiment Name: Zm_Drought_P Parameter: Plant Line Value: 35A19
  misc_feature: MA Experiment 108503 PARAMETER Experiment Name: Zm_Drought_P Parameter: Timepoint (hr) Value: 6
  misc_feature: MA Experiment 108503 PARAMETER Experiment Name: Zm_Drought_P Parameter: Tissue Value: Aerial
  misc_feature: MA Experiment 108503 PARAMETER Experiment Name: Zm_Drought_P Parameter: Treatment Value: Drought vs. No Drought
  misc_feature: MA Experiment ID: 108504 Result: Up-regulated in Transcription
  misc_feature: MA Experiment 108504 PARAMETER Experiment Name: Zm_Drought_P Parameter: Age (day) Value: 8
  misc_feature: MA Experiment 108504 PARAMETER Experiment Name: Zm_Drought_P Parameter: Organism Value: Zea mays
  misc_feature: MA Experiment 108504 PARAMETER Experiment Name: Zm_Drought_P Parameter: Plant Line Value: 35A19
  misc_feature: MA Experiment 108504 PARAMETER Experiment Name: Zm_Drought_P Parameter: Timepoint (hr) Value: 12
  misc_feature: MA Experiment 108504 PARAMETER Experiment Name: Zm_Drought_P Parameter: Tissue Value: Aerial
  misc_feature: MA Experiment 108504 PARAMETER Experiment Name: Zm_Drought_P Parameter: Treatment Value: Drought vs. No Drought
  misc_feature: MA Experiment ID: 108540 Result: Up-regulated in Transcription
  misc_feature: MA Experiment 108540 PARAMETER Experiment Name: Zm_20percent_PEG_P Parameter: Age (day) Value: 8
  misc_feature: MA Experiment 108540 PARAMETER Experiment Name: Zm_20percent_PEG_P Parameter: Organism Value: Zea mays
  misc_feature: MA Experiment 108540 PARAMETER Experiment Name: Zm_20percent_PEG_P Parameter: Plant Line Value: 35A19
  misc_feature: MA Experiment 108540 PARAMETER Experiment Name: Zm_20percent_PEG_P Parameter: Timepoint (hr) Value: 6
  misc_feature: MA Experiment 108540 PARAMETER Experiment Name: Zm_20percent_PEG_P Parameter: Tissue Value: Aerial
  misc_feature: MA Experiment 108540 PARAMETER Experiment Name: Zm_20percent_PEG_P Parameter: Treatment Value: 20percent PEG vs. No Treatment
  misc_feature: MA Experiment ID: 108542 Result: Up-regulated in Transcription
  misc_feature: MA Experiment 108542 PARAMETER Experiment Name: Zm_150mM_NaCl_P Parameter: Age (day) Value: 8
  misc_feature: MA Experiment 108542 PARAMETER Experiment Name: Zm_150mM_NaCl_P Parameter: Organism Value: Zea mays
  misc_feature: MA Experiment 108542 PARAMETER Experiment Name: Zm_150mM_NaCl_P Parameter: Plant Line Value: 35A19
  misc_feature: MA Experiment 108542 PARAMETER Experiment Name: Zm_150mM_NaCl_P Parameter: Timepoint (hr) Value: 6
  misc_feature: MA Experiment 108542 PARAMETER Experiment Name: Zm_150mM_NaCl_P Parameter: Tissue Value: Aerial
  misc_feature: MA Experiment 108542 PARAMETER Experiment Name: Zm_150mM_NaCl_P Parameter: Treatment Value: 150mM NaCl vs. No Treatment
  misc_feature: MA Experiment ID: 108556 Result: Up-regulated in Transcription
  misc_feature: MA Experiment 108556 PARAMETER Experiment Name: Zm_Drought_P Parameter: Age (day) Value: 9
  misc_feature: MA Experiment 108556 PARAMETER Experiment Name: Zm_Drought_P Parameter: Organism Value: Zea mays
  misc_feature: MA Experiment 108556 PARAMETER Experiment Name: Zm_Drought_P Parameter: Plant Line Value: 35A19
  misc_feature: MA Experiment 108556 PARAMETER Experiment Name: Zm_Drought_P Parameter: Timepoint (hr) Value: 24
  misc_feature: MA Experiment 108556 PARAMETER Experiment Name: Zm_Drought_P Parameter: Tissue Value: Aerial
  misc_feature: MA Experiment 108556 PARAMETER Experiment Name: Zm_Drought_P Parameter: Treatment Value: Drought vs. No Drought
  misc_feature: MA Experiment ID: 108597 Result: Up-regulated in Transcription
  misc_feature: MA Experiment 108597 PARAMETER Experiment Name: Zm_100uM_ABA_P Parameter: Age (day) Value: 9
  misc_feature: MA Experiment 108597 PARAMETER Experiment Name: Zm_100uM_ABA_P Parameter: Organism Value: Zea mays
  misc_feature: MA Experiment 108597 PARAMETER Experiment Name: Zm_100uM_ABA_P Parameter: Plant Line Value: 35A19
  misc_feature: MA Experiment 108597 PARAMETER Experiment Name: Zm_100uM_ABA_P Parameter: Timepoint (hr) Value: 24
  misc_feature: MA Experiment 108597 PARAMETER Experiment Name: Zm_100uM_ABA_P Parameter: Tissue Value: Aerial
  misc_feature: MA Experiment 108597 PARAMETER Experiment Name: Zm_100uM_ABA_P Parameter: Treatment Value: 100uM ABA vs. No Treatment
  misc_feature: MA Experiment ID: 20000478 Result: Up-regulated in Transcription
  misc_feature: MA Experiment 20000478 PARAMETER Experiment Name: Zm_5mM_SA_P Parameter: Age (day) Value: 11
  misc_feature: MA Experiment 20000478 PARAMETER Experiment Name: Zm_5mM_SA_P Parameter: Organism Value: Zea mays
  misc_feature: MA Experiment 20000478 PARAMETER Experiment Name: Zm_5mM_SA_P Parameter: Plant Line Value: 35A19
  misc_feature: MA Experiment 20000478 PARAMETER Experiment Name: Zm_5mM_SA_P Parameter: Timepoint (hr) Value: 72
  misc_feature: MA Experiment 20000478 PARAMETER Experiment Name: Zm_5mM_SA_P Parameter: Tissue Value: Aerial
  misc_feature: MA Experiment 20000478 PARAMETER Experiment Name: Zm_5mM_SA_P Parameter: Treatment Value: 5mM SA vs. No Treatment
  misc_feature: MA Experiment ID: 20000479 Result: Up-regulated in Transcription
  misc_feature: MA Experiment 20000479 PARAMETER Experiment Name: Zm_Drought_P Parameter: Age (day) Value: 10
  misc_feature: MA Experiment 20000479 PARAMETER Experiment Name: Zm_Drought_P Parameter: Organism Value: Zea mays
  misc_feature: MA Experiment 20000479 PARAMETER Experiment Name: Zm_Drought_P Parameter: Plant Line Value: 35A19
  misc_feature: MA Experiment 20000479 PARAMETER Experiment Name: Zm_Drought_P Parameter: Timepoint (hr) Value: 48
  misc_feature: MA Experiment 20000479 PARAMETER Experiment Name: Zm_Drought_P Parameter: Tissue Value: Aerial
  misc_feature: MA Experiment 20000479 PARAMETER Experiment Name: Zm_Drought_P Parameter: Treatment Value: Drought vs. No Drought
  misc_feature: MA Experiment ID: 20000480 Result: Up-regulated in Transcription
  misc_feature: MA Experiment 20000480 PARAMETER Experiment Name: Zm_Drought_P Parameter: Age (day) Value: 11
  misc_feature: MA Experiment 20000480 PARAMETER Experiment Name: Zm_Drought_P Parameter: Organism Value: Zea mays
  misc_feature: MA Experiment 20000480 PARAMETER Experiment Name: Zm_Drought_P Parameter: Plant Line Value: 35A19
  misc_feature: MA Experiment 20000480 PARAMETER Experiment Name: Zm_Drought_P Parameter: Timepoint (hr) Value: 72
  misc_feature: MA Experiment 20000480 PARAMETER Experiment Name: Zm_Drought_P Parameter: Tissue Value: Aerial
  misc_feature: MA Experiment 20000480 PARAMETER Experiment Name: Zm_Drought_P Parameter: Treatment Value: Drought vs. No Drought
atctagcaaactgcaaaccaggtcatctctgaatttccccaacaaagagcgagcataaaccccgctatacccgcttccttctctccaatctccggtgctcgcatcccgctccgcctccatgcgccgcggcagttccacgacgccagtcctctcacctctgtcctgacccaacacccgggcggctggaacccgcaggtgcgcttagtgccgctcgaggaggctcgccgtttgctggattcgttctgtcctttgccggccggcattgtgccctccgcggcggcgacaggggcgtgcgcggtgctgctgtaggggagggtgacggccatctccctggtcggccgcggcccgggctggtggcgtgcgaggaagacggattcacaaagcacggtgctccccaagtctagcagggtgtgttgtatggcttccacgctccagctgttgttttccattgccatcacagctttggcctttttcctccacccatgcgcatcgactgatgagttccaccgtgagctctacggttggtccaatggcatcgctacatggtatggcgcagctgatggcgctggaactgacggtggtgcgtgtggataccagaatgctgtggaccagccacctttctcatccatgattgccgctggctgctcttccatctacgactctggcaagggctgtggctcttgctatcaggctgtatgcaccggcaatgacgcttgctccggtaacccggtgactgtcgtcatcaccgacgagtgccccgattgcccgtgtcctgatgagcaggtccacttcgacatgagcgggacagcgttcggtgccttggcgaagcccgggcaggagagccagctgcgtggcgccggcgccatccaaatccagtatacccgggtgcagtgcgagtggcctggcgtggacgtgaccttctcggtggagccgggctccaacccgaactacctggccgtgctgatcgagtacgaggatagcgacagcgacctcgactccgtggacatgatgcagacgcagggcgggacgacggggcagtgggtgccgatgcagcagtcgtggggcgccgtgtggaagatcaactccggctccgtcctccagggccccttcaacatccgcctcaccttcagctctggcagggcgctcgtcgccagcaacgccatacctgcggggtggaacgccggcgtcgcgtaccggtctggcggcgtggctgtgacgagggccaggcccaggagcggtgcctgccggggctacgaggctgccgggacactggatggtttggtgcatcgtcacctcgtcgtgttgttgttactggtgttattgacgctgtgagccgagatgcgatgcaattttgctggttctgggagcgtgcgagtttgggctacatggactgagtagctctgtgtatttttcttgcatcgcatcgtagtggatggattactgcgtcgtattgtggacatgtctggtggttatc

SEQ ID NO: 10827 - protein, 304 aa, Zea mays subsp. mays
  peptide (1)..(304): Ceres Seq. ID no. 12408281
  misc_feature (166)..(250): Pfam Name: Pollen allergen Pfam Description: Pollen allergen
  misc_feature (5)..(304): Homolog of NCBI NO: 16517017 NR Description: beta-expansin [Oryza sativa]
  misc_feature (1)..(261): Homolog of NCBI NO: 21666630 NR Description: beta-expansin [Oryza sativa]
  misc_feature (34)..(261): Homolog of NCBI NO: 16303229 NR Description: beta-expansin 5 [Oryza sativa]
  misc_feature (1)..(261): Homolog of NCBI NO: 1076486 NR Description: cim1 protein - soybean >gi|555616|gb|AAA50175.1|
  misc_feature (34)..(261): Homolog of NCBI NO: 8118428 NR Description: beta-expansin [Oryza sativa]
  misc_feature (5)..(304): Homolog of NCBI NO: 16303233 NR Description: beta-expansin [Oryza sativa]
  misc_feature (1)..(261): Homolog of NCBI NO: 34101047 NR Description: beta-expansin 1 precursor [Hordeum vulgare]
  misc_feature (35)..(261): Homolog of NCBI NO: 16517013 NR Description: beta-expansin [Oryza sativa]
  misc_feature (35)..(261): Homolog of NCBI NO: 40363749 NR Description: putative beta-expansin [Triticum aestivum]
  misc_feature (7)..(261): Homolog of NCBI NO: 12082326 NR Description: beta-expansin [Atriplex lentiformis]
MASTLQLLFSIAITALAFFLHPCASTDEFHRELYGWSNGIATWYGAADGAGTDGGACGYQNAVDQPPFSSMIAAGCSSIYDSGKGCGSCYQAVCTGNDACSGNPVTVVITDECPDCPCPDEQVHFDMSGTAFGALAKPGQESQLRGAGAIQIQYTRVQCEWPGVDVTFSVEPGSNPNYLAVLIEYEDSDSDLDSVDMMQTQGGTTGQWVPMQQSWGAVWKINSGSVLQGPFNIRLTFSSGRALVASNAIPAGWNAGVAYRSGGVAVTRARPRSGACRGYEAAGTLDGLVHRHLVVLLLLVLLTL

SEQ ID NO: 10828 - protein, 234 aa, Zea mays subsp. mays
  peptide (1)..(234): Ceres Seq. ID no. 12408282
  misc_feature (96)..(180): Pfam Name: Pollen allergen Pfam Description: Pollen allergen
  misc_feature (1)..(234): Homolog of NCBI NO: 16303233 NR Description: beta-expansin [Oryza sativa]
  misc_feature (1)..(234): Homolog of NCBI NO: 16517017 NR Description: beta-expansin [Oryza sativa]
  misc_feature (1)..(191): Homolog of NCBI NO: 21666630 NR Description: beta-expansin [Oryza sativa]
  misc_feature (1)..(191): Homolog of NCBI NO: 16303229 NR Description: beta-expansin 5 [Oryza sativa]
  misc_feature (1)..(191): Homolog of NCBI NO: 1076486 NR Description: cim1 protein - soybean >gi|555616|gb|AAA50175.1|
  misc_feature (1)..(191): Homolog of NCBI NO: 8118428 NR Description: beta-expansin [Oryza sativa]
  misc_feature (1)..(191): Homolog of NCBI NO: 34101047 NR Description: beta-expansin 1 precursor [Hordeum vulgare]
  misc_feature (1)..(191): Homolog of NCBI NO: 16517013 NR Description: beta-expansin [Oryza sativa]
  misc_feature (1)..(191): Homolog of NCBI NO: 40363749 NR Description: putative beta-expansin [Triticum aestivum]
  misc_feature (1)..(191): Homolog of NCBI NO: 12082326 NR Description: beta-expansin [Atriplex lentiformis]
MIAAGCSSIYDSGKGCGSCYQAVCTGNDACSGNPVTVVITDECPDCPCPDEQVHFDMSGTAFGALAKPGQESQLRGAGAIQIQYTRVQCEWPGVDVTFSVEPGSNPNYLAVLIEYEDSDSDLDSVDMMQTQGGTTGQWVPMQQSWGAVWKINSGSVLQGPFNIRLTFSSGRALVASNAIPAGWNAGVAYRSGGVAVTRARPRSGACRGYEAAGTLDGLVHRHLVVLLLLVLLTL

SEQ ID NO: 10829 - protein, 178 aa, Zea mays subsp. mays
  peptide (1)..(178): Ceres Seq. ID no. 12408283
  misc_feature (40)..(124): Pfam Name: Pollen allergen Pfam Description: Pollen allergen
  misc_feature (1)..(178): Homolog of NCBI NO: 16303233 NR Description: beta-expansin [Oryza sativa]
  misc_feature (1)..(178): Homolog of NCBI NO: 16517017 NR Description: beta-expansin [Oryza sativa]
  misc_feature (1)..(135): Homolog of NCBI NO: 21666630 NR Description: beta-expansin [Oryza sativa]
  misc_feature (1)..(135): Homolog of NCBI NO: 16303229 NR Description: beta-expansin 5 [Oryza sativa]
  misc_feature (1)..(135): Homolog of NCBI NO: 1076486 NR Description: cim1 protein - soybean >gi|555616|gb|AAA50175.1|
  misc_feature (1)..(135): Homolog of NCBI NO: 8118428 NR Description: beta-expansin [Oryza sativa]
  misc_feature (1)..(135): Homolog of NCBI NO: 34101047 NR Description: beta-expansin 1 precursor [Hordeum vulgare]
  misc_feature (1)..(135): Homolog of NCBI NO: 16517013 NR Description: beta-expansin [Oryza sativa]
  misc_feature (1)..(135): Homolog of NCBI NO: 40363749 NR Description: putative beta-expansin [Triticum aestivum]
  misc_feature (1)..(135): Homolog of NCBI NO: 12082326 NR Description: beta-expansin [Atriplex lentiformis]
MSGTAFGALAKPGQESQLRGAGAIQIQYTRVQCEWPGVDVTFSVEPGSNPNYLAVLIEYEDSDSDLDSVDMMQTQGGTTGQWVPMQQSWGAVWKINSGSVLQGPFNIRLTFSSGRALVASNAIPAGWNAGVAYRSGGVAVTRARPRSGACRGYEAAGTLDGLVHRHLVVLLLLVLLTL

SEQ ID NO: 10830 - DNA, 1573 bp, Zea mays subsp. mays
  misc_feature (1)..(1573): Ceres Seq. ID no. 12412066
  misc_feature: MA Experiment ID: 108535 Result: Up-regulated in Transcription
  misc_feature: MA Experiment 108535 PARAMETER Experiment Name: Zm_Meristem_P Parameter: Age (day) Value: 8
  misc_feature: MA Experiment 108535 PARAMETER Experiment Name: Zm_Meristem_P Parameter: Organism Value: Zea mays
  misc_feature: MA Experiment 108535 PARAMETER Experiment Name: Zm_Meristem_P Parameter: Plant Line Value: 35A19
  misc_feature: MA Experiment 108535 PARAMETER Experiment Name: Zm_Meristem_P Parameter: Tissue Value: Root Meristem vs. Above Root Meristem
aacacactaggagaggtaaaaacgaacgaagttgcatctgggtagacggtagaggcaaccacacaattgccccaaaagtaaatgtcataataggagaaaacaactgtcttgcatcaccacgagcgtgggctctctccttctcgacgacgactgggccaccgtcgctgccgcctgccgccctacgccaggtgccaagcagccaggtgttcttggggcccttcgccggcgacgagcaccaccagctgaaagatggcgaggataccgtctctgaagagcctcaatgcgtttccacatgcggaagagcacttgttgaagaagacttactctggcgctgttgtgacaatttttgggctacttataatgattacactgtttgtgcatgagctgcagttttatcttaccacctacacggtgcatcagatgtctgtagatctgaaacgaggagaaactctgccaatccatatcaatatgtcatttccttctttgccatgtgaagtattgagtgtggatgcaattgacatgtctgggaaacatgaagttgatttgcatacaaatatttggaagcttcgcttggataagtatggccatatcatcggtacagagtacttgtctgacctagttgaaaaggggcatggggcacatcatgatcatgaccatgatcatgaccatcacgatgaacaaaagaagcatgaacaaaccttcaacgaagaagcagaaaaaatgatcaagagtgtgaaacaagcactcggaaatggtgaaggctgccgggtctatgggatgttggatgtgcagagggtggctggtaacttccatatctcagtgcatggtttgaacatttttgttgctgaaaagatttttgaagggtcaaaccatgtgaacgtcagtcatgttatccacgagctgtcatttggcccaaagtatccaggaattcataacccactggatgaaacttcaaggatacttcatgacacaagtggaaccttcaaatactatattaaggttgttccgactgagtataaatatctatcaaagaaagtattgccaacaaatcagttttctgtcactgagtattttcttcccatccgtccaactgacagggcctggccagcggtttacttcctgtatgatctgtcaccaattacagtcaccatcaaagaggaaagaaggaacttccttcattttgtaactcgtctatgtgcagttcttggtggcacatttgccatgacaggaatgcttgaccggtggatgtaccagcttatcaagacagtcaccaactcaaagaccagaagtgtactgcggtaattgcacaagtcacgatggatggaaaaccgttggaagtgtggtaccgtggctaatgaagcccatagatctttgcccgaagctaactgatcaagccatgttgatttttgcatgttttattttcttcgtacatggttaacttataatacgtcgttgtttttttttcatcaactatgttagattaacacagtccacggactacattgttaactatgttggtagtggaactgaaatgccaagccgatcttgatcaaccctatagtcccatcgtgcc

SEQ ID NO: 10831 - protein, 350 aa, Zea mays subsp. mays
  peptide (1)..(350): Ceres Seq. ID no. 12412067
  misc_feature (1)..(350): Homolog of NCBI NO: 34897128 NR Description: unknown protein [Oryza sativa]
  misc_feature (6)..(344): Homolog of NCBI NO: 30686584 NR Description: expressed protein [Arabidopsis thaliana]
  misc_feature (6)..(327): Homolog of NCBI NO: 11036454 NR Description: gb|AAF34232.1~gene_id:MCB17.1~similar to unknown
  misc_feature (156)..(334): Homolog of NCBI NO: 38347102 NR Description: OSJNBa0006M15.17 [Oryza sativa (japonica
  misc_feature (4)..(118): Homolog of NCBI NO: 38347102 NR Description: OSJNBa0006M15.17 [Oryza sativa (japonica
  misc_feature (146)..(340): Homolog of NCBI NO: 7706278 NR Description: serologically defined breast cancer antigen 84;
  misc_feature (1)..(118): Homolog of NCBI NO: 7706278 NR Description: serologically defined breast cancer antigen 84;
  misc_feature (146)..(340): Homolog of NCBI NO: 13384938 NR Description: serologically defined breast cancer antigen 84; segment, Chr 2, University of California at Los Angeles 1 [Mus >gi|12844094|dbj|BAB26233.1| unnamed protein product [Mus
  misc_feature (1)..(118): Homolog of NCBI NO: 13384938 NR Description: serologically defined breast cancer antigen 84; segment, Chr 2, University of California at Los Angeles 1 [Mus >gi|12844094|dbj|BAB26233.1| unnamed protein product [Mus
  misc_feature (146)..(340): Homolog of NCBI NO: 34860248 NR Description: similar to serologically defined breast cancer
MARIPSLKSLNAFPHAEEHLLKKTYSGAVVTIFGLLIMITLFVHELQFYLTTYTVHQMSVDLKRGETLPIHINMSFPSLPCEVLSVDAIDMSGKHEVDLHTNIWKLRLDKYGHIIGTEYLSDLVEKGHGAHHDHDHDHDHHDEQKKHEQTFNEEAEKMIKSVKQALGNGEGCRVYGMLDVQRVAGNFHISVHGLNIFVAEKIFEGSNHVNVSHVIHELSFGPKYPGIHNPLDETSRILHDTSGTFKYYIKVVPTEYKYLSKKVLPTNQFSVTEYFLPIRPTDRAWPAVYFLYDLSPITVTIKEERRNFLHFVTRLCAVLGGTFAMTGMLDRWMYQLIKTVTNSKTRSVLR

SEQ ID NO: 10832 - protein, 313 aa, Zea mays subsp. mays
  peptide (1)..(313): Ceres Seq. ID no. 12412068
  misc_feature (1)..(313): Homolog of NCBI NO: 34897128 NR Description: unknown protein [Oryza sativa]
  misc_feature (1)..(307): Homolog of NCBI NO: 30686584 NR Description: expressed protein [Arabidopsis thaliana]
  misc_feature (1)..(290): Homolog of NCBI NO: 11036454 NR Description: gb|AAF34232.1~gene_id:MCB17.1~similar to unknown
  misc_feature (119)..(297): Homolog of NCBI NO: 38347102 NR Description: OSJNBa0006M15.17 [Oryza sativa (japonica
  misc_feature (1)..(81): Homolog of NCBI NO: 38347102 NR Description: OSJNBa0006M15.17 [Oryza sativa (japonica
  misc_feature (109)..(303): Homolog of NCBI NO: 7706278 NR Description: serologically defined breast cancer antigen 84;
  misc_feature (1)..(81): Homolog of NCBI NO: 7706278 NR Description: serologically defined breast cancer antigen 84;
  misc_feature (109)..(303): Homolog of NCBI NO: 13384938 NR Description: serologically defined breast cancer antigen 84; segment, Chr 2, University of California at Los Angeles 1 [Mus >gi|12844094|dbj|BAB26233.1| unnamed protein product [Mus
  misc_feature (1)..(81): Homolog of NCBI NO: 13384938 NR Description: serologically defined breast cancer antigen 84; segment, Chr 2, University of California at Los Angeles 1 [Mus >gi|12844094|dbj|BAB26233.1| unnamed protein product [Mus
  misc_feature (109)..(303): Homolog of NCBI NO: 34860248 NR Description: similar to serologically defined breast cancer
MITLFVHELQFYLTTYTVHQMSVDLKRGETLPIHINMSFPSLPCEVLSVDAIDMSGKHEVDLHTNIWKLRLDKYGHIIGTEYLSDLVEKGHGAHHDHDHDHDHHDEQKKHEQTFNEEAEKMIKSVKQALGNGEGCRVYGMLDVQRVAGNFHISVHGLNIFVAEKIFEGSNHVNVSHVIHELSFGPKYPGIHNPLDETSRILHDTSGTFKYYIKVVPTEYKYLSKKVLPTNQFSVTEYFLPIRPTDRAWPAVYFLYDLSPITVTIKEERRNFLHFVTRLCAVLGGTFAMTGMLDRWMYQLIKTVTNSKTRSVLR

SEQ ID NO: 10833 - protein, 293 aa, Zea mays subsp. mays
  peptide (1)..(293): Ceres Seq. ID no. 12412069
  misc_feature (1)..(293): Homolog of NCBI NO: 34897128 NR Description: unknown protein [Oryza sativa]
  misc_feature (1)..(287): Homolog of NCBI NO: 30686584 NR Description: expressed protein [Arabidopsis thaliana]
  misc_feature (1)..(270): Homolog of NCBI NO: 11036454 NR Description: gb|AAF34232.1~gene_id:MCB17.1~similar to unknown
  misc_feature (99)..(277): Homolog of NCBI NO: 38347102 NR Description: OSJNBa0006M15.17 [Oryza sativa (japonica
  misc_feature (1)..(61): Homolog of NCBI NO: 38347102 NR Description: OSJNBa0006M15.17 [Oryza sativa (japonica
  misc_feature (89)..(283): Homolog of NCBI NO: 7706278 NR Description: serologically defined breast cancer antigen 84;
  misc_feature (1)..(61): Homolog of NCBI NO: 7706278 NR Description: serologically defined breast cancer antigen 84;
  misc_feature (89)..(283): Homolog of NCBI NO: 13384938 NR Description: serologically defined breast cancer antigen 84; segment, Chr 2, University of California at Los Angeles 1 [Mus >gi|12844094|dbj|BAB26233.1| unnamed protein product [Mus
  misc_feature (1)..(61): Homolog of NCBI NO: 13384938 NR Description: serologically defined breast cancer antigen 84; segment, Chr 2, University of California at Los Angeles 1 [Mus >gi|12844094|dbj|BAB26233.1| unnamed protein product [Mus
  misc_feature (89)..(283): Homolog of NCBI NO: 34860248 NR Description: similar to serologically defined breast cancer
MSVDLKRGETLPIHINMSFPSLPCEVLSVDAIDMSGKHEVDLHTNIWKLRLDKYGHIIGTEYLSDLVEKGHGAHHDHDHDHDHHDEQKKHEQTFNEEAEKMIKSVKQALGNGEGCRVYGMLDVQRVAGNFHISVHGLNIFVAEKIFEGSNHVNVSHVIHELSFGPKYPGIHNPLDETSRILHDTSGTFKYYIKVVPTEYKYLSKKVLPTNQFSVTEYFLPIRPTDRAWPAVYFLYDLSPITVTIKEERRNFLHFVTRLCAVLGGTFAMTGMLDRWMYQLIKTVTNSKTRSVLR

SEQ ID NO: 10834 - DNA, 1257 bp, Zea mays subsp. mays
  misc_feature (1)..(1257): Ceres Seq. ID no. 12412062
  misc_feature: MA Experiment ID: 108528 Result: Down-regulated in Transcription
  misc_feature: MA Experiment 108528 PARAMETER Experiment Name: Zm_Imbibed_Seeds_P Parameter: Age (day) Value: 5 vs. 2
  misc_feature: MA Experiment 108528 PARAMETER Experiment Name: Zm_Imbibed_Seeds_P Parameter: Organism Value: Zea mays
  misc_feature: MA Experiment 108528 PARAMETER Experiment Name: Zm_Imbibed_Seeds_P Parameter: Plant Line Value: 35A19
  misc_feature: MA Experiment 108528 PARAMETER Experiment Name: Zm_Imbibed_Seeds_P Parameter: Tissue Value: Aerial vs. Embryo
  misc_feature: MA Experiment ID: 108530 Result: Down-regulated in Transcription
  misc_feature: MA Experiment 108530 PARAMETER Experiment Name: Zm_Imbibed_Seeds_P Parameter: Age (day) Value: 6 vs. 2
  misc_feature: MA Experiment 108530 PARAMETER Experiment Name: Zm_Imbibed_Seeds_P Parameter: Organism Value: Zea mays
  misc_feature: MA Experiment 108530 PARAMETER Experiment Name: Zm_Imbibed_Seeds_P Parameter: Plant Line Value: 35A19
  misc_feature: MA Experiment 108530 PARAMETER Experiment Name: Zm_Imbibed_Seeds_P Parameter: Tissue Value: Aerial vs. Embryo
  misc_feature: MA Experiment ID: 108535 Result: Up-regulated in Transcription
  misc_feature: MA Experiment 108535 PARAMETER Experiment Name: Zm_Meristem_P Parameter: Age (day) Value: 8
  misc_feature: MA Experiment 108535 PARAMETER Experiment Name: Zm_Meristem_P Parameter: Organism Value: Zea mays
  misc_feature: MA Experiment 108535 PARAMETER Experiment Name: Zm_Meristem_P Parameter: Plant Line Value: 35A19
  misc_feature: MA Experiment 108535 PARAMETER Experiment Name: Zm_Meristem_P Parameter: Tissue Value: Root Meristem vs. Above Root Meristem
attgaaattttccgtttgcaccctaccgagaggtgacgacgagtgaggagtctgtgtgaccagtgctcggcgtcgtcccctgcctctgctagccgctaggcgacgggcccttcgccgggcgacgagcacaccggccctgttaccatggcagcgatgaatactggtatgggaggtttaggtggcaggccgatacatccacaagcaaatccttttggacctgctttgcagggtgctggaccaggattgatccgtactgggctagaaacatatggcggaaggattttagattcaagttctgagtttatgcagagcaatataacacaatatttgtccgaccctcagtactactttcaagtcaacagccagtatgtgaggaacaaactgaaggtcatcttgttccctttcttgcacaggggccactggacaagaataactgaaccagtaggaggaaggctatcctacaaacctccagtccaggatatcaatgcaccggacttgtacatccctttgatggcatttggcacctacattgtagctgctgggtatgccttgggtgttcttggaaggtttacccctgaggcactgaccctacagttttctaaagggatacttgggtggtttctgcaagtcgtcctcatcaaaggtctgctgtactccctgggaagcggtgaagctcccttgctggacatcgtggcgtatgctggatatggcttcgctggcacttcccttgcaatggtggcccgcatcttctggagctacctgtattacttcatcatgccatggttctgcctctgcacgggagtcttccctgtgaagaccatgaagagggttcttctgggcgggccaaggagctacgagagacaccccggccggaaccactacttcctgatcttcttggcggtcgtgcaattccccatgctgttctggctcggcaacatatgtggctgacctttgatcctattggtcgggccacagacctgtttcttcttcttcttcagaataggcatgtgctacttctggcttgctgatgaaacttaggtttatcgtggagatggtacagaactattagctatagatatctgggcaatcgaataaactgtttttgtttctgttagctatagaggcgaaagtaaaaacaatcgtttgggataggataaagatgaactgcttcgtgtgtacccttttgtgtcacgagcggctagccacgaccctgcaatctgatttgttttttaatgatcactgctacttgatctttcc

SEQ ID NO: 10835 - protein, 267 aa, Zea mays subsp. mays
  peptide (1)..(267): Ceres Seq. ID no. 12412063
  misc_feature (17)..(265): Homolog of NCBI NO: 38346458 NR Description: OSJNBa0019G23.6 [Oryza sativa (japonica
  misc_feature (4)..(265): Homolog of NCBI NO: 18397705 NR Description: expressed protein; protein id: At1g30890.1, by cDNA: 251549., supported by cDNA: gi_14532657, supported by gi_21280942 [Arabidopsis thaliana] >gi|14532658|gb|AAK64057.1|
  misc_feature (4)..(265): Homolog of NCBI NO: 30695009 NR Description: expressed protein [Arabidopsis thaliana]
  misc_feature (17)..(265): Homolog of NCBI NO: 11282553 NR Description: hypothetical protein T16L24.50 - Arabidopsis >gi|6996286|emb|CAB75447.1| putative protein [Arabidopsis
  misc_feature (17)..(265): Homolog of NCBI NO: 33589682 NR Description: At3g59500 [Arabidopsis thaliana]
  misc_feature (10)..(265): Homolog of NCBI NO: 9755388 NR Description: F17F8.24 [Arabidopsis thaliana]
  misc_feature (142)..(265): Homolog of NCBI NO: 10241632 NR Description: putative protein [Oryza sativa (indica
  misc_feature (1)..(262): Homolog of NCBI NO: 14043299 NR Description: Similar to RIKEN cDNA 9430029K10 gene [Homo
  misc_feature (1)..(262): Homolog of NCBI NO: 24308364 NR Description: similar to putative transmembrane protein;
  misc_feature (10)..(262): Homolog of NCBI NO: 12861030 NR Description: unnamed protein product [Mus musculus]
MAAMNTGMGGLGGRPIHPQANPFGPALQGAGPGLIRTGLETYGGRILDSSSEFMQSNITQYLSDPQYYFQVNSQYVRNKLKVILFPFLHRGHWTRITEPVGGRLSYKPPVQDINAPDLYIPLMAFGTYIVAAGYALGVLGRFTPEALTLQFSKGILGWFLQVVLIKGLLYSLGSGEAPLLDIVAYAGYGFAGTSLAMVARIFWSYLYYFIMPWFCLCTGVFPVKTMKRVLLGGPRSYERHPGRNHYFLIFLAVVQFPMLFWLGNICG

SEQ ID NO: 10836 - protein, 264 aa, Zea mays subsp. mays
  peptide (1)..(264): Ceres Seq. ID no. 12412064
  misc_feature (14)..(262): Homolog of NCBI NO: 38346458 NR Description: OSJNBa0019G23.6 [Oryza sativa (japonica
  misc_feature (1)..(262): Homolog of NCBI NO: 18397705 NR Description: expressed protein; protein id: At1g30890.1, by cDNA: 251549., supported by cDNA: gi_14532657, supported by gi_21280942 [Arabidopsis thaliana] >gi|14532658|gb|AAK64057.1|
  misc_feature (1)..(262): Homolog of NCBI NO: 30695009 NR Description: expressed protein [Arabidopsis thaliana]
  misc_feature (14)..(262): Homolog of NCBI NO: 11282553 NR Description: hypothetical protein T16L24.50 - Arabidopsis >gi|6996286|emb|CAB75447.1| putative protein [Arabidopsis
  misc_feature (14)..(262): Homolog of NCBI NO: 33589682 NR Description: At3g59500 [Arabidopsis thaliana]
  misc_feature (7)..(262): Homolog of NCBI NO: 9755388 NR Description: F17F8.24 [Arabidopsis thaliana]
  misc_feature (139)..(262): Homolog of NCBI NO: 10241632 NR Description: putative protein [Oryza sativa (indica
  misc_feature (1)..(259): Homolog of NCBI NO: 14043299 NR Description: Similar to RIKEN cDNA 9430029K10 gene [Homo
  misc_feature (1)..(259): Homolog of NCBI NO: 24308364 NR Description: similar to putative transmembrane protein;
  misc_feature (7)..(259): Homolog of NCBI NO: 12861030 NR Description: unnamed protein product [Mus musculus]
MNTGMGGLGGRPIHPQANPFGPALQGAGPGLIRTGLETYGGRILDSSSEFMQSNITQYLSDPQYYFQVNSQYVRNKLKVILFPFLHRGHWTRITEPVGGRLSYKPPVQDINAPDLYIPLMAFGTYIVAAGYALGVLGRFTPEALTLQFSKGILGWFLQVVLIKGLLYSLGSGEAPLLDIVAYAGYGFAGTSLAMVARIFWSYLYYFIMPWFCLCTGVFPVKTMKRVLLGGPRSYERHPGRNHYFLIFLAVVQFPMLFWLGNICG

SEQ ID NO: 10837 - protein, 260 aa, Zea mays subsp. mays
  peptide (1)..(260): Ceres Seq. ID no. 12412065
  misc_feature (10)..(258): Homolog of NCBI NO: 38346458 NR Description: OSJNBa0019G23.6 [Oryza sativa (japonica
  misc_feature (1)..(258): Homolog of NCBI NO: 18397705 NR Description: expressed protein; protein id: At1g30890.1, by cDNA: 251549., supported by cDNA: gi_14532657, supported by gi_21280942 [Arabidopsis thaliana] >gi|14532658|gb|AAK64057.1|
  misc_feature (1)..(258): Homolog of NCBI NO: 30695009 NR Description: expressed protein [Arabidopsis thaliana]
  misc_feature (10)..(258): Homolog of NCBI NO: 11282553 NR Description: hypothetical protein T16L24.50 - Arabidopsis >gi|6996286|emb|CAB75447.1| putative protein [Arabidopsis
  misc_feature (10)..(258): Homolog of NCBI NO: 33589682 NR Description: At3g59500 [Arabidopsis thaliana]
  misc_feature (3)..(258): Homolog of NCBI NO: 9755388 NR Description: F17F8.24 [Arabidopsis thaliana]
  misc_feature (135)..(258): Homolog of NCBI NO: 10241632 NR Description: putative protein [Oryza sativa (indica
  misc_feature (1)..(255): Homolog of NCBI NO: 14043299 NR Description: Similar to RIKEN cDNA 9430029K10 gene [Homo
  misc_feature (1)..(255): Homolog of NCBI NO: 24308364 NR Description: similar to putative transmembrane protein;
  misc_feature (3)..(255): Homolog of NCBI NO: 12861030 NR Description: unnamed protein product [Mus musculus]
MGGLGGRPIHPQANPFGPALQGAGPGLIRTGLETYGGRILDSSSEFMQSNITQYLSDPQYYFQVNSQYVRNKLKVILFPFLHRGHWTRITEPVGGRLSYKPPVQDINAPDLYIPLMAFGTYIVAAGYALGVLGRFTPEALTLQFSKGILGWFLQVVLIKGLLYSLGSGEAPLLDIVAYAGYGFAGTSLAMVARIFWSYLYYFIMPWFCLCTGVFPVKTMKRVLLGGPRSYERHPGRNHYFLIFLAVVQFPMLFWLGNICG

SEQ ID NO: 10838 - DNA, 1602 bp, Zea mays subsp. mays
  misc_feature (1)..(1602): Ceres Seq. ID no. 12372680
  misc_feature: MA Experiment ID: 20000535 Result: Up-regulated in Transcription
  misc_feature: MA Experiment 20000535 PARAMETER Experiment Name: Zm_Hybrid_Seed_Dev_P Parameter: DAP Value: 30 vs. 12
  misc_feature: MA Experiment 20000535 PARAMETER Experiment Name: Zm_Hybrid_Seed_Dev_P Parameter: Organism Value: Zea mays
  misc_feature: MA Experiment 20000535 PARAMETER Experiment Name: Zm_Hybrid_Seed_Dev_P Parameter: Plant Line Value: 35A19
  misc_feature: MA Experiment 20000535 PARAMETER Experiment Name: Zm_Hybrid_Seed_Dev_P Parameter: Tissue Value: Embryo vs. Unfert Floret
tctcccaaagccatcttccttccgcggactagttttttctgaagattcggcgatggcggcgacgatccaatccgtgaaggcgcgccagatctttgacagccgcggcaaccctacagtcgaggtcgacgtgttttgctcagatggaacctttgcaagggcagctgttcccagtggagcatcaactggtgtatatgaagctctggagttgagggatggtggctctgactatttggggaagggtgtctccaaggctgtgaacaatgtgaattctgttattggacctgctctgattggcaaggaccctacagcacagactgagattgataacttcatggttcaacaacttgatgggaccaaaaatgagtggggatggtgcaagcaaaagcttggtgctaatgcgattctggctgtgtcattagctgtttgcaaagctggggctagcatcaagaggattcctttataccagcacattgccaacctagctgggaacaagcagttagtgttgcctgtccctgcattcaatgtcatcaacggtggttcccatgctggaaacaagcttgctatgcaggagtttatgatccttcctactggagctgcctcatttaaggaggctatgaagatgggtgttgaagtttatcaccacctgaagtccgttatcaaaaagaagtatgggcaagatgccacgaatgttggtgacgaaggtggttttgctccgaacatccaggagaacaaggaaggacttgagctcttgaaaactgcaattgagaaggctggatacactggcaaggttgtcatcggaatggatgttgcttcttcggagttttacagtgacaaggaccaaacctatgacctcaactttaaggaggagaataatgatggttcacagaagatatctggcgatagcttaaagaatgtatacaaatcttttgtgagcgaataccccattgtttcgattgaagatccttttgaccaggatgactgggttcactatgctaagatgactgaagaaattggagagcaagtgcagattgttggtgatgaccttctcgtcaccaaccccactagggttgctaaggctatcaaggagaaatcatgcaatgcccttctgctcaaggttaaccaaatcggatctgtgactgagagtattgaggctgtgaagatgtcaaagcgtgcgggctggggtgtgatgactagtcataggagtggtgagactgaggacactttcattgctgatctggcagttggtttgtccacgggtcagattaagactggagcaccctgcagatcagagcgtcttgccaaatacaaccagcttcttaggattgaagaagagcttggcgctattgctgtctacgcaggtgccaaattccgtgcacctgtggagccctactaaacgggcgggatgcaagtgcttttatgtctgcacaagtcctgtgaaactgtttactgcgacctgcagattttactcttggagtgccctgagtagattttagcaataatatccaacatgtaacatgttacggacatgtacccaaacgtgatccagttttagttaatgtgctccatgcttgacgtttaaaaaaaaaaaaaaaaaaaaagaaa

SEQ ID NO: 10839 - protein, 463 aa, Zea mays subsp. mays
  peptide (1)..(463): Ceres Seq. ID no. 12372681
  misc_feature (165)..(460): Pfam Name: Enolase, C-terminal TIM barrel domain Pfam Description: Enolase, C-terminal TIM barrel domain
  misc_feature (18)..(463): Homolog of NCBI NO: 1169528 NR Description: Enolase 2 (2-phosphoglycerate dehydratase 2)
  misc_feature (18)..(463): Homolog of NCBI NO: 3023713 NR Description: Enolase (2-phosphoglycerate dehydratase)
  misc_feature (18)..(463): Homolog of NCBI NO: 119355 NR Description: Enolase 1 (2-phosphoglycerate dehydratase 1)
  misc_feature (18)..(418): Homolog of NCBI NO: 37531422 NR Description: putative enolase (2-phospho-D-glycerate
  misc_feature (438)..(463): Homolog of NCBI NO: 37531422 NR Description: putative enolase (2-phospho-D-glycerate
  misc_feature (20)..(463): Homolog of NCBI NO: 119354 NR Description: Enolase (2-phosphoglycerate dehydratase)
  misc_feature (21)..(463): Homolog of NCBI NO: 8919731 NR Description: enolase [Spinacia oleracea]
  misc_feature (18)..(463): Homolog of NCBI NO: 1169534 NR Description: Enolase (2-phosphoglycerate dehydratase)
  misc_feature (18)..(463): Homolog of NCBI NO: 14423688 NR Description: Enolase 1 (2-phosphoglycerate dehydratase 1)
  misc_feature (20)..(463): Homolog of NCBI NO: 15227987 NR Description: enolase (2-phospho-D-glycerate hydroylase); id: At2g36530.1, supported by cDNA: gi_15809969, supported by
LPKPSSFRGLVFSEDSAMAATIQSVKARQIFDSRGNPTVEVDVFCSDGTFARAAVPSGASTGVYEALELRDGGSDYLGKGVSKAVNNVNSVIGPALIGKDPTAQTEIDNFMVQQLDGTKNEWGWCKQKLGANAILAVSLAVCKAGASIKRIPLYQHIANLAGNKQLVLPVPAFNVINGGSHAGNKLAMQEFMILPTGAASFKEAMKMGVEVYHHLKSVIKKKYGQDATNVGDEGGFAPNIQENKEGLELLKTAIEKAGYTGKVVIGMDVASSEFYSDKDQTYDLNFKEENNDGSQKISGDSLKNVYKSFVSEYPIVSIEDPFDQDDWVHYAKMTEEIGEQVQIVGDDLLVTNPTRVAKAIKEKSCNALLLKVNQIGSVTESIEAVKMSKRAGWGVMTSHRSGETEDTFIADLAVGLSTGQIKTGAPCRSERLAKYNQLLRIEEELGAIAVYAGAKFRAPVEPY

SEQ ID NO: 10840 - protein, 446 aa, Zea mays subsp. mays
  peptide (1)..(446): Ceres Seq. ID no. 12372682
  misc_feature (148)..(443): Pfam Name: Enolase, C-terminal TIM barrel domain Pfam Description: Enolase, C-terminal TIM barrel domain
  misc_feature (1)..(446): Homolog of NCBI NO: 1169528 NR Description: Enolase 2 (2-phosphoglycerate dehydratase 2)
  misc_feature (1)..(446): Homolog of NCBI NO: 3023713 NR Description: Enolase (2-phosphoglycerate dehydratase)
  misc_feature (1)..(446): Homolog of NCBI NO: 119355 NR Description: Enolase 1 (2-phosphoglycerate dehydratase 1)
  misc_feature (1)..(401): Homolog of NCBI NO: 37531422 NR Description: putative enolase (2-phospho-D-glycerate
  misc_feature (421)..(446): Homolog of NCBI NO: 37531422 NR Description: putative enolase (2-phospho-D-glycerate
  misc_feature (3)..(446): Homolog of NCBI NO: 119354 NR Description: Enolase (2-phosphoglycerate dehydratase)
  misc_feature (4)..(446): Homolog of NCBI NO: 8919731 NR Description: enolase [Spinacia oleracea]
  misc_feature (1)..(446): Homolog of NCBI NO: 1169534 NR Description: Enolase (2-phosphoglycerate dehydratase)
  misc_feature (1)..(446): Homolog of NCBI NO: 14423688 NR Description: Enolase 1 (2-phosphoglycerate dehydratase 1)
  misc_feature (3)..(446): Homolog of NCBI NO: 15227987 NR Description: enolase (2-phospho-D-glycerate hydroylase); id: At2g36530.1, supported by cDNA: gi_15809969, supported by
MAATIQSVKARQIFDSRGNPTVEVDVFCSDGTFARAAVPSGASTGVYEALELRDGGSDYLGKGVSKAVNNVNSVIGPALIGKDPTAQTEIDNFMVQQLDGTKNEWGWCKQKLGANAILAVSLAVCKAGASIKRIPLYQHIANLAGNKQLVLPVPAFNVINGGSHAGNKLAMQEFMILPTGAASFKEAMKMGVEVYHHLKSVIKKKYGQDATNVGDEGGFAPNIQENKEGLELLKTAIEKAGYTGKVVIGMDVASSEFYSDKDQTYDLNFKEENNDGSQKISGDSLKNVYKSFVSEYPIVSIEDPFDQDDWVHYAKMTEEIGEQVQIVGDDLLVTNPTRVAKAIKEKSCNALLLKVNQIGSVTESIEAVKMSKRAGWGVMTSHRSGETEDTFIADLAVGLSTGQIKTGAPCRSERLAKYNQLLRIEEELGAIAVYAGAKFRAPVEPY

SEQ ID NO: 10841 - protein, 353 aa, Zea mays subsp. mays
  peptide (1)..(353): Ceres Seq. ID no. 12372683
  misc_feature (55)..(350): Pfam Name: Enolase, C-terminal TIM barrel domain Pfam Description: Enolase, C-terminal TIM barrel domain
  misc_feature (1)..(353): Homolog of NCBI NO: 1169528 NR Description: Enolase 2 (2-phosphoglycerate dehydratase 2)
  misc_feature (1)..(353): Homolog of NCBI NO: 3023713 NR Description: Enolase (2-phosphoglycerate dehydratase)
  misc_feature (1)..(353): Homolog of NCBI NO: 119355 NR Description: Enolase 1 (2-phosphoglycerate dehydratase 1)
  misc_feature (1)..(308): Homolog of NCBI NO: 37531422 NR Description: putative enolase (2-phospho-D-glycerate
  misc_feature (328)..(353): Homolog of NCBI NO: 37531422 NR Description: putative enolase (2-phospho-D-glycerate
  misc_feature (1)..(353): Homolog of NCBI NO: 119354 NR Description: Enolase (2-phosphoglycerate dehydratase)
  misc_feature (1)..(353): Homolog of NCBI NO: 8919731 NR Description: enolase [Spinacia oleracea]
  misc_feature (1)..(353): Homolog of NCBI NO: 1169534 NR Description: Enolase (2-phosphoglycerate dehydratase)
  misc_feature (1)..(353): Homolog of NCBI NO: 14423688 NR Description: Enolase 1 (2-phosphoglycerate dehydratase 1)
  misc_feature (1)..(353): Homolog of NCBI NO: 15227987 NR Description: enolase (2-phospho-D-glycerate hydroylase); id: At2g36530.1, supported by cDNA: gi_15809969, supported by
MVQQLDGTKNEWGWCKQKLGANAILAVSLAVCKAGASIKRIPLYQHIANLAGNKQLVLPVPAFNVINGGSHAGNKLAMQEFMILPTGAASFKEAMKMGVEVYHHLKSVIKKKYGQDATNVGDEGGFAPNIQENKEGLELLKTAIEKAGYTGKVVIGMDVASSEFYSDKDQTYDLNFKEENNDGSQKISGDSLKNVYKSFVSEYPIVSIEDPFDQDDWVHYAKMTEEIGEQVQIVGDDLLVTNPTRVAKAIKEKSCNALLLKVNQIGSVTESIEAVKMSKRAGWGVMTSHRSGETEDTFIADLAVGLSTGQIKTGAPCRSERLAKYNQLLRIEEELGAIAVYAGAKFRAPVEPY

SEQ ID NO: 10842 - DNA, 1529 bp, Zea mays subsp. mays
  misc_feature (1)..(1529): Ceres Seq. ID no. 12369098
  misc_feature: MA Experiment ID: 108535 Result: Up-regulated in Transcription
  misc_feature: MA Experiment 108535 PARAMETER Experiment Name: Zm_Meristem_P Parameter: Age (day) Value: 8
  misc_feature: MA Experiment 108535 PARAMETER Experiment Name: Zm_Meristem_P Parameter: Organism Value: Zea mays
  misc_feature: MA Experiment 108535 PARAMETER Experiment Name: Zm_Meristem_P Parameter: Plant Line Value: 35A19
  misc_feature: MA Experiment 108535 PARAMETER Experiment Name: Zm_Meristem_P Parameter: Tissue Value: Root Meristem vs. Above Root Meristem
  misc_feature: MA Experiment ID: 108543 Result: Up-regulated in Transcription
  misc_feature: MA Experiment ID: 20000632 Result: Down-regulated in Transcription
  misc_feature: MA Experiment 20000632 PARAMETER Experiment Name: Zm_Herbicide-Treatments_P Parameter: Timepoint (hr) Value: 4
  misc_feature: MA Experiment 20000632 PARAMETER Experiment Name: Zm_Herbicide-Treatments_P Parameter: Tissue Value: Aerial
  misc_feature: MA Experiment 20000632 PARAMETER Experiment Name: Zm_Herbicide-Treatments_P Parameter: Treatment Value: Glean vs. No Treatment
acccgagaatactcgcgctcgcgcactcgacattcctcgccccccacgccggttcaccctgcgcgcacgcgctcagcatctcgcaatcccccgggcggaggcgtatgtcctgcgccgtggcgatgccgatcgacttgctccacgctccagctccgtgggaggaggaggtgaaggcggttgaggaggacgaggaggaggtggagggagtaggatgcggcggaggggccgtggtggtggtcgcggcggacgcggaggcggagggtcacccctacgacttccacgtgtccgggccgcgcaacctgccgccgcccaactggaaggagataatcagatcgagctggaaggatccaaattacaaaaggatggtaatggcctgcttcattcaagcagtctacctgcttgaactggacagacaggacaagaaaggcgaagaggatggccttgctccaaaatggtggagacccttcaagtacaaggtcactcagacattggtggatgagagagatggttccatctatggcgccatgctggagtgggatcgttcttctgccttgtgtgactttatcctcatgagaccaagcggggcaccgagggctgtgttagctctcagaggaaccctcctgcagaagccaactatgaagagagatctgcaggatgaccttcgcttcttggtatgggagagcctcaaaggttcagtgagatttgttggtgctttagcagcgctaaaatcagcagttgagaagtttggcagcgccaatgtttgtgttgccgggcactccttgggagctggctttgcactccaagtctgcaaggagcttgccaaacatggagtttttgtggagtgtcatcttttcaatccaccttctgtttcactggccatgggtgtaaggaccatgagtgagaaggccagctacctgtggaagaaagtcaaaggaagtctgccattgaaggaagacacaacaccaccacttgagactgctaaggctgatgcaagtgacaagaagagattgcgcgccgagaagaaatgggtgccacatttatatgtcaacaacagtgattacatctgctgccactacaacgctccatcctgctcgtccacaacaacagatggtgcttccaacgaacagcagcaacaacaacgcaaggctagtgaaattgccggtgatgtggtcgcaaagctctttgtgacatcaaaagggccacagaaattccttgaggcgcatgggctacagcagtggtggtcagatggcatggagctgcagctggctctctatgacagcaagctcataaacaggcagctgaaatccatctacgcaacaacaacagaaatgccatctcctgccaagtcctagacacggcttaagccgctgttgcatcggtcattagaaatactctttctaaccagtgtgtgttcctttatcaactgagaatgttttattactccagtgatgccccaaaacagtcgaataatttgattaaagggatagtgtgtgaacagtttcgacaaaacaacattgtatttcaactct

SEQ ID NO: 10843 - protein, 449 aa, Zea mays subsp. mays
  peptide (1)..(449): Ceres Seq. ID no. 12369099
  misc_feature (111)..(310): Homolog of NCBI NO: 34901136 NR Description: contains EST AU161031(C53313)~similar to Oryza
  misc_feature (92)..(358): Homolog of NCBI NO: 30689345 NR Description: expressed protein [Arabidopsis thaliana] unknown protein [Arabidopsis thaliana]
  misc_feature (113)..(358): Homolog of NCBI NO: 18396010 NR Description: expressed protein; protein id: At2g05260.1, by cDNA: 33377. [Arabidopsis thaliana] >gi|25411153|pir||E84466
  misc_feature (113)..(413): Homolog of NCBI NO: 15237918 NR Description: putative protein; protein id: At5g24220.1 thaliana] >gi|10177081|dbj|BAB10387.1|
  misc_feature (91)..(427): Homolog of NCBI NO: 18413406 NR Description: unknown protein; protein id: At4g10955.1
  misc_feature (41)..(448): Homolog of NCBI NO: 34909578 NR Description: P0046E05.21 [Oryza sativa (japonica
  misc_feature (77)..(438): Homolog of NCBI NO: 34910916 NR Description: OSJNBb0063G05.3 [Oryza sativa (japonica
  misc_feature (58)..(438): Homolog of NCBI NO: 15241306 NR Description: putative protein; protein id: At5g50890.1 thaliana] >gi|9758236|dbj|BAB08735.1|
  misc_feature (199)..(437): Homolog of NCBI NO: 34904536 NR Description: B1066G12.13 [Oryza sativa (japonica
  misc_feature (90)..(159): Homolog of NCBI NO: 34904536 NR Description: B1066G12.13 [Oryza sativa (japonica
PRILALAHSTFLAPHAGSPCAHALSISQSPGRRRMSCAVAMPIDLLHAPAPWEEEVKAVEEDEEEVEGVGCGGGAVVVVAADAEAEGHPYDFHVSGPRNLPPPNWKEIIRSSWKDPNYKRMVMACFIQAVYLLELDRQDKKGEEDGLAPKWWRPFKYKVTQTLVDERDGSIYGAMLEWDRSSALCDFILMRPSGAPRAVLALRGTLLQKPTMKRDLQDDLRFLVWESLKGSVRFVGALAALKSAVEKFGSANVCVAGHSLGAGFALQVCKELAKHGVFVECHLFNPPSVSLAMGVRTMSEKASYLWKKVKGSLPLKEDTTPPLETAKADASDKKRLRAEKKWVPHLYVNNSDYICCHYNAPSCSSTTTDGASNEQQQQQRKASEIAGDVVAKLFVTSKGPQKFLEAHGLQQWWSDGMELQLALYDSKLINRQLKSIYATTTEMPSPAKS

SEQ ID NO: 10844 - protein, 415 aa, Zea mays subsp. mays
  peptide (1)..(415): Ceres Seq. ID no. 12369100
  misc_feature (7)..(414): Homolog of NCBI NO: 34909578 NR Description: P0046E05.21 [Oryza sativa (japonica
  misc_feature (43)..(404): Homolog of NCBI NO: 34910916 NR Description: OSJNBb0063G05.3 [Oryza sativa (japonica
  misc_feature (24)..(404): Homolog of NCBI NO: 15241306 NR Description: putative protein; protein id: At5g50890.1 thaliana] >gi|9758236|dbj|BAB08735.1|
  misc_feature (165)..(403): Homolog of NCBI NO: 34904536 NR Description: B1066G12.13 [Oryza sativa (japonica
  misc_feature (56)..(125): Homolog of NCBI NO: 34904536 NR Description: B1066G12.13 [Oryza sativa (japonica
  misc_feature (77)..(276): Homolog of NCBI NO: 34901136 NR Description: contains EST AU161031(C53313)~similar to Oryza
  misc_feature (58)..(324): Homolog of NCBI NO: 30689345 NR Description: expressed protein [Arabidopsis thaliana] unknown protein [Arabidopsis thaliana]
  misc_feature (79)..(324): Homolog of NCBI NO: 18396010 NR Description: expressed protein; protein id: At2g05260.1, by cDNA: 33377. [Arabidopsis thaliana] >gi|25411153|pir||E84466
  misc_feature (79)..(379): Homolog of NCBI NO: 15237918 NR Description: putative protein; protein id: At5g24220.1 thaliana] >gi|10177081|dbj|BAB10387.1|
  misc_feature (57)..(393): Homolog of NCBI NO: 18413406 NR Description: unknown protein; protein id: At4g10955.1
MSCAVAMPIDLLHAPAPWEEEVKAVEEDEEEVEGVGCGGGAVVVVAADAEAEGHPYDFHVSGPRNLPPPNWKEIIRSSWKDPNYKRMVMACFIQAVYLLELDRQDKKGEEDGLAPKWWRPFKYKVTQTLVDERDGSIYGAMLEWDRSSALCDFILMRPSGAPRAVLALRGTLLQKPTMKRDLQDDLRFLVWESLKGSVRFVGALAALKSAVEKFGSANVCVAGHSLGAGFALQVCKELAKHGVFVECHLFNPPSVSLAMGVRTMSEKASYLWKKVKGSLPLKEDTTPPLETAKADASDKKRLRAEKKWVPHLYVNNSDYICCHYNAPSCSSTTTDGASNEQQQQQRKASEIAGDVVAKLFVTSKGPQKFLEAHGLQQWWSDGMELQLALYDSKLINRQLKSIYATTTEMPSPAKS

SEQ ID NO: 10845 - protein, 409 aa, Zea mays subsp. mays
  peptide (1)..(409): Ceres Seq. ID no. 12369101
  misc_feature (1)..(408): Homolog of NCBI NO: 34909578 NR Description: P0046E05.21 [Oryza sativa (japonica
  misc_feature (37)..(398): Homolog of NCBI NO: 34910916 NR Description: OSJNBb0063G05.3 [Oryza sativa (japonica
  misc_feature (18)..(398): Homolog of NCBI NO: 15241306 NR Description: putative protein; protein id: At5g50890.1 thaliana] >gi|9758236|dbj|BAB08735.1|
  misc_feature (159)..(397): Homolog of NCBI NO: 34904536 NR Description: B1066G12.13 [Oryza sativa (japonica
  misc_feature (50)..(119): Homolog of NCBI NO: 34904536 NR Description: B1066G12.13 [Oryza sativa (japonica
  misc_feature (71)..(270): Homolog of NCBI NO: 34901136 NR Description: contains EST AU161031(C53313)~similar to Oryza
  misc_feature (52)..(318): Homolog of NCBI NO: 30689345 NR Description: expressed protein [Arabidopsis thaliana] unknown protein [Arabidopsis thaliana]
  misc_feature (73)..(318): Homolog of NCBI NO: 18396010 NR Description: expressed protein; protein id: At2g05260.1, by cDNA: 33377. [Arabidopsis thaliana] >gi|25411153|pir||E84466
  misc_feature (73)..(373): Homolog of NCBI NO: 15237918 NR Description: putative protein; protein id: At5g24220.1 thaliana] >gi|10177081|dbj|BAB10387.1|
  misc_feature (51)..(387): Homolog of NCBI NO: 18413406 NR Description: unknown protein; protein id: At4g10955.1
MPIDLLHAPAPWEEEVKAVEEDEEEVEGVGCGGGAVVVVAADAEAEGHPYDFHVSGPRNLPPPNWKEIIRSSWKDPNYKRMVMACFIQAVYLLELDRQDKKGEEDGLAPKWWRPFKYKVTQTLVDERDGSIYGAMLEWDRSSALCDFILMRPSGAPRAVLALRGTLLQKPTMKRDLQDDLRFLVWESLKGSVRFVGALAALKSAVEKFGSANVCVAGHSLGAGFALQVCKELAKHGVFVECHLFNPPSVSLAMGVRTMSEKASYLWKKVKGSLPLKEDTTPPLETAKADASDKKRLRAEKKWVPHLYVNNSDYICCHYNAPSCSSTTTDGASNEQQQQQRKASEIAGDVVAKLFVTSKGPQKFLEAHGLQQWWSDGMELQLALYDSKLINRQLKSIYATTTEMPSPAKS

SEQ ID NO: 10846 - DNA, 909 bp, Zea mays subsp. mays
  misc_feature (1)..(909): Ceres Seq. ID no. 13499033
  misc_feature: MA Experiment ID: 108504 Result: Up-regulated in Transcription
  misc_feature: MA Experiment 108504 PARAMETER Experiment Name: Zm_Drought_P Parameter: Age (day) Value: 8
  misc_feature: MA Experiment 108504 PARAMETER Experiment Name: Zm_Drought_P Parameter: Organism Value: Zea mays
  misc_feature: MA Experiment 108504 PARAMETER Experiment Name: Zm_Drought_P Parameter: Plant Line Value: 35A19
  misc_feature: MA Experiment 108504 PARAMETER Experiment Name: Zm_Drought_P Parameter: Timepoint (hr) Value: 12
  misc_feature: MA Experiment 108504 PARAMETER Experiment Name: Zm_Drought_P Parameter: Tissue Value: Aerial
  misc_feature: MA Experiment 108504 PARAMETER Experiment Name: Zm_Drought_P Parameter: Treatment Value: Drought vs. No Drought
  misc_feature: MA Experiment ID: 108513 Result: Up-regulated in Transcription
  misc_feature: MA Experiment 108513 PARAMETER Experiment Name: Zm_100uM_ABA_P Parameter: Age (day) Value: 8
  misc_feature: MA Experiment 108513 PARAMETER Experiment Name: Zm_100uM_ABA_P Parameter: Organism Value: Zea mays
  misc_feature: MA Experiment 108513 PARAMETER Experiment Name: Zm_100uM_ABA_P Parameter: Plant Line Value: 35A19
  misc_feature: MA Experiment 108513 PARAMETER Experiment Name: Zm_100uM_ABA_P Parameter: Timepoint (hr) Value: 6
  misc_feature: MA Experiment 108513 PARAMETER Experiment Name: Zm_100uM_ABA_P Parameter: Tissue Value: Aerial
  misc_feature: MA Experiment 108513 PARAMETER Experiment Name: Zm_100uM_ABA_P Parameter: Treatment Value: 100uM ABA vs. No Treatment
  misc_feature: MA Experiment ID: 108522 Result: Up-regulated in Transcription
  misc_feature: MA Experiment 108522 PARAMETER Experiment Name: Zm_42deg_Heat_P Parameter: Age (day) Value: 8
  misc_feature: MA Experiment 108522 PARAMETER Experiment Name: Zm_42deg_Heat_P Parameter: Organism Value: Zea mays
  misc_feature: MA Experiment 108522 PARAMETER Experiment Name: Zm_42deg_Heat_P Parameter: Plant Line Value: 35A19
  misc_feature: MA Experiment 108522 PARAMETER Experiment Name: Zm_42deg_Heat_P Parameter: Temperature (deg C) Value: 42 vs. 22
  misc_feature: MA Experiment 108522 PARAMETER Experiment Name: Zm_42deg_Heat_P Parameter: Timepoint (hr) Value: 1
  misc_feature: MA Experiment 108522 PARAMETER Experiment Name: Zm_42deg_Heat_P Parameter: Tissue Value: Aerial
  misc_feature: MA Experiment ID: 108523 Result: Up-regulated in Transcription
  misc_feature: MA Experiment 108523 PARAMETER Experiment Name: Zm_42deg_Heat_P Parameter: Age (day) Value: 8
  misc_feature: MA Experiment 108523 PARAMETER Experiment Name: Zm_42deg_Heat_P Parameter: Organism Value: Zea mays
  misc_feature: MA Experiment 108523 PARAMETER Experiment Name: Zm_42deg_Heat_P Parameter: Plant Line Value: 35A19
  misc_feature: MA Experiment 108523 PARAMETER Experiment Name: Zm_42deg_Heat_P Parameter: Temperature (deg C) Value: 42 vs. 22
  misc_feature: MA Experiment 108523 PARAMETER Experiment Name: Zm_42deg_Heat_P Parameter: Timepoint (hr) Value: 6
  misc_feature: MA Experiment 108523 PARAMETER Experiment Name: Zm_42deg_Heat_P Parameter: Tissue Value: Aerial
  misc_feature: MA Experiment ID: 108527 Result: Up-regulated in Transcription
  misc_feature: MA Experiment 108527 PARAMETER Experiment Name: Zm_5mM_NO_P Parameter: Age (day) Value: 8
  misc_feature: MA Experiment 108527 PARAMETER Experiment Name: Zm_5mM_NO_P Parameter: Organism Value: Zea mays
  misc_feature: MA Experiment 108527 PARAMETER Experiment Name: Zm_5mM_NO_P Parameter: Plant Line Value: 35A19
  misc_feature: MA Experiment 108527 PARAMETER Experiment Name: Zm_5mM_NO_P Parameter: Timepoint (hr) Value: 6
  misc_feature: MA Experiment 108527 PARAMETER Experiment Name: Zm_5mM_NO_P Parameter: Tissue Value: Aerial
  misc_feature: MA Experiment 108527 PARAMETER Experiment Name: Zm_5mM_NO_P Parameter: Treatment Value: 5mM NO vs. No Treatment
  misc_feature: MA Experiment ID: 108535 Result: Down-regulated in Transcription
  misc_feature: MA Experiment 108535 PARAMETER Experiment Name: Zm_Meristem_P Parameter: Age (day) Value: 8
  misc_feature: MA Experiment 108535 PARAMETER Experiment Name: Zm_Meristem_P Parameter: Organism Value: Zea mays
  misc_feature: MA Experiment 108535 PARAMETER Experiment Name: Zm_Meristem_P Parameter: Plant Line Value: 35A19
  misc_feature: MA Experiment 108535 PARAMETER Experiment Name: Zm_Meristem_P Parameter: Tissue Value: Root Meristem vs. Above Root Meristem
  misc_feature: MA Experiment ID: 108540 Result: Up-regulated in Transcription
  misc_feature: MA Experiment 108540 PARAMETER Experiment Name: Zm_20percent_PEG_P Parameter: Age (day) Value: 8
  misc_feature: MA Experiment 108540 PARAMETER Experiment Name: Zm_20percent_PEG_P Parameter: Organism Value: Zea mays
  misc_feature: MA Experiment 108540 PARAMETER Experiment Name: Zm_20percent_PEG_P Parameter: Plant Line Value: 35A19
  misc_feature: MA Experiment 108540 PARAMETER Experiment Name: Zm_20percent_PEG_P Parameter: Timepoint (hr) Value: 6
  misc_feature: MA Experiment 108540 PARAMETER Experiment Name: Zm_20percent_PEG_P Parameter: Tissue Value: Aerial
  misc_feature: MA Experiment 108540 PARAMETER Experiment Name: Zm_20percent_PEG_P Parameter: Treatment Value: 20percent PEG vs. No Treatment
  misc_feature: MA Experiment ID: 108542 Result: Up-regulated in Transcription
  misc_feature: MA Experiment 108542 PARAMETER Experiment Name: Zm_150mM_NaCl_P Parameter: Age (day) Value: 8
  misc_feature: MA Experiment 108542 PARAMETER Experiment Name: Zm_150mM_NaCl_P Parameter: Organism Value: Zea mays
  misc_feature: MA Experiment 108542 PARAMETER Experiment Name: Zm_150mM_NaCl_P Parameter: Plant Line Value: 35A19
  misc_feature: MA Experiment 108542 PARAMETER Experiment Name: Zm_150mM_NaCl_P Parameter: Timepoint (hr) Value: 6
  misc_feature: MA Experiment 108542 PARAMETER Experiment Name: Zm_150mM_NaCl_P Parameter: Tissue Value: Aerial
  misc_feature: MA Experiment 108542 PARAMETER Experiment Name: Zm_150mM_NaCl_P Parameter: Treatment Value: 150mM NaCl vs. No Treatment
  misc_feature: MA Experiment ID: 108543 Result: Up-regulated in Transcription
  misc_feature: MA Experiment ID: 108544 Result: Up-regulated in Transcription
  misc_feature: MA Experiment ID: 108545 Result: Down-regulated in Transcription
  misc_feature: MA Experiment 108545 PARAMETER Experiment Name: Zm_Imbibed_Seeds_P Parameter: Age (day) Value: 3 vs. 2
  misc_feature: MA Experiment 108545 PARAMETER Experiment Name: Zm_Imbibed_Seeds_P Parameter: Organism Value: Zea mays
  misc_feature: MA Experiment 108545 PARAMETER Experiment Name: Zm_Imbibed_Seeds_P Parameter: Plant Line Value: 35A19
  misc_feature: MA Experiment 108545 PARAMETER Experiment Name: Zm_Imbibed_Seeds_P Parameter: Tissue Value: Aerial vs. Embryo
  misc_feature: MA Experiment ID: 108556 Result: Up-regulated in Transcription
  misc_feature: MA Experiment 108556 PARAMETER Experiment Name: Zm_Drought_P Parameter: Age (day) Value: 9
  misc_feature: MA Experiment 108556 PARAMETER Experiment Name: Zm_Drought_P Parameter: Organism Value: Zea mays
  misc_feature: MA Experiment 108556 PARAMETER Experiment Name: Zm_Drought_P Parameter: Plant Line Value: 35A19
  misc_feature: MA Experiment 108556 PARAMETER Experiment Name: Zm_Drought_P Parameter: Timepoint (hr) Value: 24
  misc_feature: MA Experiment 108556 PARAMETER Experiment Name: Zm_Drought_P Parameter: Tissue Value: Aerial
  misc_feature: MA Experiment 108556 PARAMETER Experiment Name: Zm_Drought_P Parameter: Treatment Value: Drought vs. No Drought
  misc_feature: MA Experiment ID: 108559 Result: Up-regulated in Transcription
  misc_feature: MA Experiment 108559 PARAMETER Experiment Name: Zm_5mM_NO_P Parameter: Age (day) Value: 8
  misc_feature: MA Experiment 108559 PARAMETER Experiment Name: Zm_5mM_NO_P Parameter: Organism Value: Zea mays
  misc_feature: MA Experiment 108559 PARAMETER Experiment Name: Zm_5mM_NO_P Parameter: Plant Line Value: 35A19
  misc_feature: MA Experiment 108559 PARAMETER Experiment Name: Zm_5mM_NO_P Parameter: Timepoint (hr) Value: 12
  misc_feature: MA Experiment 108559 PARAMETER Experiment Name: Zm_5mM_NO_P Parameter: Tissue Value: Aerial
  misc_feature: MA Experiment 108559 PARAMETER Experiment Name: Zm_5mM_NO_P Parameter: Treatment Value: 5mM NO vs. No Treatment
  misc_feature: MA Experiment ID: 108597 Result: Up-regulated in Transcription
  misc_feature: MA Experiment 108597 PARAMETER Experiment Name: Zm_100uM_ABA_P Parameter: Age (day) Value: 9
  misc_feature: MA Experiment 108597 PARAMETER Experiment Name: Zm_100uM_ABA_P Parameter: Organism Value: Zea mays
  misc_feature: MA Experiment 108597 PARAMETER Experiment Name: Zm_100uM_ABA_P Parameter: Plant Line Value: 35A19
  misc_feature: MA Experiment 108597 PARAMETER Experiment Name: Zm_100uM_ABA_P Parameter: Timepoint (hr) Value: 24
  misc_feature: MA Experiment 108597 PARAMETER Experiment Name: Zm_100uM_ABA_P Parameter: Tissue Value: Aerial
  misc_feature: MA Experiment 108597 PARAMETER Experiment Name: Zm_100uM_ABA_P Parameter: Treatment Value: 100uM ABA vs. No Treatment
  misc_feature: MA Experiment ID: 108687 Result: Up-regulated in Transcription
  misc_feature: MA Experiment 108687 PARAMETER Experiment Name: Zm_Embryos-Flowers__P Parameter: Tissue Value: Embryo vs. Aerial+
  misc_feature: MA Experiment ID: 20000478 Result: Up-regulated in Transcription
  misc_feature: MA Experiment 20000478 PARAMETER Experiment Name: Zm_5mM_SA_P Parameter: Age (day) Value: 11
  misc_feature: MA Experiment 20000478 PARAMETER Experiment Name: Zm_5mM_SA_P Parameter: Organism Value: Zea mays
  misc_feature: MA Experiment 20000478 PARAMETER Experiment Name: Zm_5mM_SA_P Parameter: Plant Line Value: 35A19
  misc_feature: MA Experiment 20000478 PARAMETER Experiment Name: Zm_5mM_SA_P Parameter: Timepoint (hr) Value: 72
  misc_feature: MA Experiment 20000478 PARAMETER Experiment Name: Zm_5mM_SA_P Parameter: Tissue Value: Aerial
  misc_feature: MA Experiment 20000478 PARAMETER Experiment Name: Zm_5mM_SA_P Parameter: Treatment Value: 5mM SA vs. No Treatment
  misc_feature: MA Experiment ID: 20000488 Result: Down-regulated in Transcription
  misc_feature: MA Experiment 20000488 PARAMETER Experiment Name: Zm_50mM_NH4NO3_L_to_H_P Parameter: Organism Value: Zea mays
  misc_feature: MA Experiment 20000488 PARAMETER Experiment Name: Zm_50mM_NH4NO3_L_to_H_P Parameter: Timepoint (hr) Value: 8
  misc_feature: MA Experiment 20000488 PARAMETER Experiment Name: Zm_50mM_NH4NO3_L_to_H_P Parameter: Tissue Value: Leaves
  misc_feature: MA Experiment 20000488 PARAMETER Experiment Name: Zm_50mM_NH4NO3_L_to_H_P Parameter: Treatment Value: 50mM NH4NO3 vs. 100mM Mannitol
  misc_feature: MA Experiment ID: 20000535 Result: Up-regulated in Transcription
  misc_feature: MA Experiment 20000535 PARAMETER Experiment Name: Zm_Hybrid_Seed_Dev_P Parameter: DAP Value: 30 vs. 12
  misc_feature: MA Experiment 20000535 PARAMETER Experiment Name: Zm_Hybrid_Seed_Dev_P Parameter: Organism Value: Zea mays
  misc_feature: MA Experiment 20000535 PARAMETER Experiment Name: Zm_Hybrid_Seed_Dev_P Parameter: Plant Line Value: 35A19
  misc_feature: MA Experiment 20000535 PARAMETER Experiment Name: Zm_Hybrid_Seed_Dev_P Parameter: Tissue Value: Embryo vs. Unfert Floret
  misc_feature: MA Experiment ID: 20000626 Result: Up-regulated in Transcription
  misc_feature: MA Experiment 20000626 PARAMETER Experiment Name: Zm_Herbicide-Treatments_P Parameter: Timepoint (hr) Value: 12
  misc_feature: MA Experiment 20000626 PARAMETER Experiment Name: Zm_Herbicide-Treatments_P Parameter: Tissue Value: Aerial
  misc_feature: MA Experiment 20000626 PARAMETER Experiment Name: Zm_Herbicide-Treatments_P Parameter: Treatment Value: Roundup vs. No Treatment
atccatccaactcttcataacaggcgacctgagagcagagcagacagagagcgttctggcagccgttgcggagcttgaacctctgcaaccaccaacagctaaactaaaagcagcggcggacggcgcgcggtactggacgaccggccgacgatggctacgccggcgcagcagcagggtgaccagcaccagccgaggctgcagaaggtgatggtggctgtagacgagagcgagtgcagccggcacgcgctggagtgggcgctgcggaacctggcgcccacgctggccccaccgctactggtgctcaccgtgcagccgcacttcccgctcggatacgtctccgccgcgtccttcggcgcacccctgggcaccgtccctccggtggctccggagctcatcaggtcgatgcaggagcagcagagggagctcacgcaggagctcctcgacaaggccagggccatctgcgccgagcacggggttgctgtagaggcaattgtcgaggtcggagatgcaaaggaggtgatatgtgaagtggctgagaagaaaaatgtcgatctgctggttcttggaagccacagtcgtgggccaatacagaggttgttccttgggagcgtcagtaactactgtgtacatcattctaagtgtccagttcttgtggtgaagaaccaaggctgatgaaggattcaactcccagctgctagtcctaatcatgttcgggtatttgtcaacgtatttgtaatgtgtagtacttgctttagccaaacgcattggccaataaagtagcttgctttgcttcttggaagggccgaggctggactggaggagagttctttttctttttcttttttctggtcagtgtgcctttgctccggaatggcagagttgtaaataagaactacgaactttgtgcgc

SEQ ID NO: 10847 - protein, 173 aa, Zea mays subsp. mays
  peptide (1)..(173): Ceres Seq. ID no. 13499034
  misc_feature (15)..(170): Pfam Name: Universal stress protein family Pfam Description: Universal stress protein family
  misc_feature (14)..(172): Homolog of NCBI NO: 34914610 NR Description: P0520B06.18 [Oryza sativa (japonica
  misc_feature (10)..(172): Homolog of NCBI NO: 18408994 NR Description: expressed protein [Arabidopsis thaliana]
  misc_feature (15)..(170): Homolog of NCBI NO: 5669654 NR Description: ER6 protein [Lycopersicon esculentum]
  misc_feature (16)..(170): Homolog of NCBI NO: 30681321 NR Description: ER6 protein -related [Arabidopsis thaliana]
  misc_feature (17)..(170): Homolog of NCBI NO: 18399413 NR Description: ethylene-responsive protein -related [Arabidopsis
  misc_feature (17)..(170): Homolog of NCBI NO: 30681955 NR Description: ethylene-responsive protein -related [Arabidopsis >gi|6671949|gb|AAF23209.1|AC016795_22 unknown protein thaliana] >gi|10998131|dbj|BAB03102.1| gene_id:MEC18.3~unknown
  misc_feature (2)..(170): Homolog of NCBI NO: 40539010 NR Description: putative stress-related protein [Oryza sativa
  misc_feature (16)..(170): Homolog of NCBI NO: 25402571 NR Description: hypothetical protein [imported] - Arabidopsis >gi|2160182|gb|AAB60745.1| ESTs
  misc_feature (1)..(170): Homolog of NCBI NO: 30694811 NR Description: expressed protein [Arabidopsis thaliana] unknown protein [Arabidopsis thaliana]
  misc_feature (17)..(160): Homolog of NCBI NO: 30681959 NR Description: ethylene-responsive protein -related [Arabidopsis
MATPAQQQGDQHQPRLQKVMVAVDESECSRHALEWALRNLAPTLAPPLLVLTVQPHFPLGYVSAASFGAPLGTVPPVAPELIRSMQEQQRELTQELLDKARAICAEHGVAVEAIVEVGDAKEVICEVAEKKNVDLLVLGSHSRGPIQRLFLGSVSNYCVHHSKCPVLVVKNQG

SEQ ID NO: 10848 - protein, 154 aa, Zea mays subsp. mays
  peptide (1)..(154): Ceres Seq. ID no. 13499035
  misc_feature (1)..(151): Pfam Name: Universal stress protein family Pfam Description: Universal stress protein family
  misc_feature (1)..(153): Homolog of NCBI NO: 34914610 NR Description: P0520B06.18 [Oryza sativa (japonica
  misc_feature (1)..(153): Homolog of NCBI NO: 18408994 NR Description: expressed protein [Arabidopsis thaliana]
  misc_feature (1)..(151): Homolog of NCBI NO: 5669654 NR Description: ER6 protein [Lycopersicon esculentum]
  misc_feature (1)..(151): Homolog of NCBI NO: 30681321 NR Description: ER6 protein -related [Arabidopsis thaliana]
  misc_feature (1)..(151): Homolog of NCBI NO: 18399413 NR Description: ethylene-responsive protein -related [Arabidopsis
  misc_feature (1)..(151): Homolog of NCBI NO: 30681955 NR Description: ethylene-responsive protein -related [Arabidopsis >gi|6671949|gb|AAF23209.1|AC016795_22 unknown protein thaliana] >gi|10998131|dbj|BAB03102.1| gene_id:MEC18.3~unknown
  misc_feature (1)..(151): Homolog of NCBI NO: 40539010 NR Description: putative stress-related protein [Oryza sativa
  misc_feature (1)..(151): Homolog of NCBI NO: 25402571 NR Description: hypothetical protein [imported] - Arabidopsis >gi|2160182|gb|AAB60745.1| ESTs
  misc_feature (1)..(151): Homolog of NCBI NO: 30694811 NR Description: expressed protein [Arabidopsis thaliana] unknown protein [Arabidopsis thaliana]
  misc_feature (1)..(141): Homolog of NCBI NO: 30681959 NR Description: ethylene-responsive protein -related [Arabidopsis
MVAVDESECSRHALEWALRNLAPTLAPPLLVLTVQPHFPLGYVSAASFGAPLGTVPPVAPELIRSMQEQQRELTQELLDKARAICAEHGVAVEAIVEVGDAKEVICEVAEKKNVDLLVLGSHSRGPIQRLFLGSVSNYCVHHSKCPVLVVKNQG

SEQ ID NO: 10849 - protein, 89 aa, Zea mays subsp. mays
  peptide (1)..(89): Ceres Seq. ID no. 13499036
  misc_feature (1)..(86): Pfam Name: Universal stress protein family Pfam Description: Universal stress protein family
  misc_feature (1)..(88): Homolog of NCBI NO: 34914610 NR Description: P0520B06.18 [Oryza sativa (japonica
  misc_feature (1)..(88): Homolog of NCBI NO: 18408994 NR Description: expressed protein [Arabidopsis thaliana]
  misc_feature (1)..(86): Homolog of NCBI NO: 5669654 NR Description: ER6 protein [Lycopersicon esculentum]
  misc_feature (1)..(86): Homolog of NCBI NO: 30681321 NR Description: ER6 protein -related [Arabidopsis thaliana]
  misc_feature (1)..(86): Homolog of NCBI NO: 18399413 NR Description: ethylene-responsive protein -related [Arabidopsis
  misc_feature (1)..(86): Homolog of NCBI NO: 30681955 NR Description: ethylene-responsive protein -related [Arabidopsis >gi|6671949|gb|AAF23209.1|AC016795_22 unknown protein thaliana] >gi|10998131|dbj|BAB03102.1| gene_id:MEC18.3~unknown
  misc_feature (1)..(86): Homolog of NCBI NO: 40539010 NR Description: putative stress-related protein [Oryza sativa
  misc_feature (1)..(86): Homolog of NCBI NO: 25402571 NR Description: hypothetical protein [imported] - Arabidopsis >gi|2160182|gb|AAB60745.1| ESTs
  misc_feature (1)..(86): Homolog of NCBI NO: 30694811 NR Description: expressed protein [Arabidopsis thaliana] unknown protein [Arabidopsis thaliana]
  misc_feature (1)..(76): Homolog of NCBI NO: 30681959 NR Description: ethylene-responsive protein -related [Arabidopsis
MQEQQRELTQELLDKARAICAEHGVAVEAIVEVGDAKEVICEVAEKKNVDLLVLGSHSRGPIQRLFLGSVSNYCVHHSKCPVLVVKNQG

SEQ ID NO: 10850 - DNA, 1238 bp, Zea mays subsp. mays
  misc_feature (1)..(1238): Ceres Seq. ID no. 12406405
  misc_feature: MA Experiment ID: 108528 Result: Down-regulated in Transcription
  misc_feature: MA Experiment 108528 PARAMETER Experiment Name: Zm_Imbibed_Seeds_P Parameter: Age (day) Value: 5 vs. 2
  misc_feature: MA Experiment 108528 PARAMETER Experiment Name: Zm_Imbibed_Seeds_P Parameter: Organism Value: Zea mays
  misc_feature: MA Experiment 108528 PARAMETER Experiment Name: Zm_Imbibed_Seeds_P Parameter: Plant Line Value: 35A19
  misc_feature: MA Experiment 108528 PARAMETER Experiment Name: Zm_Imbibed_Seeds_P Parameter: Tissue Value: Aerial vs. Embryo
  misc_feature: MA Experiment ID: 108530 Result: Down-regulated in Transcription
  misc_feature: MA Experiment 108530 PARAMETER Experiment Name: Zm_Imbibed_Seeds_P Parameter: Age (day) Value: 6 vs. 2
  misc_feature: MA Experiment 108530 PARAMETER Experiment Name: Zm_Imbibed_Seeds_P Parameter: Organism Value: Zea mays
  misc_feature: MA Experiment 108530 PARAMETER Experiment Name: Zm_Imbibed_Seeds_P Parameter: Plant Line Value: 35A19
  misc_feature: MA Experiment 108530 PARAMETER Experiment Name: Zm_Imbibed_Seeds_P Parameter: Tissue Value: Aerial vs. Embryo
  misc_feature: MA Experiment ID: 108535 Result: Up-regulated in Transcription
  misc_feature: MA Experiment 108535 PARAMETER Experiment Name: Zm_Meristem_P Parameter: Age (day) Value: 8
  misc_feature: MA Experiment 108535 PARAMETER Experiment Name: Zm_Meristem_P Parameter: Organism Value: Zea mays
  misc_feature: MA Experiment 108535 PARAMETER Experiment Name: Zm_Meristem_P Parameter: Plant Line Value: 35A19
  misc_feature: MA Experiment 108535 PARAMETER Experiment Name: Zm_Meristem_P Parameter: Tissue Value: Root Meristem vs. Above Root Meristem
  misc_feature: MA Experiment ID: 108544 Result: Down-regulated in Transcription
  misc_feature: MA Experiment ID: 108545 Result: Down-regulated in Transcription
  misc_feature: MA Experiment 108545 PARAMETER Experiment Name: Zm_Imbibed_Seeds_P Parameter: Age (day) Value: 3 vs. 2
  misc_feature: MA Experiment 108545 PARAMETER Experiment Name: Zm_Imbibed_Seeds_P Parameter: Organism Value: Zea mays
  misc_feature: MA Experiment 108545 PARAMETER Experiment Name: Zm_Imbibed_Seeds_P Parameter: Plant Line Value: 35A19
  misc_feature: MA Experiment 108545 PARAMETER Experiment Name: Zm_Imbibed_Seeds_P Parameter: Tissue Value: Aerial vs. Embryo
  misc_feature: MA Experiment ID: 108547 Result: Down-regulated in Transcription
  misc_feature: MA Experiment 108547 PARAMETER Experiment Name: Zm_Imbibed_Seeds_P Parameter: Age (day) Value: 4 vs. 2
  misc_feature: MA Experiment 108547 PARAMETER Experiment Name: Zm_Imbibed_Seeds_P Parameter: Organism Value: Zea mays
  misc_feature: MA Experiment 108547 PARAMETER Experiment Name: Zm_Imbibed_Seeds_P Parameter: Plant Line Value: 35A19
  misc_feature: MA Experiment 108547 PARAMETER Experiment Name: Zm_Imbibed_Seeds_P Parameter: Tissue Value: Aerial vs. Embryo
gcacgagaccattacctagaacatcctaatcgaaaaatcatcatcgactccacctggaactcgctcactggcaatggctaccaataccaagctcgtggcccttggcttggccgtcctcgtgagcgttgggttctccgatgcagcgagggtagttaggcttgggagctatgcgtctgccggaggaggcggcggcggtggaggcggcggctccggatcgaccggggctgctgggtacggcggtgggtctggcggtggcggtggctacggcataggcaagggtggcggggactggtggaacaatttcgtctccagcgtagcgggcggtggtggtgggggacagggcggagggggtggcaccaacggtggatccgggtccggcggtgggtcgggctatggttctggcaccagttccaccgcagcctctggccccagcagtggcaactacgccaacgctgagggcaagggcgccggtgggggcatgggcggcggtgccgatggcgcctacggttctggtgccggtggaggcgttggcaagggccagggcgagagtggcgtcgcattggcaccgtcgtccgatggctactacaatggcggcgccgctgatgctaccggtggtggttccggcgctggcggtggacatggcggtggcgccggagctccaagctacgggactggaggtggccttggcggaggcaagggcgaggccggcagcgacggtcctggggttcaggttacgcggcgggaatcggtgctggcactggcggcggcggtggcggcggattccaaggcgcctctggtggtggcggtggctctgggtccggatccggcagcggtggaatccactgagtttccctgcggcatgcagctggacggagcgctcggcgtgtagtgtcagtccattttggagtcggttcgtgtacctgagttttccttgaggagatgctgggtttcgcattctttgttgcaagaattattagtcaggaataatgggcttcgttcgtgattgtagttcgagtaggtaggtagtccagcatgcaactgacatgtaatggctacaggctactacgagtatatgcttgcatcgccatcttttgatgtgccccttgttgttactctcatcgatctttagaggtcgttgctaccggtttttatcttccaaaacacaaaatatactgggacgactcttgcagtctcttgctactgttgaatgtgactattgactagctatagtagtattt

SEQ ID NO: 10851 - protein, 271 aa, Zea mays subsp. mays
  peptide (1)..(271): Ceres Seq. ID no. 12406406
  misc_feature (1)..(221): Pfam Name: Dehydrin Pfam Description: Dehydrin
  misc_feature (1)..(204): Homolog of NCBI NO: 7442081 NR Description: glycine-rich protein grp3 - maize
  misc_feature (1)..(215): Homolog of NCBI NO: 37534936 NR Description: putative glycine-rich protein [Oryza sativa
  misc_feature (5)..(217): Homolog of NCBI NO: 37534924 NR Description: putative glycine-rich protein [Oryza sativa
  misc_feature (1)..(217): Homolog of NCBI NO: 34898126 NR Description: putative glycine-rich cell wall protein precursor
  misc_feature (5)..(217): Homolog of NCBI NO: 37534920 NR Description: putative glycine-rich protein [Oryza sativa
  misc_feature (30)..(218): Homolog of NCBI NO: 7636182 NR Description: glycine-rich protein [Triticum aestivum]
  misc_feature (16)..(217): Homolog of NCBI NO: 34898126 NR Description: putative glycine-rich cell wall protein precursor
  misc_feature (35)..(211): Homolog of NCBI NO: 7442081 NR Description: glycine-rich protein grp3 - maize
  misc_feature (29)..(217): Homolog of NCBI NO: 322647 NR Description: glycine-rich protein GRP22 - rape
  misc_feature (30)..(217): Homolog of NCBI NO: 121627 NR Description: GLYCINE-RICH CELL WALL STRUCTURAL PROTEIN 1
MATNTKLVALGLAVLVSVGFSDAARVVRLGSYASAGGGGGGGGGGSGSTGAAGYGGGSGGGGGYGIGKGGGDWWNNFVSSVAGGGGGGQGGGGGTNGGSGSGGGSGYGSGTSSTAASGPSSGNYANAEGKGAGGGMGGGADGAYGSGAGGGVGKGQGESGVALAPSSDGYYNGGAADATGGGSGAGGGHGGGAGAPSYGTGGGLGGGKGEAGSDGPGVQVTRRESVLALAAAVAADSKAPLVVAVALGPDPAAVESTEFPCGMQLDGALGV

SEQ ID NO: 10852 - protein, 180 aa, Zea mays subsp. mays
  peptide (1)..(180): Ceres Seq. ID no. 12406407
MVLAPVPPQPLAPAVATTPTLRARAPVGAWAAVPMAPTVLVPVEALARARARVASHWHRRPMATTMAAPLMLPVVVPALAVDMAVAPELQATGLEVALAEARARPAATVLGFRLRGGNRCWHWRRRWRRIPRRLWWWRWLWVRIRQRWNPLSFPAACSWTERSACSVSPFWSRFVYLSFP

SEQ ID NO: 10853 - protein, 146 aa, Zea mays subsp. mays
  peptide (1)..(146): Ceres Seq. ID no. 12406408
MAPTVLVPVEALARARARVASHWHRRPMATTMAAPLMLPVVVPALAVDMAVAPELQATGLEVALAEARARPAATVLGFRLRGGNRCWHWRRRWRRIPRRLWWWRWLWVRIRQRWNPLSFPAACSWTERSACSVSPFWSRFVYLSFP

SEQ ID NO: 10854 - DNA, 1376 bp, Zea mays subsp. mays
  misc_feature (1)..(1376): Ceres Seq. ID no. 12355631
  misc_feature: MA Experiment ID: 108536 Result: Up-regulated in Transcription
  misc_feature: MA Experiment 108536 PARAMETER Experiment Name: Zm_Meristem_P Parameter: Age (day) Value: 8
  misc_feature: MA Experiment 108536 PARAMETER Experiment Name: Zm_Meristem_P Parameter: Organism Value: Zea mays
  misc_feature: MA Experiment 108536 PARAMETER Experiment Name: Zm_Meristem_P Parameter: Plant Line Value: 35A19
  misc_feature: MA Experiment 108536 PARAMETER Experiment Name: Zm_Meristem_P Parameter: Tissue Value: Shoot Meristem vs. Above Shoot Meristem
  misc_feature: MA Experiment ID: 108556 Result: Up-regulated in Transcription
  misc_feature: MA Experiment 108556 PARAMETER Experiment Name: Zm_Drought_P Parameter: Age (day) Value: 9
  misc_feature: MA Experiment 108556 PARAMETER Experiment Name: Zm_Drought_P Parameter: Organism Value: Zea mays
  misc_feature: MA Experiment 108556 PARAMETER Experiment Name: Zm_Drought_P Parameter: Plant Line Value: 35A19
  misc_feature: MA Experiment 108556 PARAMETER Experiment Name: Zm_Drought_P Parameter: Timepoint (hr) Value: 24
  misc_feature: MA Experiment 108556 PARAMETER Experiment Name: Zm_Drought_P Parameter: Tissue Value: Aerial
  misc_feature: MA Experiment 108556 PARAMETER Experiment Name: Zm_Drought_P Parameter: Treatment Value: Drought vs. No Drought
  misc_feature: MA Experiment ID: 20000477 Result: Up-regulated in Transcription
  misc_feature: MA Experiment 20000477 PARAMETER Experiment Name: Zm_5mM_SA_P Parameter: Age (day) Value: 10
  misc_feature: MA Experiment 20000477 PARAMETER Experiment Name: Zm_5mM_SA_P Parameter: Organism Value: Zea mays
  misc_feature: MA Experiment 20000477 PARAMETER Experiment Name: Zm_5mM_SA_P Parameter: Plant Line Value: 35A19
  misc_feature: MA Experiment 20000477 PARAMETER Experiment Name: Zm_5mM_SA_P Parameter: Timepoint (hr) Value: 48
  misc_feature: MA Experiment 20000477 PARAMETER Experiment Name: Zm_5mM_SA_P Parameter: Tissue Value: Aerial
  misc_feature: MA Experiment 20000477 PARAMETER Experiment Name: Zm_5mM_SA_P Parameter: Treatment Value: 5mM SA vs. No Treatment
  misc_feature: MA Experiment ID: 20000479 Result: Up-regulated in Transcription
  misc_feature: MA Experiment 20000479 PARAMETER Experiment Name: Zm_Drought_P Parameter: Age (day) Value: 10
  misc_feature: MA Experiment 20000479 PARAMETER Experiment Name: Zm_Drought_P Parameter: Organism Value: Zea mays
  misc_feature: MA Experiment 20000479 PARAMETER Experiment Name: Zm_Drought_P Parameter: Plant Line Value: 35A19
  misc_feature: MA Experiment 20000479 PARAMETER Experiment Name: Zm_Drought_P Parameter: Timepoint (hr) Value: 48
  misc_feature: MA Experiment 20000479 PARAMETER Experiment Name: Zm_Drought_P Parameter: Tissue Value: Aerial
  misc_feature: MA Experiment 20000479 PARAMETER Experiment Name: Zm_Drought_P Parameter: Treatment Value: Drought vs. No Drought
  misc_feature: MA Experiment ID: 20000480 Result: Up-regulated in Transcription
  misc_feature: MA Experiment 20000480 PARAMETER Experiment Name: Zm_Drought_P Parameter: Age (day) Value: 11
  misc_feature: MA Experiment 20000480 PARAMETER Experiment Name: Zm_Drought_P Parameter: Organism Value: Zea mays
  misc_feature: MA Experiment 20000480 PARAMETER Experiment Name: Zm_Drought_P Parameter: Plant Line Value: 35A19
  misc_feature: MA Experiment 20000480 PARAMETER Experiment Name: Zm_Drought_P Parameter: Timepoint (hr) Value: 72
  misc_feature: MA Experiment 20000480 PARAMETER Experiment Name: Zm_Drought_P Parameter: Tissue Value: Aerial
  misc_feature: MA Experiment 20000480 PARAMETER Experiment Name: Zm_Drought_P Parameter: Treatment Value: Drought vs. No Drought
  misc_feature: MA Experiment ID: 20000488 Result: Down-regulated in Transcription
  misc_feature: MA Experiment 20000488 PARAMETER Experiment Name: Zm_50mM_NH4NO3_L_to_H_P Parameter: Organism Value: Zea mays
  misc_feature: MA Experiment 20000488 PARAMETER Experiment Name: Zm_50mM_NH4NO3_L_to_H_P Parameter: Timepoint (hr) Value: 8
  misc_feature: MA Experiment 20000488 PARAMETER Experiment Name: Zm_50mM_NH4NO3_L_to_H_P Parameter: Tissue Value: Leaves
  misc_feature: MA Experiment 20000488 PARAMETER Experiment Name: Zm_50mM_NH4NO3_L_to_H_P Parameter: Treatment Value: 50mM NH4NO3 vs. 100mM Mannitol
  misc_feature: MA Experiment ID: 20000627 Result: Up-regulated in Transcription
  misc_feature: MA Experiment 20000627 PARAMETER Experiment Name: Zm_Herbicide-Treatments_P Parameter: Timepoint (hr) Value: 12
  misc_feature: MA Experiment 20000627 PARAMETER Experiment Name: Zm_Herbicide-Treatments_P Parameter: Tissue Value: Aerial
  misc_feature: MA Experiment 20000627 PARAMETER Experiment Name: Zm_Herbicide-Treatments_P Parameter: Treatment Value: Finale vs. No Treatment
aagggcggcggttacttgtcccgctccaactacaaagcccagactgcccagtccgcatccccagcagccgtgacaccgcgccacagcagcctcggcgctgcgtttctgccttcccggtgagacaaatggccgccagcgccaccgacgccgacgccggcgccgggctcagatcggagttcctgcaggtcctgctcagccgccgccgcgatctccaagtgcctctctcggtggagcaagggagtccggtgaaggacccgatgtaccagaatcctccgtccaccatggaggcaaatccgatggagtcgtgccccagtaaagatgtggagaacttgagggagaagctggttgaagaaaatttctacctaatcactgagctaggtgaacaaggacgagtacctgtacttctgctgaagcttgacgaccccgttcctagaagaaaaccagctatcgtgttcctgcacagctcttacaagtgcaaagagtggctgcgcccactgcttgaggcatatgcttccaagggctacgtctgtgtggctattgactcgcgctatcacggcgaaagggccagcaatgaaaccacttacatagaggcactgaaatcggcttggcggaatggggatacaatgcctttcatttttgacacggtgtgggacttggtaaagcttggagactacctcggcgagagggaggacgtggatccctctagggttgggatcacaggcgaatcgctgggagggatgcacgcgtggtttgctgcttttgtggacacacggtacagtgtcgtcgttcctatcatcggtgttcagggattcaggtgggccattgacaacaacaagtggctggctagggtgaatagcataaggcctttatttgaagaagcaggaattgacttaggaaagagcgaattagatacagaagttgttgaaaaggtttgggaaaagatagcaccaggtctggactcgcaatttgatgccccctattcacttcctttgcttgcaccacggccgctgctacttctaaatggcgctgaagatcctcattgcccaataagtggtttaggagaagctatttcaaaaactgctaaagcttacgaagaatctggttgcgcggagaagttcatgttcattgcagagcctggagtcggccataaaatcacaatcgacatggtgaaggcagcaagcgaatggttcgatcgcttcctgcatgcatgaatgcaaaagttattgtcgcccatcatttgttctatatcgattgtgatttgtcaacagcatccagtatgtatgtcctcgtctatgtaccttagtaattgcgggtcggacaaatatctgtatctatatctttagtatattaaagcactagttttgacggtcgtccgc

SEQ ID NO: 10855 - protein, 402 aa, Zea mays subsp. mays
  peptide (1)..(402): Ceres Seq. ID no. 12355632
  misc_feature (195)..(400): Homolog of NCBI NO: 34898368 NR Description: ESTs C19441(E10423),C99201(E10423) correspond to
  misc_feature (41)..(171): Homolog of NCBI NO: 34898368 NR Description: ESTs C19441(E10423),C99201(E10423) correspond to
  misc_feature (56)..(400): Homolog of NCBI NO: 30689997 NR Description: expressed protein [Arabidopsis thaliana] putative protein [Arabidopsis thaliana]
  misc_feature (127)..(246): Homolog of NCBI NO: 23098650 NR Description: hypothetical protein [Oceanobacillus iheyensis >gi|22776877|dbj|BAC13151.1| hypothetical conserved protein
  misc_feature (331)..(400): Homolog of NCBI NO: 23098650 NR Description: hypothetical protein [Oceanobacillus iheyensis >gi|22776877|dbj|BAC13151.1| hypothetical conserved protein
GRRLLVPLQLQSPDCPVRIPSSRDTAPQQPRRCVSAFPVRQMAASATDADAGAGLRSEFLQVLLSRRRDLQVPLSVEQGSPVKDPMYQNPPSTMEANPMESCPSKDVENLREKLVEENFYLITELGEQGRVPVLLLKLDDPVPRRKPAIVFLHSSYKCKEWLRPLLEAYASKGYVCVAIDSRYHGERASNETTYIEALKSAWRNGDTMPFIFDTVWDLVKLGDYLGEREDVDPSRVGITGESLGGMHAWFAAFVDTRYSVVVPIIGVQGFRWAIDNNKWLARVNSIRPLFEEAGIDLGKSELDTEVVEKVWEKIAPGLDSQFDAPYSLPLLAPRPLLLLNGAEDPHCPISGLGEAISKTAKAYEESGCAEKFMFIAEPGVGHKITIDMVKAASEWFDRFLHA

SEQ ID NO: 10856 - protein, 361 aa, Zea mays subsp. mays
  peptide (1)..(361): Ceres Seq. ID no. 12355633
  misc_feature (154)..(359): Homolog of NCBI NO: 34898368 NR Description: ESTs C19441(E10423),C99201(E10423) correspond to
  misc_feature (1)..(130): Homolog of NCBI NO: 34898368 NR Description: ESTs C19441(E10423),C99201(E10423) correspond to
  misc_feature (15)..(359): Homolog of NCBI NO: 30689997 NR Description: expressed protein [Arabidopsis thaliana] putative protein [Arabidopsis thaliana]
  misc_feature (86)..(205): Homolog of NCBI NO: 23098650 NR Description: hypothetical protein [Oceanobacillus iheyensis >gi|22776877|dbj|BAC13151.1| hypothetical conserved protein
  misc_feature (290)..(359): Homolog of NCBI NO: 23098650 NR Description: hypothetical protein [Oceanobacillus iheyensis >gi|22776877|dbj|BAC13151.1| hypothetical conserved protein
MAASATDADAGAGLRSEFLQVLLSRRRDLQVPLSVEQGSPVKDPMYQNPPSTMEANPMESCPSKDVENLREKLVEENFYLITELGEQGRVPVLLLKLDDPVPRRKPAIVFLHSSYKCKEWLRPLLEAYASKGYVCVAIDSRYHGERASNETTYIEALKSAWRNGDTMPFIFDTVWDLVKLGDYLGEREDVDPSRVGITGESLGGMHAWFAAFVDTRYSVVVPIIGVQGFRWAIDNNKWLARVNSIRPLFEEAGIDLGKSELDTEVVEKVWEKIAPGLDSQFDAPYSLPLLAPRPLLLLNGAEDPHCPISGLGEAISKTAKAYEESGCAEKFMFIAEPGVGHKITIDMVKAASEWFDRFLHA

SEQ ID NO: 10857 - protein, 317 aa, Zea mays subsp. mays
  peptide (1)..(317): Ceres Seq. ID no. 12355634
  misc_feature (110)..(315): Homolog of NCBI NO: 34898368 NR Description: ESTs C19441(E10423),C99201(E10423) correspond to
  misc_feature (1)..(86): Homolog of NCBI NO: 34898368 NR Description: ESTs C19441(E10423),C99201(E10423) correspond to
  misc_feature (1)..(315): Homolog of NCBI NO: 30689997 NR Description: expressed protein [Arabidopsis thaliana] putative protein [Arabidopsis thaliana]
  misc_feature (42)..(161): Homolog of NCBI NO: 23098650 NR Description: hypothetical protein [Oceanobacillus iheyensis >gi|22776877|dbj|BAC13151.1| hypothetical conserved protein
  misc_feature (246)..(315): Homolog of NCBI NO: 23098650 NR Description: hypothetical protein [Oceanobacillus iheyensis >gi|22776877|dbj|BAC13151.1| hypothetical conserved protein
MYQNPPSTMEANPMESCPSKDVENLREKLVEENFYLITELGEQGRVPVLLLKLDDPVPRRKPAIVFLHSSYKCKEWLRPLLEAYASKGYVCVAIDSRYHGERASNETTYIEALKSAWRNGDTMPFIFDTVWDLVKLGDYLGEREDVDPSRVGITGESLGGMHAWFAAFVDTRYSVVVPIIGVQGFRWAIDNNKWLARVNSIRPLFEEAGIDLGKSELDTEVVEKVWEKIAPGLDSQFDAPYSLPLLAPRPLLLLNGAEDPHCPISGLGEAISKTAKAYEESGCAEKFMFIAEPGVGHKITIDMVKAASEWFDRFLHA

SEQ ID NO: 10858 - DNA, 1413 bp, Zea mays subsp. mays
  misc_feature (1)..(1413): Ceres Seq. ID no. 12345577
  misc_feature: MA Experiment ID: 108527 Result: Up-regulated in Transcription
  misc_feature: MA Experiment 108527 PARAMETER Experiment Name: Zm_5mM_NO_P Parameter: Age (day) Value: 8
  misc_feature: MA Experiment 108527 PARAMETER Experiment Name: Zm_5mM_NO_P Parameter: Organism Value: Zea mays
  misc_feature: MA Experiment 108527 PARAMETER Experiment Name: Zm_5mM_NO_P Parameter: Plant Line Value: 35A19
  misc_feature: MA Experiment 108527 PARAMETER Experiment Name: Zm_5mM_NO_P Parameter: Timepoint (hr) Value: 6
  misc_feature: MA Experiment 108527 PARAMETER Experiment Name: Zm_5mM_NO_P Parameter: Tissue Value: Aerial
  misc_feature: MA Experiment 108527 PARAMETER Experiment Name: Zm_5mM_NO_P Parameter: Treatment Value: 5mM NO vs. No Treatment
gactgcgaacccgatctcgattcgatccccaagccatcccatggcggctgccctctcctcgcggcgtgccctgcacagcctccaccgccgcctcctcttccacccctccccctcacccgccgccgcacgccgcgcgctacccacttccactcgcagccccatccccgcacactcccccaccttctccttctccttctactcctcctcccgcttcttcaccaccgcgcgccccgatgcgaggctgcggcacgggatgctgccgcagcggctgataggcggggtcaggtcggtggcgaacggtgggtcgaaactgggaccgctgggtcagggggtcaaggggctggggcggcccatggaggcggcgaggagccgcggccgcgcggtaccgcgcggccgtcggcctgcaggtcgaggccttctggcggcgcaactccatgatcctcgtcggtgcggggggagtcatcgtctgtttcttgctctggaggatcatgttcggcatcgccagcaccttcgtcggcctctccgagggtatggccaagtacggcttcctcgcccttgccaccgccattgtcgcctttgccggtatgtatgcccgggcaaggttaaccataaaccctgacaaggtttaccggctggctatgacaaaactcaatacatctgctgccatccttgaagttatgggtgcgcccctaactggtactgatgtcagagcatatgttatgtctggaggaggcccgaaactgaaggacttcaaatttaagattggcagtaaacggtgcttcctcattttccccatcaaaggatcagaaagaaggggcctcgtaagtgttgaggccaagaagaaaaatggacagtatgacatgaagctactagctgttgacataccaatggcatcaggtcctgaccagcggctgttcctcgtcggtgatgaacaagagtacaaggtgggcgggggcttgatatctgagctgcgagacccgatcgtaaaagctatggccgcggagaaggagtttgactatctcgacgagagagaggatgaggaggacgagcggagggagcgtgaggaggcggagcaagaggaagcggaagcattgaggcgcgaggaggaaaggctgcgccaggagggtgaagagcgtaggcggcgggaggaggctgagagcctggagaaagctacgtgacatgacttactgtactgactttccaccttgccttgtgcattgtcttctacctctgtctctaccggagtgtagcgatcagcggtttccacagcaggagattgcttccgagttcacttgagtttctggtggtcagttcggcgtcactagtctcaaagttgttgagaagaaaggaataattttgacggttacgcgacaggtcacttcggcgaagcaatgtaatttatagtggttgatc

SEQ ID NO: 10859 - protein, 247 aa, Zea mays subsp. mays
  peptide (1)..(247): Ceres Seq. ID no. 12345578
  misc_feature (196)..(247): Pfam Name: Atrophin-1 family Pfam Description: Atrophin-1 family
  misc_feature (1)..(247): Homolog of NCBI NO: 34896160 NR Description: hypothetical protein~similar to Arabidopsis
  misc_feature (1)..(245): Homolog of NCBI NO: 15228922 NR Description: putative protein; protein id: At3g56430.1
  misc_feature (1)..(231): Homolog of NCBI NO: 15226745 NR Description: unknown protein; protein id: At2g40800.1, by cDNA: gi_17473708, supported by cDNA: gi_20148506 [Arabidopsis >gi|25370574|pir||A84834 hypothetical protein At2g40800
  misc_feature (190)..(245): Homolog of NCBI NO: 3168604 NR Description: proline and glutamic acid rich nuclear protein
  misc_feature (190)..(245): Homolog of NCBI NO: 34783134 NR Description: Unknown (protein for IMAGE:4156419) [Homo sapiens]
  misc_feature (190)..(245): Homolog of NCBI NO: 24415383 NR Description: proline and glutamic acid rich nuclear protein; of nongenomic activity of estrogen receptor [Homo sapiens]
  misc_feature (190)..(245): Homolog of NCBI NO: 21426922 NR Description: PELP1 [Homo sapiens]
  misc_feature (172)..(244): Homolog of NCBI NO: 16741201 NR Description: Unknown (protein for MGC:25365) [Mus musculus]
  misc_feature (190)..(245): Homolog of NCBI NO: 16741201 NR Description: Unknown (protein for MGC:25365) [Mus musculus]
  misc_feature (190)..(244): Homolog of NCBI NO: 16741201 NR Description: Unknown (protein for MGC:25365) [Mus musculus]
MILVGAGGVIVCFLLWRIMFGIASTFVGLSEGMAKYGFLALATAIVAFAGMYARARLTINPDKVYRLAMTKLNTSAAILEVMGAPLTGTDVRAYVMSGGGPKLKDFKFKIGSKRCFLIFPIKGSERRGLVSVEAKKKNGQYDMKLLAVDIPMASGPDQRLFLVGDEQEYKVGGGLISELRDPIVKAMAAEKEFDYLDEREDEEDERREREEAEQEEAEALRREEERLRQEGEERRRREEAESLEKAT

SEQ ID NO: 10860 - protein, 229 aa, Zea mays subsp. mays
  peptide (1)..(229): Ceres Seq. ID no. 12345579
  misc_feature (178)..(229): Pfam Name: Atrophin-1 family Pfam Description: Atrophin-1 family
  misc_feature (1)..(229): Homolog of NCBI NO: 34896160 NR Description: hypothetical protein~similar to Arabidopsis
  misc_feature (1)..(227): Homolog of NCBI NO: 15228922 NR Description: putative protein; protein id: At3g56430.1
  misc_feature (1)..(213): Homolog of NCBI NO: 15226745 NR Description: unknown protein; protein id: At2g40800.1, by cDNA: gi_17473708, supported by cDNA: gi_20148506 [Arabidopsis >gi|25370574|pir||A84834 hypothetical protein At2g40800
  misc_feature (172)..(227): Homolog of NCBI NO: 3168604 NR Description: proline and glutamic acid rich nuclear protein
  misc_feature (172)..(227): Homolog of NCBI NO: 34783134 NR Description: Unknown (protein for IMAGE:4156419) [Homo sapiens]
  misc_feature (172)..(227): Homolog of NCBI NO: 24415383 NR Description: proline and glutamic acid rich nuclear protein; of nongenomic activity of estrogen receptor [Homo sapiens]
  misc_feature (172)..(227): Homolog of NCBI NO: 21426922 NR Description: PELP1 [Homo sapiens]
  misc_feature (154)..(226): Homolog of NCBI NO: 16741201 NR Description: Unknown (protein for MGC:25365) [Mus musculus]
  misc_feature (172)..(227): Homolog of NCBI NO: 16741201 NR Description: Unknown (protein for MGC:25365) [Mus musculus]
  misc_feature (172)..(226): Homolog of NCBI NO: 16741201 NR Description: Unknown (protein for MGC:25365) [Mus musculus]
MFGIASTFVGLSEGMAKYGFLALATAIVAFAGMYARARLTINPDKVYRLAMTKLNTSAAILEVMGAPLTGTDVRAYVMSGGGPKLKDFKFKIGSKRCFLIFPIKGSERRGLVSVEAKKKNGQYDMKLLAVDIPMASGPDQRLFLVGDEQEYKVGGGLISELRDPIVKAMAAEKEFDYLDEREDEEDERREREEAEQEEAEALRREEERLRQEGEERRRREEAESLEKAT

SEQ ID NO: 10861 - protein, 215 aa, Zea mays subsp. mays
  peptide (1)..(215): Ceres Seq. ID no. 12345580
  misc_feature (164)..(215): Pfam Name: Atrophin-1 family Pfam Description: Atrophin-1 family
  misc_feature (158)..(213): Homolog of NCBI NO: 16741201 NR Description: Unknown (protein for MGC:25365) [Mus musculus]
  misc_feature (1)..(215): Homolog of NCBI NO: 34896160 NR Description: hypothetical protein~similar to Arabidopsis
  misc_feature (1)..(199): Homolog of NCBI NO: 15226745 NR Description: unknown protein; protein id: At2g40800.1, by cDNA: gi_17473708, supported by cDNA: gi_20148506 [Arabidopsis >gi|25370574|pir||A84834 hypothetical protein At2g40800
  misc_feature (158)..(213): Homolog of NCBI NO: 34783134 NR Description: Unknown (protein for IMAGE:4156419) [Homo sapiens]
  misc_feature (158)..(213): Homolog of NCBI NO: 21426922 NR Description: PELP1 [Homo sapiens]
  misc_feature (140)..(212): Homolog of NCBI NO: 16741201 NR Description: Unknown (protein for MGC:25365) [Mus musculus]
  misc_feature (158)..(213): Homolog of NCBI NO: 24415383 NR Description: proline and glutamic acid rich nuclear protein; of nongenomic activity of estrogen receptor [Homo sapiens]
  misc_feature (158)..(213): Homolog of NCBI NO: 3168604 NR Description: proline and glutamic acid rich nuclear protein
  misc_feature (1)..(213): Homolog of NCBI NO: 15228922 NR Description: putative protein; protein id: At3g56430.1
  misc_feature (158)..(212): Homolog of NCBI NO: 16741201 NR Description: Unknown (protein for MGC:25365) [Mus musculus]
MAKYGFLALATAIVAFAGMYARARLTINPDKVYRLAMTKLNTSAAILEVMGAPLTGTDVRAYVMSGGGPKLKDFKFKIGSKRCFLIFPIKGSERRGLVSVEAKKKNGQYDMKLLAVDIPMASGPDQRLFLVGDEQEYKVGGGLISELRDPIVKAMAAEKEFDYLDEREDEEDERREREEAEQEEAEALRREEERLRQEGEERRRREEAESLEKAT

SEQ ID NO: 10862 - DNA, 1003 bp, Zea mays subsp. mays
  misc_feature (1)..(1003): Ceres Seq. ID no. 12363103
  misc_feature: MA Experiment ID: 108529 Result: Up-regulated in Transcription
  misc_feature: MA Experiment 108529 PARAMETER Experiment Name: Zm_Imbibed_Seeds_P Parameter: Age (day) Value: 5 vs. 2
  misc_feature: MA Experiment 108529 PARAMETER Experiment Name: Zm_Imbibed_Seeds_P Parameter: Organism Value: Zea mays
  misc_feature: MA Experiment 108529 PARAMETER Experiment Name: Zm_Imbibed_Seeds_P Parameter: Plant Line Value: 35A19
  misc_feature: MA Experiment 108529 PARAMETER Experiment Name: Zm_Imbibed_Seeds_P Parameter: Tissue Value: Roots vs. Embryo
  misc_feature: MA Experiment ID: 108535 Result: Down-regulated in Transcription
  misc_feature: MA Experiment 108535 PARAMETER Experiment Name: Zm_Meristem_P Parameter: Age (day) Value: 8
  misc_feature: MA Experiment 108535 PARAMETER Experiment Name: Zm_Meristem_P Parameter: Organism Value: Zea mays
  misc_feature: MA Experiment 108535 PARAMETER Experiment Name: Zm_Meristem_P Parameter: Plant Line Value: 35A19
  misc_feature: MA Experiment 108535 PARAMETER Experiment Name: Zm_Meristem_P Parameter: Tissue Value: Root Meristem vs. Above Root Meristem
  misc_feature: MA Experiment ID: 108546 Result: Up-regulated in Transcription
  misc_feature: MA Experiment 108546 PARAMETER Experiment Name: Zm_Imbibed_Seeds_P Parameter: Age (day) Value: 3 vs. 2
  misc_feature: MA Experiment 108546 PARAMETER Experiment Name: Zm_Imbibed_Seeds_P Parameter: Organism Value: Zea mays
  misc_feature: MA Experiment 108546 PARAMETER Experiment Name: Zm_Imbibed_Seeds_P Parameter: Plant Line Value: 35A19
  misc_feature: MA Experiment 108546 PARAMETER Experiment Name: Zm_Imbibed_Seeds_P Parameter: Tissue Value: Roots vs. Embryo
  misc_feature: MA Experiment ID: 108687 Result: Down-regulated in Transcription
  misc_feature: MA Experiment 108687 PARAMETER Experiment Name: Zm_Embryos-Flowers__P Parameter: Tissue Value: Embryo vs. Aerial+
  misc_feature: MA Experiment ID: 20000477 Result: Down-regulated in Transcription
  misc_feature: MA Experiment 20000477 PARAMETER Experiment Name: Zm_5mM_SA_P Parameter: Age (day) Value: 10
  misc_feature: MA Experiment 20000477 PARAMETER Experiment Name: Zm_5mM_SA_P Parameter: Organism Value: Zea mays
  misc_feature: MA Experiment 20000477 PARAMETER Experiment Name: Zm_5mM_SA_P Parameter: Plant Line Value: 35A19
  misc_feature: MA Experiment 20000477 PARAMETER Experiment Name: Zm_5mM_SA_P Parameter: Timepoint (hr) Value: 48
  misc_feature: MA Experiment 20000477 PARAMETER Experiment Name: Zm_5mM_SA_P Parameter: Tissue Value: Aerial
  misc_feature: MA Experiment 20000477 PARAMETER Experiment Name: Zm_5mM_SA_P Parameter: Treatment Value: 5mM SA vs. No Treatment
gatggctgcgttcttgggctgggaaccaatggccaaaggcccaaaggccaaagctgaagaatggtgcgcgtgcgtgcaggagctccagtgaagctggagaaccactcgttccggctggccgagtcgatgccccccatggacgccgtcttcctggcgtggaactacatgggcaaccgcgacgtcgagcgcatggtcttccactacctgaccaccactgcgtgggccgccgtggctaaggcggacgtcgtcctctgcaacaccttcgaggacctcgagccggacatcttcggcgcccactccccggcggccgcctccatcctcccgatcggcccgctgcgcacctggcagcgccggacgagcgaggcgccggccgggcacttttggcgcgccgacgacgaggcctgcgcgtccttcctggacgcgcagccccgtgggtccgtgacgtacgtggcgttcgggagcctgacggtcatgagccccgcgcagctccaggagctcgcgctggccctgctggcctccgcccgccccttcctgtgggtgttccggccagggctggcggccgagctcccgcccgcgttcacggatctcctgccacgccatgcgaggggcaaggtggtggagtgggcgccgcaggagaaagtgctcgcgcaccctgctgtcggctgcttcctgacgcattgcgggtggaactcgacgctggagggcgtccgccatggcgtgcctttgctttgctggccctactttagcgaccagttcacgaaccaggcatacatttgtgatatctggaaggtggggttaagggtggtgcccgacggtggtgatggcattgtcgccaaggaaaggatcatggagaggttgacgagcctaatgggtgacagtggtgtgaaggaaagggtgaaaagattgaaggaattggcagagaggagcatggggcctgagggcaaatctttgaagaacatcaacgccttcatggaatccatgacgaagtgattgttattgtgtt

SEQ ID NO: 10863 - protein, 309 aa, Zea mays subsp. mays
  peptide (1)..(309): Ceres Seq. ID no. 12363104
  misc_feature (12)..(306): Pfam Name: UDP-glucoronosyl and UDP-glucosyl transferase Pfam Description: UDP-glucoronosyl and UDP-glucosyl transferase
  misc_feature (26)..(309): Homolog of NCBI NO: 37532704 NR Description: putative glucosyltransferase [Oryza sativa
  misc_feature (12)..(307): Homolog of NCBI NO: 37532896 NR Description: putative glucosyltransferase [Oryza sativa
  misc_feature (23)..(307): Homolog of NCBI NO: 37532892 NR Description: hypothetical protein [Oryza sativa (japonica group)] >gi|22655753|gb|AAN04170.1| Hypothetical protein [Oryza
  misc_feature (16)..(305): Homolog of NCBI NO: 21326125 NR Description: putative glucosyl transferase [Sorghum bicolor]
  misc_feature (7)..(305): Homolog of NCBI NO: 21326124 NR Description: putative glucosyl transferase [Sorghum bicolor]
  misc_feature (23)..(308): Homolog of NCBI NO: 37532898 NR Description: putative glucosyltransferase [Oryza sativa
  misc_feature (16)..(305): Homolog of NCBI NO: 13236658 NR Description: putative glucosyltransferase [Oryza sativa]
  misc_feature (7)..(309): Homolog of NCBI NO: 13236659 NR Description: putative glucosyltransferase [Oryza sativa]
  misc_feature (7)..(309): Homolog of NCBI NO: 13236656 NR Description: putative glucosyltransferase [Oryza sativa]
  misc_feature (14)..(304): Homolog of NCBI NO: 13236653 NR Description: putative glucosyltransferase [Oryza sativa]
MVRVRAGAPVKLENHSFRLAESMPPMDAVFLAWNYMGNRDVERMVFHYLTTTAWAAVAKADVVLCNTFEDLEPDIFGAHSPAAASILPIGPLRTWQRRTSEAPAGHFWRADDEACASFLDAQPRGSVTYVAFGSLTVMSPAQLQELALALLASARPFLWVFRPGLAAELPPAFTDLLPRHARGKVVEWAPQEKVLAHPAVGCFLTHCGWNSTLEGVRHGVPLLCWPYFSDQFTNQAYICDIWKVGLRVVPDGGDGIVAKERIMERLTSLMGDSGVKERVKRLKELAERSMGPEGKSLKNINAFMESMTK

SEQ ID NO: 10864 - protein, 287 aa, Zea mays subsp. mays
  peptide (1)..(287): Ceres Seq. ID no. 12363105
  misc_feature (1)..(284): Pfam Name: UDP-glucoronosyl and UDP-glucosyl transferase Pfam Description: UDP-glucoronosyl and UDP-glucosyl transferase
  misc_feature (4)..(287): Homolog of NCBI NO: 37532704 NR Description: putative glucosyltransferase [Oryza sativa
  misc_feature (1)..(285): Homolog of NCBI NO: 37532896 NR Description: putative glucosyltransferase [Oryza sativa
  misc_feature (1)..(285): Homolog of NCBI NO: 37532892 NR Description: hypothetical protein [Oryza sativa (japonica group)] >gi|22655753|gb|AAN04170.1| Hypothetical protein [Oryza
  misc_feature (1)..(283): Homolog of NCBI NO: 21326125 NR Description: putative glucosyl transferase [Sorghum bicolor]
  misc_feature (1)..(283): Homolog of NCBI NO: 21326124 NR Description: putative glucosyl transferase [Sorghum bicolor]
  misc_feature (1)..(286): Homolog of NCBI NO: 37532898 NR Description: putative glucosyltransferase [Oryza sativa
  misc_feature (1)..(283): Homolog of NCBI NO: 13236658 NR Description: putative glucosyltransferase [Oryza sativa]
  misc_feature (1)..(287): Homolog of NCBI NO: 13236659 NR Description: putative glucosyltransferase [Oryza sativa]
  misc_feature (1)..(287): Homolog of NCBI NO: 13236656 NR Description: putative glucosyltransferase [Oryza sativa]
  misc_feature (1)..(282): Homolog of NCBI NO: 13236653 NR Description: putative glucosyltransferase [Oryza sativa]
MPPMDAVFLAWNYMGNRDVERMVFHYLTTTAWAAVAKADVVLCNTFEDLEPDIFGAHSPAAASILPIGPLRTWQRRTSEAPAGHFWRADDEACASFLDAQPRGSVTYVAFGSLTVMSPAQLQELALALLASARPFLWVFRPGLAAELPPAFTDLLPRHARGKVVEWAPQEKVLAHPAVGCFLTHCGWNSTLEGVRHGVPLLCWPYFSDQFTNQAYICDIWKVGLRVVPDGGDGIVAKERIMERLTSLMGDSGVKERVKRLKELAERSMGPEGKSLKNINAFMESMTK

SEQ ID NO: 10865 - protein, 284 aa, Zea mays subsp. mays
  peptide (1)..(284): Ceres Seq. ID no. 12363106
  misc_feature (1)..(281): Pfam Name: UDP-glucoronosyl and UDP-glucosyl transferase Pfam Description: UDP-glucoronosyl and UDP-glucosyl transferase
  misc_feature (1)..(284): Homolog of NCBI NO: 37532704 NR Description: putative glucosyltransferase [Oryza sativa
  misc_feature (1)..(282): Homolog of NCBI NO: 37532896 NR Description: putative glucosyltransferase [Oryza sativa
  misc_feature (1)..(282): Homolog of NCBI NO: 37532892 NR Description: hypothetical protein [Oryza sativa (japonica group)] >gi|22655753|gb|AAN04170.1| Hypothetical protein [Oryza
  misc_feature (1)..(280): Homolog of NCBI NO: 21326125 NR Description: putative glucosyl transferase [Sorghum bicolor]
  misc_feature (1)..(280): Homolog of NCBI NO: 21326124 NR Description: putative glucosyl transferase [Sorghum bicolor]
  misc_feature (1)..(283): Homolog of NCBI NO: 37532898 NR Description: putative glucosyltransferase [Oryza sativa
  misc_feature (1)..(280): Homolog of NCBI NO: 13236658 NR Description: putative glucosyltransferase [Oryza sativa]
  misc_feature (1)..(284): Homolog of NCBI NO: 13236659 NR Description: putative glucosyltransferase [Oryza sativa]
  misc_feature (1)..(284): Homolog of NCBI NO: 13236656 NR Description: putative glucosyltransferase [Oryza sativa]
  misc_feature (1)..(279): Homolog of NCBI NO: 13236653 NR Description: putative glucosyltransferase [Oryza sativa]
MDAVFLAWNYMGNRDVERMVFHYLTTTAWAAVAKADVVLCNTFEDLEPDIFGAHSPAAASILPIGPLRTWQRRTSEAPAGHFWRADDEACASFLDAQPRGSVTYVAFGSLTVMSPAQLQELALALLASARPFLWVFRPGLAAELPPAFTDLLPRHARGKVVEWAPQEKVLAHPAVGCFLTHCGWNSTLEGVRHGVPLLCWPYFSDQFTNQAYICDIWKVGLRVVPDGGDGIVAKERIMERLTSLMGDSGVKERVKRLKELAERSMGPEGKSLKNINAFMESMTK

SEQ ID NO: 10866 - DNA, 1753 bp, Zea mays subsp. mays
  misc_feature (1)..(1753): Ceres Seq. ID no. 12413795
  misc_feature: MA Experiment ID: 20000534 Result: Down-regulated in Transcription
  misc_feature: MA Experiment 20000534 PARAMETER Experiment Name: Zm_Hybrid_Pollen_P Parameter: Age (day) Value: 8
  misc_feature: MA Experiment 20000534 PARAMETER Experiment Name: Zm_Hybrid_Pollen_P Parameter: Organism Value: Zea mays
  misc_feature: MA Experiment 20000534 PARAMETER Experiment Name: Zm_Hybrid_Pollen_P Parameter: Plant Line Value: 35A19
  misc_feature: MA Experiment 20000534 PARAMETER Experiment Name: Zm_Hybrid_Pollen_P Parameter: Tissue Value: Pollen vs. Aerial
ccccctgccccacactttagcccaaggaggccggcctcgcctcgcctcgcttcatacgcccgcccgcccctgccgatccatccacctaataaagcgcctgtacagatccaacccttaggatccggatcgccttacccccccgcgacgatttgcgcgattcgattcgattatcctccgattttccccggtttttgtaggtttcctctctttttcgatcggtgtgctagggtttggacgcgcggaggcgtcgcattccagggtaatcattggttcgacgggctagggtgctttctcacccggggaacggaagcgaatccagacgatggagaagaagaaggtggcgataccgctggtgtgccacggccactcgcggccggtggtggacctcttctacagccccgtcacacccgatggctacttcctcatcagcgccagcaaggatacaaatccaatgcttcgtaatggtgagactggcgactggattgggacttttcaaggtcataaaggagctgtttggagctgttgccttgacaggaatgctctgagggctgcatctgcttctgctgacttttcagctaaagtatgggatgcacttactggggatgagctacattcatttgaacacaagcatatagttcgggcgtgtgccttctctgaggatacacaccttttactcactggaggcatggaaaagattttgcgtgtgtatgatatgaatcgtcctgatgcagctccaagagagcttgacaaatcacctggttccgttcgaactgctgcttggcttcatagtgaccaaactatattgagttcctgcactgacatgggtggagtaaggctgtgggatgtgagaactggaaaaaatgtccaaactcttgaaaccaaggcttctgtcactagtgcagaagtaagccaggatggcaggttcatcactactgctgatggctcaagtgtaaaattctgggacgcgaatcactttggccttgttaaaagctatgatatgccatgcaatgtggaatcggcttcacttgaacctaagtctgggagtaaatttgtcgctggaggagaagatttatgggttcatgtatttgatttcttcactggtgaagaaatagcttgtaacaaaggacatcatggtccagtccactgtgtccggtttgcaccttgtggtgaatcatacgcatcgggttcagaagatggcaccattcggatctggcagcttagcccggctaatgctgatgacaatgaggtggccaatgcaaatggcaagacaactgctggggtaaacgaagttacaaccaagatcgaaggcttccacattcccaaggaggggcagaccgaggggtaggatctcatgtgttttgtggtgcttgtggttcttattgcgaggagattgccaccagagctgcagtggtcattcagtttccctctgcggagtcatcatgtctgcgatccaagggtatcctggcttcatgagtcatcatccactggggaaaaacaagcaagcaaatggtggtgggtttttggatggggccctcgctttgatagaacatagcaattgtagcgtcaaaaataaacaatagttgggtagtttaggtaccgtgtttgcgttcattaaagtgaagtattctgtatcccctaaaaaaaacacttgaggccttcatcgttggaacaccgaccttcaaagctgtagaccacttcttgatcctgaggtagttctggagcgtcatgcctatcaaatgacagatttctgtcc

SEQ ID NO: 10867 - protein, 340 aa, Zea mays subsp. mays
  peptide (1)..(340): Ceres Seq. ID no. 12413796
  misc_feature (1)..(338): Homolog of NCBI NO: 30695318 NR Description: transducin / WD-40 repeat protein family
  misc_feature (1)..(338): Homolog of NCBI NO: 18400838 NR Description: expressed protein; protein id: At3g15610.1,
  misc_feature (9)..(335): Homolog of NCBI NO: 18394249 NR Description: expressed protein; protein id: At1g15470.1, by cDNA: 113014., supported by cDNA: gi_18389289 [Arabidopsis >gi|5103845|gb|AAD39675.1|AC007591_40 Strong similarity to
  misc_feature (1)..(263): Homolog of NCBI NO: 15219076 NR Description: unknown protein; protein id: At1g52730.1
  misc_feature (9)..(298): Homolog of NCBI NO: 29437263 NR Description: Similar to serine/threonine kinase receptor
  misc_feature (9)..(298): Homolog of NCBI NO: 12667270 NR Description: serine-threonine kinase receptor-associated
  misc_feature (9)..(298): Homolog of NCBI NO: 4519417 NR Description: WD-40 repeat protein [Homo sapiens]
  misc_feature (9)..(298): Homolog of NCBI NO: 12643951 NR Description: UNR-interacting protein (WD-40 repeat protein
  misc_feature (9)..(298): Homolog of NCBI NO: 20149592 NR Description: unr-interacting protein [Homo sapiens]
  misc_feature (9)..(298): Homolog of NCBI NO: 6755682 NR Description: serine/threonine kinase receptor associated
MEKKKVAIPLVCHGHSRPVVDLFYSPVTPDGYFLISASKDTNPMLRNGETGDWIGTFQGHKGAVWSCCLDRNALRAASASADFSAKVWDALTGDELHSFEHKHIVRACAFSEDTHLLLTGGMEKILRVYDMNRPDAAPRELDKSPGSVRTAAWLHSDQTILSSCTDMGGVRLWDVRTGKNVQTLETKASVTSAEVSQDGRFITTADGSSVKFWDANHFGLVKSYDMPCNVESASLEPKSGSKFVAGGEDLWVHVFDFFTGEEIACNKGHHGPVHCVRFAPCGESYASGSEDGTIRIWQLSPANADDNEVANANGKTTAGVNEVTTKIEGFHIPKEGQTEG

SEQ ID NO: 10868 - protein, 297 aa, Zea mays subsp. mays
  peptide (1)..(297): Ceres Seq. ID no. 12413797
  misc_feature (1)..(295): Homolog of NCBI NO: 30695318 NR Description: transducin / WD-40 repeat protein family
  misc_feature (1)..(295): Homolog of NCBI NO: 18400838 NR Description: expressed protein; protein id: At3g15610.1,
  misc_feature (1)..(292): Homolog of NCBI NO: 18394249 NR Description: expressed protein; protein id: At1g15470.1, by cDNA: 113014., supported by cDNA: gi_18389289 [Arabidopsis >gi|5103845|gb|AAD39675.1|AC007591_40 Strong similarity to
  misc_feature (1)..(220): Homolog of NCBI NO: 15219076 NR Description: unknown protein; protein id: At1g52730.1
  misc_feature (1)..(255): Homolog of NCBI NO: 29437263 NR Description: Similar to serine/threonine kinase receptor
  misc_feature (1)..(255): Homolog of NCBI NO: 12667270 NR Description: serine-threonine kinase receptor-associated
  misc_feature (1)..(255): Homolog of NCBI NO: 4519417 NR Description: WD-40 repeat protein [Homo sapiens]
  misc_feature (1)..(255): Homolog of NCBI NO: 12643951 NR Description: UNR-interacting protein (WD-40 repeat protein
  misc_feature (1)..(255): Homolog of NCBI NO: 20149592 NR Description: unr-interacting protein [Homo sapiens]
  misc_feature (1)..(255): Homolog of NCBI NO: 6755682 NR Description: serine/threonine kinase receptor associated
MLRNGETGDWIGTFQGHKGAVWSCCLDRNALRAASASADFSAKVWDALTGDELHSFEHKHIVRACAFSEDTHLLLTGGMEKILRVYDMNRPDAAPRELDKSPGSVRTAAWLHSDQTILSSCTDMGGVRLWDVRTGKNVQTLETKASVTSAEVSQDGRFITTADGSSVKFWDANHFGLVKSYDMPCNVESASLEPKSGSKFVAGGEDLWVHVFDFFTGEEIACNKGHHGPVHCVRFAPCGESYASGSEDGTIRIWQLSPANADDNEVANANGKTTAGVNEVTTKIEGFHIPKEGQTEG

SEQ ID NO: 10869 - protein, 219 aa, Zea mays subsp. mays
  peptide (1)..(219): Ceres Seq. ID no. 12413798
  misc_feature (1)..(217): Homolog of NCBI NO: 30695318 NR Description: transducin / WD-40 repeat protein family
  misc_feature (1)..(217): Homolog of NCBI NO: 18400838 NR Description: expressed protein; protein id: At3g15610.1,
  misc_feature (1)..(214): Homolog of NCBI NO: 18394249 NR Description: expressed protein; protein id: At1g15470.1, by cDNA: 113014., supported by cDNA: gi_18389289 [Arabidopsis >gi|5103845|gb|AAD39675.1|AC007591_40 Strong similarity to
  misc_feature (1)..(142): Homolog of NCBI NO: 15219076 NR Description: unknown protein; protein id: At1g52730.1
  misc_feature (1)..(177): Homolog of NCBI NO: 29437263 NR Description: Similar to serine/threonine kinase receptor
  misc_feature (1)..(177): Homolog of NCBI NO: 12667270 NR Description: serine-threonine kinase receptor-associated
  misc_feature (1)..(177): Homolog of NCBI NO: 4519417 NR Description: WD-40 repeat protein [Homo sapiens]
  misc_feature (1)..(177): Homolog of NCBI NO: 12643951 NR Description: UNR-interacting protein (WD-40 repeat protein
  misc_feature (1)..(177): Homolog of NCBI NO: 20149592 NR Description: unr-interacting protein [Homo sapiens]
  misc_feature (1)..(177): Homolog of NCBI NO: 6755682 NR Description: serine/threonine kinase receptor associated
MEKILRVYDMNRPDAAPRELDKSPGSVRTAAWLHSDQTILSSCTDMGGVRLWDVRTGKNVQTLETKASVTSAEVSQDGRFITTADGSSVKFWDANHFGLVKSYDMPCNVESASLEPKSGSKFVAGGEDLWVHVFDFFTGEEIACNKGHHGPVHCVRFAPCGESYASGSEDGTIRIWQLSPANADDNEVANANGKTTAGVNEVTTKIEGFHIPKEGQTEG

SEQ ID NO: 10870 - DNA, 1957 bp, Zea mays subsp. mays
  misc_feature (1)..(1957): Ceres Seq. ID no. 12423946
  misc_feature: MA Experiment ID: 20000488 Result: Down-regulated in Transcription
  misc_feature: MA Experiment 20000488 PARAMETER Experiment Name: Zm_50mM_NH4NO3_L_to_H_P Parameter: Organism Value: Zea mays
  misc_feature: MA Experiment 20000488 PARAMETER Experiment Name: Zm_50mM_NH4NO3_L_to_H_P Parameter: Timepoint (hr) Value: 8
  misc_feature: MA Experiment 20000488 PARAMETER Experiment Name: Zm_50mM_NH4NO3_L_to_H_P Parameter: Tissue Value: Leaves
  misc_feature: MA Experiment 20000488 PARAMETER Experiment Name: Zm_50mM_NH4NO3_L_to_H_P Parameter: Treatment Value: 50mM NH4NO3 vs. 100mM Mannitol
  misc_feature: MA Experiment ID: 20000626 Result: Down-regulated in Transcription
  misc_feature: MA Experiment 20000626 PARAMETER Experiment Name: Zm_Herbicide-Treatments_P Parameter: Timepoint (hr) Value: 12
  misc_feature: MA Experiment 20000626 PARAMETER Experiment Name: Zm_Herbicide-Treatments_P Parameter: Tissue Value: Aerial
  misc_feature: MA Experiment 20000626 PARAMETER Experiment Name: Zm_Herbicide-Treatments_P Parameter: Treatment Value: Roundup vs. No Treatment
aagcgtcctcggatccacgtccaccgcgtcgccgtagtccgtagaggtcgccgccgccgagcaagctgctgtcaccaacgacagcgaggccgccacgctccgcagcgaggttgagcgcctcgagggtctcctcgccgcggagaaggctagccatgaggaggagatgcgcaggggtgcatggctcggggaccagctgcagaccgcgtaccaggagaaggccgccctcgaggaggagatcgagaccctgaagggttccgccactgccgagggcaagggcatggaagagggatgtgattctgttgctgctagggccaggacgcctaaggatcagggcgtggtgcctcccgcactggtccgcggctgctggagcagctgccacggctggcatcgcagtggtcttgtttaacctcaagaggtaatctggtggtccgatgcgcggaagttttgatctgctgctatggcctatatgagaataggcctacatgtatggcaagtacctttactttctgaagttttcaatggtaataagagtcgtgaacacaaacatgaggtataattgagttcttgtctgatcttttgagttgcacctgatcttttgagttcttgtcttggttcgttcttgattcttggacgaggtgggatttggagagccaagggcggcgcggcagcagcgggtttctcggtcggactagattgtttccatcgagatggtgggcggcggagggcattcgtcgatggaccaccctggcgccaaggacctcgagcgcggcgagctgcgccgtggcgcgcctgagtttgcggacggcgacgatggagacggggaagaaagccagtacttctcggacgcggaggaccggttcgtggccgtcgcactcgcgccacgactccaccgcctacgaggactacgtctcgctgtgcgtgtccgcccgcgcgagctccgtcgacgccgacgccgatgccgacggcgaggccgtcagacaacactgcaggaagtcgtcgtgcgtgtcagagggctcgctggacgacgttgacctggaggccggactgagcgagatcatcaaggccagccctgagaaggccgaacagaactgtcgcatttgccaccttggcctggagagcacggcggtcgagtccggtgccggcatcacgctcggctgctcctgcaagggggacttatcctacgcccacaagcagtgcgccgacacctggttcaagatcagaggcaacaaatgccaatcggctggagtagacaccctgtttgtggaaggaggtaccatttcataattcggaatgaatacaaaacctgcaagcattgtgaccattgtgggcttatggcccagtcgtttggaacacggtgctcgacatgcaaatatgtgatctcctctgatgatccggaagattgggactataggcagttggataatccacgtcacttgctgcatgcaaatcagaacattcatccagatgaggactaacttgaaggtggtcgataactctggggccaagtgagtgatgtgcatccagtccctgagggggaagaaaggagcaaggctcggggacatgatcatcggatccgtaaaggaggcccagcctcgtggcaaggtcaagaaagaagacgtagtctacggcgtggtcgtccgcgccgccatgaagaaagggcgcagcgacggcagcgaggtccagttcgacgacaacgaggtggtcctcgtgaacaagaagggtgagctgatcggcacccgcgtcttcggccccgtcccccacgagctgaggaagaagaagcacctcaagatcctggccctggctgaacacatcgtttgaggtgtgtcgcagagccaagagccaagtgtttatgggaatgtttttttgtctgtgttctctgtttgaataatgcattgtgaaacgatagcatggaccgtttgaactattttgatgatattgctcgcccatttggatggtc

SEQ ID NO: 10871 - protein, 157 aa, Zea mays subsp. mays
  peptide (1)..(157): Ceres Seq. ID no. 12423947
  misc_feature (94)..(142): Pfam Name: Zinc finger, C3HC4 type (RING finger) Pfam Description: Zinc finger, C3HC4 type (RING finger)
  misc_feature (17)..(157): Homolog of NCBI NO: 34908318 NR Description: P0529H11.12 [Oryza sativa (japonica
  misc_feature (30)..(145): Homolog of NCBI NO: 15239254 NR Description: putative protein; protein id: At5g05830.1 thaliana] >gi|9759108|dbj|BAB09677.1|
  misc_feature (30)..(143): Homolog of NCBI NO: 15224415 NR Description: unknown protein; protein id: At2g37950.1
  misc_feature (84)..(157): Homolog of NCBI NO: 9759231 NR Description: gb|AAD32776.1~gene_id:K19M22.19~similar to
  misc_feature (109)..(157): Homolog of NCBI NO: 15237796 NR Description: putative protein; protein id: At5g59000.1,
  misc_feature (109)..(157): Homolog of NCBI NO: 21537129 NR Description: unknown [Arabidopsis thaliana]
METGKKASTSRTRRTGSWPSHSRHDSTAYEDYVSLCVSARASSVDADADADGEAVRQHCRKSSCVSEGSLDDVDLEAGLSEIIKASPEKAEQNCRICHLGLESTAVESGAGITLGCSCKGDLSYAHKQCADTWFKIRGNKCQSAGVDTLFVEGGTIS

SEQ ID NO: 10872 - protein, 107 aa, Zea mays subsp. mays
  peptide (1)..(107): Ceres Seq. ID no. 12423948
MVGGGGHSSMDHPGAKDLERGELRRGAPEFADGDDGDGEESQYFSDAEDRFVAVALAPRLHRLRGLRLAVRVRPRELRRRRRRCRRRGRQTTLQEVVVRVRGLAGRR

SEQ ID NO: 10873 - protein, 101 aa, Zea mays subsp. mays
  peptide (1)..(101): Ceres Seq. ID no. 12423949
  misc_feature (1)..(101): Pfam Name: Ribosomal protein L14p/L23e Pfam Description: Ribosomal protein L14p/L23e
  misc_feature (1)..(101): Homolog of NCBI NO: 18140856 NR Description: HUELLENLOS-like protein [Oryza sativa]
  misc_feature (1)..(100): Homolog of NCBI NO: 20260394 NR Description: unknown protein [Arabidopsis thaliana]
  misc_feature (1)..(100): Homolog of NCBI NO: 30694896 NR Description: ribosomal protein L14p family [Arabidopsis >gi|16604452|gb|AAL24232.1| AT5g46160/MCL19_22 [Arabidopsis >gi|18140860|gb|AAL60452.1|AF402993_1 HUELLENLOS PARALOG
  misc_feature (1)..(100): Homolog of NCBI NO: 30694900 NR Description: ribosomal protein L14p family [Arabidopsis
  misc_feature (1)..(100): Homolog of NCBI NO: 9757736 NR Description: 50S ribosomal protein L14 [Arabidopsis thaliana]
  misc_feature (1)..(101): Homolog of NCBI NO: 16125507 NR Description: ribosomal protein L14 [Caulobacter crescentus
  misc_feature (1)..(101): Homolog of NCBI NO: 15889233 NR Description: AGR_C_3539p [Agrobacterium tumefaciens] >gi|25295210|pir||B97593 hypothetical protein AGR_C_3539
  misc_feature (1)..(101): Homolog of NCBI NO: 15965119 NR Description: PROBABLE 50S RIBOSOMAL PROTEIN L14 [Sinorhizobium >gi|15074299|emb|CAC45945.1| PROBABLE 50S RIBOSOMAL PROTEIN L14
  misc_feature (1)..(101): Homolog of NCBI NO: 13470561 NR Description: 50S ribosomal protein L14 [Mesorhizobium loti]
  misc_feature (1)..(101): Homolog of NCBI NO: 17987050 NR Description: LSU ribosomal protein L14P [Brucella melitensis]
MCIQSLRGKKGARLGDMIIGSVKEAQPRGKVKKEDVVYGVVVRAAMKKGRSDGSEVQFDDNEVVLVNKKGELIGTRVFGPVPHELRKKKHLKILALAEHIV

SEQ ID NO: 10874 - DNA, 1880 bp, Zea mays subsp. mays
  misc_feature (1)..(1880): Ceres Seq. ID no. 13498503
  misc_feature: MA Experiment ID: 20000108 Result: Up-regulated in Transcription
  misc_feature: MA Experiment 20000108 PARAMETER Experiment Name: Zm_Root-Tips_P Parameter: Age (day) Value: 12
  misc_feature: MA Experiment 20000108 PARAMETER Experiment Name: Zm_Root-Tips_P Parameter: Organism Value: Zea mays
  misc_feature: MA Experiment 20000108 PARAMETER Experiment Name: Zm_Root-Tips_P Parameter: Tissue Value: Root tips vs. Root mid region    35
  misc_feature: MA Experiment 20000108 PARAMETER Experiment Name: Zm_Root-Tips_P Parameter: Tissue Value: Root tips vs. Root mid region   Sequence Listing-Misc Features (4)
ccagcccaacttacagaagcccacaaagtattcacttaacgtctgtaactaccggcccatcccaggaagaggccccgctcctctccctgctcgctgcacagggactcggcctccgggacggcagacccacaagcgccagcacgctcgagactgtgccgtgggagtgggaggttcctcaggtgctgagcagtcgccggcggcgaccgccggtgtcggagatgaaggagagaagcggctccagggcggcggtggacgagcgctacgcgcagtggaagtcgctcatccccgtcctctacgactggtttgccaaccacaacctcgtctggccatccctctcctgccggtgggggccacagtttgagaaagctacctacaagaatcgtcagcgcctgtacctatctgaacagacggatgggagtgtgcctaatactctggttatcgcaaattgtgaagttgtgaaacctagggttgcagctgctgaacatatctcacagttcaatgaggaagcacggtcaccttttgtaaagaagtacaaaactatagttcatcctggtgaggttaacagaatcagggaacttccacagaacagtaagatcatagccactcacactgacagtccagatgtacttatttgggatgttgaagcacaaccaaatagacatgctgtcctaggagcaagcgagtctcgccctgatctgatattaacaggacataaggaaaatgcggaatttgcgcttgccatgtgtccagcagaaccatatgtcctatcaggaggaaaggacaaatctgttgtcttgtggagcatccaagaccatatatctgcccttggggattcctcgtcttctcctggagcatctggcagcaagcagtctattaaaactgcaaatgaaaaggagagccctaaagttgatcctagaggtatatttcatggacatgacagcacggttgaagatgttcagttctgcccttccagtgcgcaggagttttgtagtgtgggtgatgatgcttgtcttattctgtgggatgctcgaactggcactgccccagctgttaaggttgagaaagctcacagtggagatgttcattgtgttgattggaatccccttgatgttaactatatcttaactgggtctgccgataactctgtccgaatgtgggatcgtcggaatctgggttcaggaggagctggttctccaattcacaaatttgaaggccataaagctgctgttctttgtgttcagtggtcacctgacagagcatctgtttttggaagttctgcagaagatggtttcttaaacgtgtgggatcatgagaaggtggggaagaagaaaaattctaatgtcccagccgggcttttctttcagcacgctggtcatagggataagattgtagacttccactggaattcgtcagatccttggacaattgtcagtgtctctgatgatggcgagagcactggtggaggtggaacactgcagatttggcgcatgagtgatttgatctaccgcccagaggatgaagttcttgcagagctggagaatttcaaggctcatttggccagctgtgcaccgaagaattgagtcatgtgggttacctgcggaatgcaatcctgtggaaactgagtaggtgatgtagtttcatggccataagtatgagccccagttgacattgaatctgtcctctgatgctcctagagctgtacccttgaggggcttgtgcttttgtgagcttgtgttaaacctgctgtacgagtaaactagtatgtccgcaaacgcgtcagagccggatgtctgtgggccagctattgggatactgccggatatcgtcaacaattgttccagattggtgtattggatctaatgagattgtcagcaattgct

SEQ ID NO: 10875 - protein, 525 aa, Zea mays subsp. mays
  peptide (1)..(525): Ceres Seq. ID no. 13498504
  misc_feature (73)..(525): Homolog of NCBI NO: 14550114 NR Description: nucleosome/chromatin assembly factor C [Zea mays]
  misc_feature (73)..(525): Homolog of NCBI NO: 9716495 NR Description: WD-repeat protein RBAP1 [Zea mays]
  misc_feature (73)..(525): Homolog of NCBI NO: 21898564 NR Description: nucleosome/chromatin assembly factor group C [Zea
  misc_feature (73)..(525): Homolog of NCBI NO: 34910476 NR Description: putative WD-repeat protein RBAP1 [Oryza sativa
  misc_feature (56)..(524): Homolog of NCBI NO: 30680701 NR Description: WD-40 repeat protein (MSI4) [Arabidopsis thaliana]
  misc_feature (73)..(524): Homolog of NCBI NO: 20197482 NR Description: putative WD-40 repeat protein, MSI4 [Arabidopsis
  misc_feature (73)..(524): Homolog of NCBI NO: 2599092 NR Description: WD-40 repeat protein MSI4 [Arabidopsis thaliana]
  misc_feature (74)..(523): Homolog of NCBI NO: 5701955 NR Description: X1 protein [Silene latifolia]
  misc_feature (74)..(523): Homolog of NCBI NO: 17902570 NR Description: putative WD-repeat protein [Silene latifolia]
  misc_feature (74)..(523): Homolog of NCBI NO: 5701951 NR Description: Y1 protein [Silene latifolia]
SPTYRSPQSIHLTSVTTGPSQEEAPLLSLLAAQGLGLRDGRPTSASTLETVPWEWEVPQVLSSRRRRPPVSEMKERSGSRAAVDERYAQWKSLIPVLYDWFANHNLVWPSLSCRWGPQFEKATYKNRQRLYLSEQTDGSVPNTLVIANCEVVKPRVAAAEHISQFNEEARSPFVKKYKTIVHPGEVNRIRELPQNSKIIATHTDSPDVLIWDVEAQPNRHAVLGASESRPDLILTGHKENAEFALAMCPAEPYVLSGGKDKSVVLWSIQDHISALGDSSSSPGASGSKQSIKTANEKESPKVDPRGIFHGHDSTVEDVQFCPSSAQEFCSVGDDACLILWDARTGTAPAVKVEKAHSGDVHCVDWNPLDVNYILTGSADNSVRMWDRRNLGSGGAGSPIHKFEGHKAAVLCVQWSPDRASVFGSSAEDGFLNVWDHEKVGKKKNSNVPAGLFFQHAGHRDKIVDFHWNSSDPWTIVSVSDDGESTGGGGTLQIWRMSDLIYRPEDEVLAELENFKAHLASCAPKN

SEQ ID NO: 10876 - protein, 453 aa, Zea mays subsp. mays
  peptide (1)..(453): Ceres Seq. ID no. 13498505
  misc_feature (1)..(453): Homolog of NCBI NO: 14550114 NR Description: nucleosome/chromatin assembly factor C [Zea mays]
  misc_feature (1)..(453): Homolog of NCBI NO: 9716495 NR Description: WD-repeat protein RBAP1 [Zea mays]
  misc_feature (1)..(453): Homolog of NCBI NO: 21898564 NR Description: nucleosome/chromatin assembly factor group C [Zea
  misc_feature (1)..(453): Homolog of NCBI NO: 34910476 NR Description: putative WD-repeat protein RBAP1 [Oryza sativa
  misc_feature (1)..(452): Homolog of NCBI NO: 30680701 NR Description: WD-40 repeat protein (MSI4) [Arabidopsis thaliana]
  misc_feature (1)..(452): Homolog of NCBI NO: 20197482 NR Description: putative WD-40 repeat protein, MSI4 [Arabidopsis
  misc_feature (1)..(452): Homolog of NCBI NO: 2599092 NR Description: WD-40 repeat protein MSI4 [Arabidopsis thaliana]
  misc_feature (2)..(451): Homolog of NCBI NO: 5701955 NR Description: X1 protein [Silene latifolia]
  misc_feature (2)..(451): Homolog of NCBI NO: 17902570 NR Description: putative WD-repeat protein [Silene latifolia]
  misc_feature (2)..(451): Homolog of NCBI NO: 5701951 NR Description: Y1 protein [Silene latifolia]
MKERSGSRAAVDERYAQWKSLIPVLYDWFANHNLVWPSLSCRWGPQFEKATYKNRQRLYLSEQTDGSVPNTLVIANCEVVKPRVAAAEHISQFNEEARSPFVKKYKTIVHPGEVNRIRELPQNSKIIATHTDSPDVLIWDVEAQPNRHAVLGASESRPDLILTGHKENAEFALAMCPAEPYVLSGGKDKSVVLWSIQDHISALGDSSSSPGASGSKQSIKTANEKESPKVDPRGIFHGHDSTVEDVQFCPSSAQEFCSVGDDACLILWDARTGTAPAVKVEKAHSGDVHCVDWNPLDVNYILTGSADNSVRMWDRRNLGSGGAGSPIHKFEGHKAAVLCVQWSPDRASVFGSSAEDGFLNVWDHEKVGKKKNSNVPAGLFFQHAGHRDKIVDFHWNSSDPWTIVSVSDDGESTGGGGTLQIWRMSDLIYRPEDEVLAELENFKAHLASCAPKN

SEQ ID NO: 10877 - protein, 279 aa, Zea mays subsp. mays
  peptide (1)..(279): Ceres Seq. ID no. 13498506
  misc_feature (1)..(279): Homolog of NCBI NO: 14550114 NR Description: nucleosome/chromatin assembly factor C [Zea mays]
  misc_feature (1)..(279): Homolog of NCBI NO: 9716495 NR Description: WD-repeat protein RBAP1 [Zea mays]
  misc_feature (1)..(279): Homolog of NCBI NO: 21898564 NR Description: nucleosome/chromatin assembly factor group C [Zea
  misc_feature (1)..(279): Homolog of NCBI NO: 34910476 NR Description: putative WD-repeat protein RBAP1 [Oryza sativa
  misc_feature (1)..(278): Homolog of NCBI NO: 30680701 NR Description: WD-40 repeat protein (MSI4) [Arabidopsis thaliana]
  misc_feature (1)..(278): Homolog of NCBI NO: 20197482 NR Description: putative WD-40 repeat protein, MSI4 [Arabidopsis
  misc_feature (1)..(278): Homolog of NCBI NO: 2599092 NR Description: WD-40 repeat protein MSI4 [Arabidopsis thaliana]
  misc_feature (1)..(277): Homolog of NCBI NO: 5701955 NR Description: X1 protein [Silene latifolia]
  misc_feature (1)..(277): Homolog of NCBI NO: 17902570 NR Description: putative WD-repeat protein [Silene latifolia]
  misc_feature (1)..(277): Homolog of NCBI NO: 5701951 NR Description: Y1 protein [Silene latifolia]
MCPAEPYVLSGGKDKSVVLWSIQDHISALGDSSSSPGASGSKQSIKTANEKESPKVDPRGIFHGHDSTVEDVQFCPSSAQEFCSVGDDACLILWDARTGTAPAVKVEKAHSGDVHCVDWNPLDVNYILTGSADNSVRMWDRRNLGSGGAGSPIHKFEGHKAAVLCVQWSPDRASVFGSSAEDGFLNVWDHEKVGKKKNSNVPAGLFFQHAGHRDKIVDFHWNSSDPWTIVSVSDDGESTGGGGTLQIWRMSDLIYRPEDEVLAELENFKAHLASCAPKN

SEQ ID NO: 10878 - DNA, 1236 bp, Zea mays subsp. mays
  misc_feature (1)..(1236): Ceres Seq. ID no. 12412058
  misc_feature: MA Experiment ID: 108523 Result: Up-regulated in Transcription
  misc_feature: MA Experiment 108523 PARAMETER Experiment Name: Zm_42deg_Heat_P Parameter: Age (day) Value: 8
  misc_feature: MA Experiment 108523 PARAMETER Experiment Name: Zm_42deg_Heat_P Parameter: Organism Value: Zea mays
  misc_feature: MA Experiment 108523 PARAMETER Experiment Name: Zm_42deg_Heat_P Parameter: Plant Line Value: 35A19
  misc_feature: MA Experiment 108523 PARAMETER Experiment Name: Zm_42deg_Heat_P Parameter: Temperature (deg C) Value: 42 vs. 22
  misc_feature: MA Experiment 108523 PARAMETER Experiment Name: Zm_42deg_Heat_P Parameter: Timepoint (hr) Value: 6
  misc_feature: MA Experiment 108523 PARAMETER Experiment Name: Zm_42deg_Heat_P Parameter: Tissue Value: Aerial
  misc_feature: MA Experiment ID: 108528 Result: Down-regulated in Transcription
  misc_feature: MA Experiment 108528 PARAMETER Experiment Name: Zm_Imbibed_Seeds_P Parameter: Age (day) Value: 5 vs. 2
  misc_feature: MA Experiment 108528 PARAMETER Experiment Name: Zm_Imbibed_Seeds_P Parameter: Organism Value: Zea mays
  misc_feature: MA Experiment 108528 PARAMETER Experiment Name: Zm_Imbibed_Seeds_P Parameter: Plant Line Value: 35A19
  misc_feature: MA Experiment 108528 PARAMETER Experiment Name: Zm_Imbibed_Seeds_P Parameter: Tissue Value: Aerial vs. Embryo
  misc_feature: MA Experiment ID: 108530 Result: Down-regulated in Transcription
  misc_feature: MA Experiment 108530 PARAMETER Experiment Name: Zm_Imbibed_Seeds_P Parameter: Age (day) Value: 6 vs. 2
  misc_feature: MA Experiment 108530 PARAMETER Experiment Name: Zm_Imbibed_Seeds_P Parameter: Organism Value: Zea mays
  misc_feature: MA Experiment 108530 PARAMETER Experiment Name: Zm_Imbibed_Seeds_P Parameter: Plant Line Value: 35A19
  misc_feature: MA Experiment 108530 PARAMETER Experiment Name: Zm_Imbibed_Seeds_P Parameter: Tissue Value: Aerial vs. Embryo
  misc_feature: MA Experiment ID: 108534 Result: Up-regulated in Transcription
  misc_feature: MA Experiment 108534 PARAMETER Experiment Name: Zm_4deg_Cold_P Parameter: Age (hr) Value: 8
  misc_feature: MA Experiment 108534 PARAMETER Experiment Name: Zm_4deg_Cold_P Parameter: Organism Value: Zea mays
  misc_feature: MA Experiment 108534 PARAMETER Experiment Name: Zm_4deg_Cold_P Parameter: Plant Line Value: 35A19
  misc_feature: MA Experiment 108534 PARAMETER Experiment Name: Zm_4deg_Cold_P Parameter: Temperature (deg C) Value: 4 vs. 22
  misc_feature: MA Experiment 108534 PARAMETER Experiment Name: Zm_4deg_Cold_P Parameter: Timepoint (hr) Value: 6
  misc_feature: MA Experiment 108534 PARAMETER Experiment Name: Zm_4deg_Cold_P Parameter: Tissue Value: Aerial
  misc_feature: MA Experiment ID: 108535 Result: Up-regulated in Transcription
  misc_feature: MA Experiment 108535 PARAMETER Experiment Name: Zm_Meristem_P Parameter: Age (day) Value: 8
  misc_feature: MA Experiment 108535 PARAMETER Experiment Name: Zm_Meristem_P Parameter: Organism Value: Zea mays
  misc_feature: MA Experiment 108535 PARAMETER Experiment Name: Zm_Meristem_P Parameter: Plant Line Value: 35A19
  misc_feature: MA Experiment 108535 PARAMETER Experiment Name: Zm_Meristem_P Parameter: Tissue Value: Root Meristem vs. Above Root Meristem
  misc_feature: MA Experiment ID: 108547 Result: Down-regulated in Transcription
  misc_feature: MA Experiment 108547 PARAMETER Experiment Name: Zm_Imbibed_Seeds_P Parameter: Age (day) Value: 4 vs. 2
  misc_feature: MA Experiment 108547 PARAMETER Experiment Name: Zm_Imbibed_Seeds_P Parameter: Organism Value: Zea mays
  misc_feature: MA Experiment 108547 PARAMETER Experiment Name: Zm_Imbibed_Seeds_P Parameter: Plant Line Value: 35A19
  misc_feature: MA Experiment 108547 PARAMETER Experiment Name: Zm_Imbibed_Seeds_P Parameter: Tissue Value: Aerial vs. Embryo
aataaagctcgcgccacgggagccacgcacgcggacgccggcatattcgccaaacgcatcgcatcggcctcggccaccggcgcggctgccctcctcctcttctccgtcgatccggagaggactttctctcgcctgctcgtcccttccgcccccgccggccggccggtcctcttcccggcccactccgttccgatcgaccatggcggctaccgcccccaacggcaatcccactgtcagctccctcgcggcaaccgttccggtccaggcggttctgttcgacatcgacgggaccctgtgcgactcggatcccctccaccacgtcgctttccaagagatgcttctcgagatcgggtacaacaatggcgtgccgatagacgaggagttcttcatcaagaacatcgctgggaggagtgacgtcgaagctgcccagaacctgttcccggactgggagcttgagaaggggctcaaattcctagaggacaaggaagcaaaatacaggagtctggcaaaagagcgcttggtgcctgtgaaaggcctcgcgaaggtggtccagtgggtgaaagaccacgggtacaagcgcgcggcggtgaccaacgcccccaggatcaacgcggagctgatgatctcgctcctgggcctctcggacttcttccaggccgtcatcgtcggaggcgagtgcgagcagccaaagcccgcgccgtacccttacctcagggccctcaaggagctccaggtgtccgcagagcacagcttcgtcttcgaggattctcctgctggtatccgggctggcgtcgcggcggggatgcctgtcgtcggtgtggcgacgaggaacccggagaagtccttggtggaagcaggagccgcgttgctcgtcaaggactacgaagatcctaagctctgggcagcgcttgaggaggtcgacggagaggaagctaagctgaagaaggccggcgaatgatctgatatgacgatgagccattgattagatttattgcagattaattctgcctccagcatgattctgttcctagttatgcgctgcggagagagctcacctcatcagggtatttatgagattctagcttcgtatattgtttttcttcttcttgattgaactgagatcaaataagacaaagctgctgtgccttgttgtgtgccatctgtgtatgaacttttcggttcagcctccagcagtctttaatctgaaagaaagacgaggtaggaattctctccccc

SEQ ID NO: 10879 - protein, 318 aa, Zea mays subsp. mays
  peptide (1)..(318): Ceres Seq. ID no. 12412059
  misc_feature (87)..(275): Pfam Name: haloacid dehalogenase-like hydrolase Pfam Description: haloacid dehalogenase-like hydrolase
  misc_feature (75)..(309): Homolog of NCBI NO: 18404847 NR Description: expressed protein; protein id: At2g38740.1, by cDNA: 40283., supported by cDNA: gi_15912256, supported by gi_19547992 [Arabidopsis thaliana] >gi|15912257|gb|AAL08262.1|
  misc_feature (79)..(315): Homolog of NCBI NO: 37536998 NR Description: putative beta-phosphoglucomutase [Oryza sativa
  misc_feature (115)..(309): Homolog of NCBI NO: 25408616 NR Description: hypothetical protein At2g38740 [imported] -
  misc_feature (80)..(311): Homolog of NCBI NO: 34897820 NR Description: P0514G12.30 [Oryza sativa (japonica
  misc_feature (149)..(315): Homolog of NCBI NO: 37700485 NR Description: putative beta-phosphoglucomutase [Oryza sativa]
  misc_feature (89)..(306): Homolog of NCBI NO: 23127812 NR Description: hypothetical protein [Nostoc punctiforme]
  misc_feature (89)..(310): Homolog of NCBI NO: 37521914 NR Description: hypothetical protein glr2345 [Gloeobacter
  misc_feature (89)..(306): Homolog of NCBI NO: 17228223 NR Description: hypothetical protein [Nostoc sp. PCC 7120]
  misc_feature (87)..(299): Homolog of NCBI NO: 23042473 NR Description: hypothetical protein [Trichodesmium erythraeum
  misc_feature (87)..(299): Homolog of NCBI NO: 23039672 NR Description: hypothetical protein [Trichodesmium erythraeum
IKLAPREPRTRTPAYSPNASHRPRPPARLPSSSSPSIRRGLSLACSSLPPPPAGRSSSRPTPFRSTMAATAPNGNPTVSSLAATVPVQAVLFDIDGTLCDSDPLHHVAFQEMLLEIGYNNGVPIDEEFFIKNIAGRSDVEAAQNLFPDWELEKGLKFLEDKEAKYRSLAKERLVPVKGLAKVVQWVKDHGYKRAAVTNAPRINAELMISLLGLSDFFQAVIVGGECEQPKPAPYPYLRALKELQVSAEHSFVFEDSPAGIRAGVAAGMPVVGVATRNPEKSLVEAGAALLVKDYEDPKLWAALEEVDGEEAKLKKAGE

SEQ ID NO: 10880 - protein, 252 aa, Zea mays subsp. mays
  peptide (1)..(252): Ceres Seq. ID no. 12412060
  misc_feature (21)..(209): Pfam Name: haloacid dehalogenase-like hydrolase Pfam Description: haloacid dehalogenase-like hydrolase
  misc_feature (9)..(243): Homolog of NCBI NO: 18404847 NR Description: expressed protein; protein id: At2g38740.1, by cDNA: 40283., supported by cDNA: gi_15912256, supported by gi_19547992 [Arabidopsis thaliana] >gi|15912257|gb|AAL08262.1|
  misc_feature (13)..(249): Homolog of NCBI NO: 37536998 NR Description: putative beta-phosphoglucomutase [Oryza sativa
  misc_feature (49)..(243): Homolog of NCBI NO: 25408616 NR Description: hypothetical protein At2g38740 [imported] -
  misc_feature (14)..(245): Homolog of NCBI NO: 34897820 NR Description: P0514G12.30 [Oryza sativa (japonica
  misc_feature (83)..(249): Homolog of NCBI NO: 37700485 NR Description: putative beta-phosphoglucomutase [Oryza sativa]
  misc_feature (23)..(240): Homolog of NCBI NO: 23127812 NR Description: hypothetical protein [Nostoc punctiforme]
  misc_feature (23)..(244): Homolog of NCBI NO: 37521914 NR Description: hypothetical protein glr2345 [Gloeobacter
  misc_feature (23)..(240): Homolog of NCBI NO: 17228223 NR Description: hypothetical protein [Nostoc sp. PCC 7120]
  misc_feature (21)..(233): Homolog of NCBI NO: 23042473 NR Description: hypothetical protein [Trichodesmium erythraeum
  misc_feature (21)..(233): Homolog of NCBI NO: 23039672 NR Description: hypothetical protein [Trichodesmium erythraeum
MAATAPNGNPTVSSLAATVPVQAVLFDIDGTLCDSDPLHHVAFQEMLLEIGYNNGVPIDEEFFIKNIAGRSDVEAAQNLFPDWELEKGLKFLEDKEAKYRSLAKERLVPVKGLAKVVQWVKDHGYKRAAVTNAPRINAELMISLLGLSDFFQAVIVGGECEQPKPAPYPYLRALKELQVSAEHSFVFEDSPAGIRAGVAAGMPVVGVATRNPEKSLVEAGAALLVKDYEDPKLWAALEEVDGEEAKLKKAGE

SEQ ID NO: 10881 - protein, 207 aa, Zea mays subsp. mays
  peptide (1)..(207): Ceres Seq. ID no. 12412061
  misc_feature (1)..(164): Pfam Name: haloacid dehalogenase-like hydrolase Pfam Description: haloacid dehalogenase-like hydrolase
  misc_feature (4)..(198): Homolog of NCBI NO: 25408616 NR Description: hypothetical protein At2g38740 [imported] -
  misc_feature (1)..(200): Homolog of NCBI NO: 34897820 NR Description: P0514G12.30 [Oryza sativa (japonica
  misc_feature (38)..(204): Homolog of NCBI NO: 37700485 NR Description: putative beta-phosphoglucomutase [Oryza sativa]
  misc_feature (1)..(195): Homolog of NCBI NO: 23127812 NR Description: hypothetical protein [Nostoc punctiforme]
  misc_feature (1)..(198): Homolog of NCBI NO: 18404847 NR Description: expressed protein; protein id: At2g38740.1, by cDNA: 40283., supported by cDNA: gi_15912256, supported by gi_19547992 [Arabidopsis thaliana] >gi|15912257|gb|AAL08262.1|
  misc_feature (1)..(204): Homolog of NCBI NO: 37536998 NR Description: putative beta-phosphoglucomutase [Oryza sativa
  misc_feature (1)..(199): Homolog of NCBI NO: 37521914 NR Description: hypothetical protein glr2345 [Gloeobacter
  misc_feature (1)..(195): Homolog of NCBI NO: 17228223 NR Description: hypothetical protein [Nostoc sp. PCC 7120]
  misc_feature (1)..(188): Homolog of NCBI NO: 23042473 NR Description: hypothetical protein [Trichodesmium erythraeum
  misc_feature (1)..(188): Homolog of NCBI NO: 23039672 NR Description: hypothetical protein [Trichodesmium erythraeum
MLLEIGYNNGVPIDEEFFIKNIAGRSDVEAAQNLFPDWELEKGLKFLEDKEAKYRSLAKERLVPVKGLAKVVQWVKDHGYKRAAVTNAPRINAELMISLLGLSDFFQAVIVGGECEQPKPAPYPYLRALKELQVSAEHSFVFEDSPAGIRAGVAAGMPVVGVATRNPEKSLVEAGAALLVKDYEDPKLWAALEEVDGEEAKLKKAGE

SEQ ID NO: 10882 - DNA, 1220 bp, Zea mays subsp. mays
  misc_feature (1)..(1220): Ceres Seq. ID no. 12412054
  misc_feature: MA Experiment ID: 108528 Result: Up-regulated in Transcription
  misc_feature: MA Experiment 108528 PARAMETER Experiment Name: Zm_Imbibed_Seeds_P Parameter: Age (day) Value: 5 vs. 2
  misc_feature: MA Experiment 108528 PARAMETER Experiment Name: Zm_Imbibed_Seeds_P Parameter: Organism Value: Zea mays
  misc_feature: MA Experiment 108528 PARAMETER Experiment Name: Zm_Imbibed_Seeds_P Parameter: Plant Line Value: 35A19
  misc_feature: MA Experiment 108528 PARAMETER Experiment Name: Zm_Imbibed_Seeds_P Parameter: Tissue Value: Aerial vs. Embryo
  misc_feature: MA Experiment ID: 108530 Result: Up-regulated in Transcription
  misc_feature: MA Experiment 108530 PARAMETER Experiment Name: Zm_Imbibed_Seeds_P Parameter: Age (day) Value: 6 vs. 2
  misc_feature: MA Experiment 108530 PARAMETER Experiment Name: Zm_Imbibed_Seeds_P Parameter: Organism Value: Zea mays
  misc_feature: MA Experiment 108530 PARAMETER Experiment Name: Zm_Imbibed_Seeds_P Parameter: Plant Line Value: 35A19
  misc_feature: MA Experiment 108530 PARAMETER Experiment Name: Zm_Imbibed_Seeds_P Parameter: Tissue Value: Aerial vs. Embryo
  misc_feature: MA Experiment ID: 108545 Result: Up-regulated in Transcription
  misc_feature: MA Experiment 108545 PARAMETER Experiment Name: Zm_Imbibed_Seeds_P Parameter: Age (day) Value: 3 vs. 2
  misc_feature: MA Experiment 108545 PARAMETER Experiment Name: Zm_Imbibed_Seeds_P Parameter: Organism Value: Zea mays
  misc_feature: MA Experiment 108545 PARAMETER Experiment Name: Zm_Imbibed_Seeds_P Parameter: Plant Line Value: 35A19
  misc_feature: MA Experiment 108545 PARAMETER Experiment Name: Zm_Imbibed_Seeds_P Parameter: Tissue Value: Aerial vs. Embryo
  misc_feature: MA Experiment ID: 108547 Result: Up-regulated in Transcription
  misc_feature: MA Experiment 108547 PARAMETER Experiment Name: Zm_Imbibed_Seeds_P Parameter: Age (day) Value: 4 vs. 2
  misc_feature: MA Experiment 108547 PARAMETER Experiment Name: Zm_Imbibed_Seeds_P Parameter: Organism Value: Zea mays
  misc_feature: MA Experiment 108547 PARAMETER Experiment Name: Zm_Imbibed_Seeds_P Parameter: Plant Line Value: 35A19
  misc_feature: MA Experiment 108547 PARAMETER Experiment Name: Zm_Imbibed_Seeds_P Parameter: Tissue Value: Aerial vs. Embryo
atccccaaccccgtcagcccgtgcggccgtgccctctgcctcctctgccactcctcgcccaaagcgccagaggcgcagcccgagccacaggttgcctcctctccctctcctcgtggcctcgtccttctcgttcaagacgaaaccgtacgcgagcgagctggtgagggaggaagagcagggaggtgggatcaggccggctccatggacgccacgctcctcctcctccccgccaactgcacggccgccgccagcgggcggatgcggcctcgactgcctgcaggcccacatgtggcttcccctggtccctccgcgcggccaaggacctccatccgggcctcagccgtgtccgcagccctcgccgttcgtggcctcccgcaacacgcttccgtggccgggcaaagcactggaagttatagggttggtgatgttatgaccaaaagggaagagctccatgttgtgaaaccaacaacttcagttgatgacgcccttgagatgctggtgaagcataggatctctggctttcctgttattgatgatgactggaatttggttggcgttgtgtcagattatgatttattggcactggatacaatatcaggagctggaccggctgaagcagacatatttcctgaggtggatagcacttggaagacatttcatgagatacagaagcttttgagcaaaaccaacgggaaggttattgctgatgttatgaccccagcgcctctcgtggtgcgtgaaacaactaaccttgaagatgctgcaaggttactccttgtgactaagtaccgcaggcttccagtggtcgatagctcaggcaaactggttgggatcattacaagagggaacgtcgtccaagccgccctcgaaatcaagaaaaaggttgaagggacactctgagatgactacctccaggtatcctttttgctgccacatggggggcttaggacttggacacatctctagttggcaactgatcaatcaaagcgactgtcagagtgagcgatgaaagtcgctatgtttatgaagatttgcccggagaagcacaggtgtatgtgtagtgtttgttatatatgctgatgcagtccttgctggccaaaacacaggttaccgattgttctggtttcctgggcttctttggacaccaaattcttaacctaggtcttgtttgggtgcacacgtatctagttcaacttacttgtattgaggttcattgaagt

SEQ ID NO: 10883 - protein, 299 aa, Zea mays subsp. mays
  peptide (1)..(299): Ceres Seq. ID no. 12412055
  misc_feature (144)..(197): Pfam Name: CBS domain Pfam Description: CBS domain
  misc_feature (113)..(299): Homolog of NCBI NO: 34015153 NR Description: putative CBS domain containing protein [Oryza
  misc_feature (68)..(293): Homolog of NCBI NO: 15234564 NR Description: putative protein; protein id: At4g36910.1
  misc_feature (109)..(298): Homolog of NCBI NO: 18418376 NR Description: putative protein; protein id: At4g34120.1, by cDNA: gi_13430837, supported by cDNA: gi_15810600 [Arabidopsis >gi|13430838|gb|AAK26041.1|AF360331_1 unknown protein
  misc_feature (109)..(199): Homolog of NCBI NO: 7486280 NR Description: hypothetical protein F28A23.120 - Arabidopsis >gi|2911050|emb|CAA17560.1| putative protein [Arabidopsis >gi|7270361|emb|CAB80129.1| putative protein [Arabidopsis
  misc_feature (217)..(278): Homolog of NCBI NO: 7486280 NR Description: hypothetical protein F28A23.120 - Arabidopsis >gi|2911050|emb|CAA17560.1| putative protein [Arabidopsis >gi|7270361|emb|CAB80129.1| putative protein [Arabidopsis
  misc_feature (140)..(287): Homolog of NCBI NO: 17231305 NR Description: hypothetical protein [Nostoc sp. PCC 7120]
  misc_feature (137)..(287): Homolog of NCBI NO: 16331252 NR Description: IMP dehydrogenase [Synechocystis sp. PCC 6803]
  misc_feature (140)..(287): Homolog of NCBI NO: 23040753 NR Description: hypothetical protein [Trichodesmium erythraeum
  misc_feature (139)..(287): Homolog of NCBI NO: 15678671 NR Description: conserved protein [Methanothermobacter
  misc_feature (140)..(287): Homolog of NCBI NO: 23127710 NR Description: hypothetical protein [Nostoc punctiforme]
IPNPVSPCGRALCLLCHSSPKAPEAQPEPQVASSPSPRGLVLLVQDETVRERAGEGGRAGRWDQAGSMDATLLLLPANCTAAASGRMRPRLPAGPHVASPGPSARPRTSIRASAVSAALAVRGLPQHASVAGQSTGSYRVGDVMTKREELHVVKPTTSVDDALEMLVKHRISGFPVIDDDWNLVGVVSDYDLLALDTISGAGPAEADIFPEVDSTWKTFHEIQKLLSKTNGKVIADVMTPAPLVVRETTNLEDAARLLLVTKYRRLPVVDSSGKLVGIITRGNVVQAALEIKKKVEGTL

SEQ ID NO: 10884 - protein, 232 aa, Zea mays subsp. mays; identical to SEQ ID NO: 6465
  peptide (1)..(232): Ceres Seq. ID no. 12412056
  misc_feature (77)..(130): Pfam Name: CBS domain Pfam Description: CBS domain
  misc_feature (46)..(232): Homolog of NCBI NO: 34015153 NR Description: putative CBS domain containing protein [Oryza
  misc_feature (1)..(226): Homolog of NCBI NO: 15234564 NR Description: putative protein; protein id: At4g36910.1
  misc_feature (42)..(231): Homolog of NCBI NO: 18418376 NR Description: putative protein; protein id: At4g34120.1, by cDNA: gi_13430837, supported by cDNA: gi_15810600 [Arabidopsis >gi|13430838|gb|AAK26041.1|AF360331_1 unknown protein
  misc_feature (42)..(132): Homolog of NCBI NO: 7486280 NR Description: hypothetical protein F28A23.120 - Arabidopsis >gi|2911050|emb|CAA17560.1| putative protein [Arabidopsis >gi|7270361|emb|CAB80129.1| putative protein [Arabidopsis
  misc_feature (150)..(211): Homolog of NCBI NO: 7486280 NR Description: hypothetical protein F28A23.120 - Arabidopsis >gi|2911050|emb|CAA17560.1| putative protein [Arabidopsis >gi|7270361|emb|CAB80129.1| putative protein [Arabidopsis
  misc_feature (73)..(220): Homolog of NCBI NO: 17231305 NR Description: hypothetical protein [Nostoc sp. PCC 7120]
  misc_feature (70)..(220): Homolog of NCBI NO: 16331252 NR Description: IMP dehydrogenase [Synechocystis sp. PCC 6803]
  misc_feature (73)..(220): Homolog of NCBI NO: 23040753 NR Description: hypothetical protein [Trichodesmium erythraeum
  misc_feature (72)..(220): Homolog of NCBI NO: 15678671 NR Description: conserved protein [Methanothermobacter
  misc_feature (73)..(220): Homolog of NCBI NO: 23127710 NR Description: hypothetical protein [Nostoc punctiforme]

SEQ ID NO: 10885 - protein, 213 aa, Zea mays subsp. mays; identical to SEQ ID NO: 6466
  peptide (1)..(213): Ceres Seq. ID no. 12412057
  misc_feature (58)..(111): Pfam Name: CBS domain Pfam Description: CBS domain
  misc_feature (27)..(213): Homolog of NCBI NO: 34015153 NR Description: putative CBS domain containing protein [Oryza
  misc_feature (1)..(207): Homolog of NCBI NO: 15234564 NR Description: putative protein; protein id: At4g36910.1
  misc_feature (23)..(212): Homolog of NCBI NO: 18418376 NR Description: putative protein; protein id: At4g34120.1, by cDNA: gi_13430837, supported by cDNA: gi_15810600 [Arabidopsis >gi|13430838|gb|AAK26041.1|AF360331_1 unknown protein
  misc_feature (23)..(113): Homolog of NCBI NO: 7486280 NR Description: hypothetical protein F28A23.120 - Arabidopsis >gi|2911050|emb|CAA17560.1| putative protein [Arabidopsis >gi|7270361|emb|CAB80129.1| putative protein [Arabidopsis
  misc_feature (131)..(192): Homolog of NCBI NO: 7486280 NR Description: hypothetical protein F28A23.120 - Arabidopsis >gi|2911050|emb|CAA17560.1| putative protein [Arabidopsis >gi|7270361|emb|CAB80129.1| putative protein [Arabidopsis
  misc_feature (54)..(201): Homolog of NCBI NO: 17231305 NR Description: hypothetical protein [Nostoc sp. PCC 7120]
  misc_feature (51)..(201): Homolog of NCBI NO: 16331252 NR Description: IMP dehydrogenase [Synechocystis sp. PCC 6803]
  misc_feature (54)..(201): Homolog of NCBI NO: 23040753 NR Description: hypothetical protein [Trichodesmium erythraeum
  misc_feature (53)..(201): Homolog of NCBI NO: 15678671 NR Description: conserved protein [Methanothermobacter
  misc_feature (54)..(201): Homolog of NCBI NO: 23127710 NR Description: hypothetical protein [Nostoc punctiforme]

SEQ ID NO: 10886 - DNA, 1310 bp, Zea mays subsp. mays
  misc_feature (1)..(1310): Ceres Seq. ID no. 12358780
  misc_feature: MA Experiment ID: 108536 Result: Down-regulated in Transcription
  misc_feature: MA Experiment 108536 PARAMETER Experiment Name: Zm_Meristem_P Parameter: Age (day) Value: 8
  misc_feature: MA Experiment 108536 PARAMETER Experiment Name: Zm_Meristem_P Parameter: Organism Value: Zea mays
  misc_feature: MA Experiment 108536 PARAMETER Experiment Name: Zm_Meristem_P Parameter: Plant Line Value: 35A19
  misc_feature: MA Experiment 108536 PARAMETER Experiment Name: Zm_Meristem_P Parameter: Tissue Value: Shoot Meristem vs. Above Shoot Meristem
  misc_feature: MA Experiment ID: 108543 Result: Up-regulated in Transcription
  misc_feature: MA Experiment ID: 108544 Result: Up-regulated in Transcription
  misc_feature: MA Experiment ID: 108689 Result: Up-regulated in Transcription
  misc_feature: MA Experiment 108689 PARAMETER Experiment Name: Zm_Drought_Roots_P Parameter: Age (day) Value: 9
  misc_feature: MA Experiment 108689 PARAMETER Experiment Name: Zm_Drought_Roots_P Parameter: Organism Value: Zea mays
  misc_feature: MA Experiment 108689 PARAMETER Experiment Name: Zm_Drought_Roots_P Parameter: Plant Line Value: 35A19
  misc_feature: MA Experiment 108689 PARAMETER Experiment Name: Zm_Drought_Roots_P Parameter: Timepoint (hr) Value: 24
  misc_feature: MA Experiment 108689 PARAMETER Experiment Name: Zm_Drought_Roots_P Parameter: Tissue Value: Roots
  misc_feature: MA Experiment 108689 PARAMETER Experiment Name: Zm_Drought_Roots_P Parameter: Treatment Value: Drought vs. No Drought
atatcgatttccgccagcggttttcctcatttttttctctccctctcttgcccggtgatcggtcgggatcgattcgagcagatggcggcggcatgggcagtgctggcggcggtcctcgtcgcggcgcaggtggcgtctgcggcgccggtcacggcgccagcgttcctctgggcgcctaagaactacggattccgctctgatgatgctaaggaggtagtccattatcaaacaatctcaccaaagaacttagctaaatctgttcttgaggaaggtggctggtcaacctttatgtgttcaagggaggatactgagaagcatgttgatgttgccattgtttttattggctcaaagctacaatcatcagacatatcgaaagataagcaagttgatccagctttagcagatacattgaagctctccttcacagaatcagagttttctatggcattcccctacgtttccacatcagacgatgagaaactggaggagtcattgctatcaggcttcactgagaactgtaaaagtggttttggaagaaaccgtatcacctacacagacacgtgcgccgtgagtggccaagatctgaagacgtatcacaacatggatgctatcaatgacttggtagtgtcaggaagaaccaacccgagtggacagactgatgtaatcgtcttctgcagcggcgggttcgagaagttaggcaccacggaatcggaaggggagctgctttcccagcttgtcgacttgctgaagctgtctggggctagacacacgattctctacgcttcccagccatctggttatctactggagaacccttccggctcgccagtggctaggcaccttgcggagaggactaacggtacaaaaactggcctactgagcaaatgtgacggagagtgcctagtcaaatcaactcttcttgaaggaacctttgtcggaatagtgctccttatcatcttgatatcagggctcatgtgtatgatgggaatcgatactccctccaagtttgaagctccccaggagtcttgatctcccttcgaagcagaacccttgttttgttggtctgcactgtggatagatattattcagtttccccctttgaaagcgcctttcgtataattattattatttttttactgagccatctgttatttacgatgtgctcaaacttttgacaccaaacgaatgcatgtgtgtgaggcttgtgctgtgaccagacatagcattgcctccaggtgttttctgtgaataacctggaatttcaggtgggtactgtgcatcaaataaaaaagatgaaatcttgctgttgc

SEQ ID NO: 10887 - protein, 342 aa, Zea mays subsp. mays
  peptide (1)..(342): Ceres Seq. ID no. 12358781
  misc_feature (29)..(342): Homolog of NCBI NO: 24417230 NR Description: unknown [Arabidopsis thaliana]
  misc_feature (29)..(342): Homolog of NCBI NO: 30682651 NR Description: expressed protein [Arabidopsis thaliana] unknown protein [Arabidopsis thaliana] unknown protein [Arabidopsis thaliana]
  misc_feature (141)..(342): Homolog of NCBI NO: 21618303 NR Description: unknown [Arabidopsis thaliana]
  misc_feature (78)..(146): Homolog of NCBI NO: 25405838 NR Description: hypothetical protein T5A14.4 [imported] - thaliana >gi|4204260|gb|AAD10641.1| Hypothetical protein
ISISASGFPHFFLSLSCPVIGRDRFEQMAAAWAVLAAVLVAAQVASAAPVTAPAFLWAPKNYGFRSDDAKEVVHYQTISPKNLAKSVLEEGGWSTFMCSREDTEKHVDVAIVFIGSKLQSSDISKDKQVDPALADTLKLSFTESEFSMAFPYVSTSDDEKLEESLLSGFTENCKSGFGRNRITYTDTCAVSGQDLKTYHNMDAINDLVVSGRTNPSGQTDVIVFCSGGFEKLGTTESEGELLSQLVDLLKLSGARHTILYASQPSGYLLENPSGSPVARHLAERTNGTKTGLLSKCDGECLVKSTLLEGTFVGIVLLIILISGLMCMMGIDTPSKFEAPQES

SEQ ID NO: 10888 - protein, 315 aa, Zea mays subsp. mays; identical to SEQ ID NO: 5023
  peptide (1)..(315): Ceres Seq. ID no. 12358782
  misc_feature (2)..(315): Homolog of NCBI NO: 24417230 NR Description: unknown [Arabidopsis thaliana]
  misc_feature (2)..(315): Homolog of NCBI NO: 30682651 NR Description: expressed protein [Arabidopsis thaliana] unknown protein [Arabidopsis thaliana] unknown protein [Arabidopsis thaliana]
  misc_feature (114)..(315): Homolog of NCBI NO: 21618303 NR Description: unknown [Arabidopsis thaliana]
  misc_feature (51)..(119): Homolog of NCBI NO: 25405838 NR Description: hypothetical protein T5A14.4 [imported] - thaliana >gi|4204260|gb|AAD10641.1| Hypothetical protein

SEQ ID NO: 10889 - protein, 246 aa, Zea mays subsp. mays; identical to SEQ ID NO: 5024
  peptide (1)..(246): Ceres Seq. ID no. 12358783
  misc_feature (1)..(246): Homolog of NCBI NO: 24417230 NR Description: unknown [Arabidopsis thaliana]
  misc_feature (1)..(246): Homolog of NCBI NO: 30682651 NR Description: expressed protein [Arabidopsis thaliana] unknown protein [Arabidopsis thaliana] unknown protein [Arabidopsis thaliana]
  misc_feature (45)..(246): Homolog of NCBI NO: 21618303 NR Description: unknown [Arabidopsis thaliana]
  misc_feature (1)..(50): Homolog of NCBI NO: 25405838 NR Description: hypothetical protein T5A14.4 [imported] - thaliana >gi|4204260|gb|AAD10641.1| Hypothetical protein

SEQ ID NO: 10890 - DNA, 1495 bp, Zea mays subsp. mays
  misc_feature (1)..(1495): Ceres Seq. ID no. 12412050
  misc_feature: MA Experiment ID: 108522 Result: Down-regulated in Transcription
  misc_feature: MA Experiment 108522 PARAMETER Experiment Name: Zm_42deg_Heat_P Parameter: Age (day) Value: 8
  misc_feature: MA Experiment 108522 PARAMETER Experiment Name: Zm_42deg_Heat_P Parameter: Organism Value: Zea mays
  misc_feature: MA Experiment 108522 PARAMETER Experiment Name: Zm_42deg_Heat_P Parameter: Plant Line Value: 35A19
  misc_feature: MA Experiment 108522 PARAMETER Experiment Name: Zm_42deg_Heat_P Parameter: Temperature (deg C) Value: 42 vs. 22
  misc_feature: MA Experiment 108522 PARAMETER Experiment Name: Zm_42deg_Heat_P Parameter: Timepoint (hr) Value: 1
  misc_feature: MA Experiment 108522 PARAMETER Experiment Name: Zm_42deg_Heat_P Parameter: Tissue Value: Aerial
  misc_feature: MA Experiment ID: 108528 Result: Up-regulated in Transcription
  misc_feature: MA Experiment 108528 PARAMETER Experiment Name: Zm_Imbibed_Seeds_P Parameter: Age (day) Value: 5 vs. 2
  misc_feature: MA Experiment 108528 PARAMETER Experiment Name: Zm_Imbibed_Seeds_P Parameter: Organism Value: Zea mays
  misc_feature: MA Experiment 108528 PARAMETER Experiment Name: Zm_Imbibed_Seeds_P Parameter: Plant Line Value: 35A19
  misc_feature: MA Experiment 108528 PARAMETER Experiment Name: Zm_Imbibed_Seeds_P Parameter: Tissue Value: Aerial vs. Embryo
  misc_feature: MA Experiment ID: 108530 Result: Up-regulated in Transcription
  misc_feature: MA Experiment 108530 PARAMETER Experiment Name: Zm_Imbibed_Seeds_P Parameter: Age (day) Value: 6 vs. 2
  misc_feature: MA Experiment 108530 PARAMETER Experiment Name: Zm_Imbibed_Seeds_P Parameter: Organism Value: Zea mays
  misc_feature: MA Experiment 108530 PARAMETER Experiment Name: Zm_Imbibed_Seeds_P Parameter: Plant Line Value: 35A19
  misc_feature: MA Experiment 108530 PARAMETER Experiment Name: Zm_Imbibed_Seeds_P Parameter: Tissue Value: Aerial vs. Embryo
  misc_feature: MA Experiment ID: 108534 Result: Down-regulated in Transcription
  misc_feature: MA Experiment 108534 PARAMETER Experiment Name: Zm_4deg_Cold_P Parameter: Age (hr) Value: 8
  misc_feature: MA Experiment 108534 PARAMETER Experiment Name: Zm_4deg_Cold_P Parameter: Organism Value: Zea mays
  misc_feature: MA Experiment 108534 PARAMETER Experiment Name: Zm_4deg_Cold_P Parameter: Plant Line Value: 35A19
  misc_feature: MA Experiment 108534 PARAMETER Experiment Name: Zm_4deg_Cold_P Parameter: Temperature (deg C) Value: 4 vs. 22
  misc_feature: MA Experiment 108534 PARAMETER Experiment Name: Zm_4deg_Cold_P Parameter: Timepoint (hr) Value: 6
  misc_feature: MA Experiment 108534 PARAMETER Experiment Name: Zm_4deg_Cold_P Parameter: Tissue Value: Aerial
  misc_feature: MA Experiment ID: 108545 Result: Up-regulated in Transcription
  misc_feature: MA Experiment 108545 PARAMETER Experiment Name: Zm_Imbibed_Seeds_P Parameter: Age (day) Value: 3 vs. 2
  misc_feature: MA Experiment 108545 PARAMETER Experiment Name: Zm_Imbibed_Seeds_P Parameter: Organism Value: Zea mays
  misc_feature: MA Experiment 108545 PARAMETER Experiment Name: Zm_Imbibed_Seeds_P Parameter: Plant Line Value: 35A19
  misc_feature: MA Experiment 108545 PARAMETER Experiment Name: Zm_Imbibed_Seeds_P Parameter: Tissue Value: Aerial vs. Embryo
ggaaaaggaaaaacaaacaaaatagtaaggggaatttggtacctgggtgtttgctgttccttgagttggtgaatctttggagtgcctggctccgacgagatcgaaaggagggacctttccttggttcctctgctggagctgtgattgcagaggtgaaccatgtcagcgatggcggcggcgggtgaagcggagtatggtgaatgcgtgcagaaggggtccctgcagcagcaccaggcgcctcaacccagccccggcgctctattctacacccatgatggcgtcgccgtctacaggaatccggtcatgccggcgttctaccaacagcccgcgggcagcaatgtcgtcgtgccggcggctccagggccagctcattcccctgccagctctgagcccttcaagcgcaagcgcgggcgcccccgcaagtacgcccccgcagacggcgccgtgccgctggctatcgtgcccccatcgcagccacccactgctcgtgccccagctacctctgaggcctcacccacggttcctcctggcttctctccaagtccgcagagtggtggcgtggtgagtcggcaggcctcgccggcgccggcgccggcgtcaggtgctcccgatgtcaagaagcggggccggccgtcgggcccctccagcaagaagcagcagccgcaggcggcagcgcctggaccaggctggactggattgaagcctcatattttcacagttcaagctggagaggatgtagcatcaagagccatgtcattttctgggaatggatgggctgtttgtatcctgacagccaatggcactgtatctaatgtgaccctgcgtcaaggagagtcttctggtggaacagtaacttatgagggccgttttgagattctctctttggctgggtcatatcttctgtctgaaagtactggcatgagcagtcgaacgggtggacttagtgtttctcttgctagtcctgatgggcatgttttaggtggtgctgtcgcaggacctctaaccgcagcttcgccagttcaggtggtcattgggagctttctggctgatacaaaaatggagcttgaccctggatcagcacctgagaaacatgttttcagcaggtttcaaactaccagcagtccatctaggggtaccgaatcctcgggtgggcatgcaagcccaccaaacaccacaggctccttcagcaccagcacacagccaggcttcccaagctttcccacatggaaatgagtttacctgctatggtggagtgggaccgtggcctctggggatgaggagggaggaatttggaactgacagtcctcgagcgtcgtcgctgtagtttcatgagatgttatgagagtcaatcctatttaggtacttctaactggttacaatgaagttccggtttgctgcttgtcttgacattttgcatcattgaggcacttcaaactccaaagtggtggtaacatacagtatattagatgattccccctatcaaatgccttttgtc

SEQ ID NO: 10891 - protein, 357 aa, Zea mays subsp. mays
  peptide (1)..(357): Ceres Seq. ID no. 12412051
  misc_feature (145)..(345): Homolog of NCBI NO: 18403332 NR Description: AT-hook DNA-binding protein (AHP1); protein id: supported by cDNA: gi_14326503, supported by cDNA: gi_19548036 thaliana] >gi|19548037|gb|AAL87382.1| At2g33620/F4P9.39
  misc_feature (22)..(126): Homolog of NCBI NO: 18403332 NR Description: AT-hook DNA-binding protein (AHP1); protein id: supported by cDNA: gi_14326503, supported by cDNA: gi_19548036 thaliana] >gi|19548037|gb|AAL87382.1| At2g33620/F4P9.39
  misc_feature (145)..(345): Homolog of NCBI NO: 14326504 NR Description: At2g33620/F4P9.39 [Arabidopsis thaliana]
  misc_feature (22)..(126): Homolog of NCBI NO: 14326504 NR Description: At2g33620/F4P9.39 [Arabidopsis thaliana]
  misc_feature (145)..(345): Homolog of NCBI NO: 2598227 NR Description: AT-hook protein 1 [Arabidopsis thaliana]
  misc_feature (22)..(126): Homolog of NCBI NO: 2598227 NR Description: AT-hook protein 1 [Arabidopsis thaliana]
  misc_feature (145)..(345): Homolog of NCBI NO: 25408293 NR Description: AT-hook DNA-binding protein (AHP1) [imported] -
  misc_feature (50)..(126): Homolog of NCBI NO: 25408293 NR Description: AT-hook DNA-binding protein (AHP1) [imported] -
  misc_feature (97)..(340): Homolog of NCBI NO: 37537056 NR Description: putative AT-Hook DNA-binding protein [Oryza
  misc_feature (22)..(356): Homolog of NCBI NO: 38346715 NR Description: OSJNBa0086O06.13 [Oryza sativa (japonica
MSAMAAAGEAEYGECVQKGSLQQHQAPQPSPGALFYTHDGVAVYRNPVMPAFYQQPAGSNVVVPAAPGPAHSPASSEPFKRKRGRPRKYAPADGAVPLAIVPPSQPPTARAPATSEASPTVPPGFSPSPQSGGVVSRQASPAPAPASGAPDVKKRGRPSGPSSKKQQPQAAAPGPGWTGLKPHIFTVQAGEDVASRAMSFSGNGWAVCILTANGTVSNVTLRQGESSGGTVTYEGRFEILSLAGSYLLSESTGMSSRTGGLSVSLASPDGHVLGGAVAGPLTAASPVQVVIGSFLADTKMELDPGSAPEKHVFSRFQTTSSPSRGTESSGGHASPPNTTGSFSTSTQPGFPSFPTWK

SEQ ID NO: 10892 - protein, 354 aa, Zea mays subsp. mays
  peptide (1)..(354): Ceres Seq. ID no. 12412052
  misc_feature (142)..(342): Homolog of NCBI NO: 18403332 NR Description: AT-hook DNA-binding protein (AHP1); protein id: supported by cDNA: gi_14326503, supported by cDNA: gi_19548036 thaliana] >gi|19548037|gb|AAL87382.1| At2g33620/F4P9.39
  misc_feature (19)..(123): Homolog of NCBI NO: 18403332 NR Description: AT-hook DNA-binding protein (AHP1); protein id: supported by cDNA: gi_14326503, supported by cDNA: gi_19548036 thaliana] >gi|19548037|gb|AAL87382.1| At2g33620/F4P9.39
  misc_feature (142)..(342): Homolog of NCBI NO: 14326504 NR Description: At2g33620/F4P9.39 [Arabidopsis thaliana]
  misc_feature (19)..(123): Homolog of NCBI NO: 14326504 NR Description: At2g33620/F4P9.39 [Arabidopsis thaliana]
  misc_feature (142)..(342): Homolog of NCBI NO: 2598227 NR Description: AT-hook protein 1 [Arabidopsis thaliana]
  misc_feature (19)..(123): Homolog of NCBI NO: 2598227 NR Description: AT-hook protein 1 [Arabidopsis thaliana]
  misc_feature (142)..(342): Homolog of NCBI NO: 25408293 NR Description: AT-hook DNA-binding protein (AHP1) [imported] -
  misc_feature (47)..(123): Homolog of NCBI NO: 25408293 NR Description: AT-hook DNA-binding protein (AHP1) [imported] -
  misc_feature (94)..(337): Homolog of NCBI NO: 37537056 NR Description: putative AT-Hook DNA-binding protein [Oryza
  misc_feature (19)..(353): Homolog of NCBI NO: 38346715 NR Description: OSJNBa0086O06.13 [Oryza sativa (japonica
MAAAGEAEYGECVQKGSLQQHQAPQPSPGALFYTHDGVAVYRNPVMPAFYQQPAGSNVVVPAAPGPAHSPASSEPFKRKRGRPRKYAPADGAVPLAIVPPSQPPTARAPATSEASPTVPPGFSPSPQSGGVVSRQASPAPAPASGAPDVKKRGRPSGPSSKKQQPQAAAPGPGWTGLKPHIFTVQAGEDVASRAMSFSGNGWAVCILTANGTVSNVTLRQGESSGGTVTYEGRFEILSLAGSYLLSESTGMSSRTGGLSVSLASPDGHVLGGAVAGPLTAASPVQVVIGSFLADTKMELDPGSAPEKHVFSRFQTTSSPSRGTESSGGHASPPNTTGSFSTSTQPGFPSFPTWK

SEQ ID NO: 10893 - protein, 309 aa, Zea mays subsp. mays
  peptide (1)..(309): Ceres Seq. ID no. 12412053
  misc_feature (97)..(297): Homolog of NCBI NO: 18403332 NR Description: AT-hook DNA-binding protein (AHP1); protein id: supported by cDNA: gi_14326503, supported by cDNA: gi_19548036 thaliana] >gi|19548037|gb|AAL87382.1| At2g33620/F4P9.39
  misc_feature (1)..(78): Homolog of NCBI NO: 18403332 NR Description: AT-hook DNA-binding protein (AHP1); protein id: supported by cDNA: gi_14326503, supported by cDNA: gi_19548036 thaliana] >gi|19548037|gb|AAL87382.1| At2g33620/F4P9.39
  misc_feature (97)..(297): Homolog of NCBI NO: 14326504 NR Description: At2g33620/F4P9.39 [Arabidopsis thaliana]
  misc_feature (1)..(78): Homolog of NCBI NO: 14326504 NR Description: At2g33620/F4P9.39 [Arabidopsis thaliana]
  misc_feature (97)..(297): Homolog of NCBI NO: 2598227 NR Description: AT-hook protein 1 [Arabidopsis thaliana]
  misc_feature (1)..(78): Homolog of NCBI NO: 2598227 NR Description: AT-hook protein 1 [Arabidopsis thaliana]
  misc_feature (97)..(297): Homolog of NCBI NO: 25408293 NR Description: AT-hook DNA-binding protein (AHP1) [imported] -
  misc_feature (2)..(78): Homolog of NCBI NO: 25408293 NR Description: AT-hook DNA-binding protein (AHP1) [imported] -
  misc_feature (49)..(292): Homolog of NCBI NO: 37537056 NR Description: putative AT-Hook DNA-binding protein [Oryza
  misc_feature (1)..(308): Homolog of NCBI NO: 38346715 NR Description: OSJNBa0086O06.13 [Oryza sativa (japonica
MPAFYQQPAGSNVVVPAAPGPAHSPASSEPFKRKRGRPRKYAPADGAVPLAIVPPSQPPTARAPATSEASPTVPPGFSPSPQSGGVVSRQASPAPAPASGAPDVKKRGRPSGPSSKKQQPQAAAPGPGWTGLKPHIFTVQAGEDVASRAMSFSGNGWAVCILTANGTVSNVTLRQGESSGGTVTYEGRFEILSLAGSYLLSESTGMSSRTGGLSVSLASPDGHVLGGAVAGPLTAASPVQVVIGSFLADTKMELDPGSAPEKHVFSRFQTTSSPSRGTESSGGHASPPNTTGSFSTSTQPGFPSFPTWK

SEQ ID NO: 10894 - DNA, 1385 bp, Zea mays subsp. mays
  misc_feature (1)..(1385): Ceres Seq. ID no. 12374161
  misc_feature: MA Experiment ID: 108504 Result: Down-regulated in Transcription
  misc_feature: MA Experiment 108504 PARAMETER Experiment Name: Zm_Drought_P Parameter: Age (day) Value: 8
  misc_feature: MA Experiment 108504 PARAMETER Experiment Name: Zm_Drought_P Parameter: Organism Value: Zea mays
  misc_feature: MA Experiment 108504 PARAMETER Experiment Name: Zm_Drought_P Parameter: Plant Line Value: 35A19
  misc_feature: MA Experiment 108504 PARAMETER Experiment Name: Zm_Drought_P Parameter: Timepoint (hr) Value: 12
  misc_feature: MA Experiment 108504 PARAMETER Experiment Name: Zm_Drought_P Parameter: Tissue Value: Aerial
  misc_feature: MA Experiment 108504 PARAMETER Experiment Name: Zm_Drought_P Parameter: Treatment Value: Drought vs. No Drought
  misc_feature: MA Experiment ID: 108515 Result: Down-regulated in Transcription
  misc_feature: MA Experiment 108515 PARAMETER Experiment Name: Zm_2mM_SA_P Parameter: Age (day) Value: 8
  misc_feature: MA Experiment 108515 PARAMETER Experiment Name: Zm_2mM_SA_P Parameter: Organism Value: Zea mays
  misc_feature: MA Experiment 108515 PARAMETER Experiment Name: Zm_2mM_SA_P Parameter: Plant Line Value: 35A19
  misc_feature: MA Experiment 108515 PARAMETER Experiment Name: Zm_2mM_SA_P Parameter: Timepoint (hr) Value: 12
  misc_feature: MA Experiment 108515 PARAMETER Experiment Name: Zm_2mM_SA_P Parameter: Tissue Value: Aerial
  misc_feature: MA Experiment 108515 PARAMETER Experiment Name: Zm_2mM_SA_P Parameter: Treatment Value: 2mM SA vs. No Treatment
  misc_feature: MA Experiment ID: 108523 Result: Down-regulated in Transcription
  misc_feature: MA Experiment 108523 PARAMETER Experiment Name: Zm_42deg_Heat_P Parameter: Age (day) Value: 8
  misc_feature: MA Experiment 108523 PARAMETER Experiment Name: Zm_42deg_Heat_P Parameter: Organism Value: Zea mays
  misc_feature: MA Experiment 108523 PARAMETER Experiment Name: Zm_42deg_Heat_P Parameter: Plant Line Value: 35A19
  misc_feature: MA Experiment 108523 PARAMETER Experiment Name: Zm_42deg_Heat_P Parameter: Temperature (deg C) Value: 42 vs. 22
  misc_feature: MA Experiment 108523 PARAMETER Experiment Name: Zm_42deg_Heat_P Parameter: Timepoint (hr) Value: 6
  misc_feature: MA Experiment 108523 PARAMETER Experiment Name: Zm_42deg_Heat_P Parameter: Tissue Value: Aerial
  misc_feature: MA Experiment ID: 108529 Result: Up-regulated in Transcription
  misc_feature: MA Experiment 108529 PARAMETER Experiment Name: Zm_Imbibed_Seeds_P Parameter: Age (day) Value: 5 vs. 2
  misc_feature: MA Experiment 108529 PARAMETER Experiment Name: Zm_Imbibed_Seeds_P Parameter: Organism Value: Zea mays
  misc_feature: MA Experiment 108529 PARAMETER Experiment Name: Zm_Imbibed_Seeds_P Parameter: Plant Line Value: 35A19
  misc_feature: MA Experiment 108529 PARAMETER Experiment Name: Zm_Imbibed_Seeds_P Parameter: Tissue Value: Roots vs. Embryo
  misc_feature: MA Experiment ID: 108543 Result: Up-regulated in Transcription
  misc_feature: MA Experiment ID: 108556 Result: Down-regulated in Transcription
  misc_feature: MA Experiment 108556 PARAMETER Experiment Name: Zm_Drought_P Parameter: Age (day) Value: 9
  misc_feature: MA Experiment 108556 PARAMETER Experiment Name: Zm_Drought_P Parameter: Organism Value: Zea mays
  misc_feature: MA Experiment 108556 PARAMETER Experiment Name: Zm_Drought_P Parameter: Plant Line Value: 35A19
  misc_feature: MA Experiment 108556 PARAMETER Experiment Name: Zm_Drought_P Parameter: Timepoint (hr) Value: 24
  misc_feature: MA Experiment 108556 PARAMETER Experiment Name: Zm_Drought_P Parameter: Tissue Value: Aerial
  misc_feature: MA Experiment 108556 PARAMETER Experiment Name: Zm_Drought_P Parameter: Treatment Value: Drought vs. No Drought
  misc_feature: MA Experiment ID: 108597 Result: Down-regulated in Transcription
  misc_feature: MA Experiment 108597 PARAMETER Experiment Name: Zm_100uM_ABA_P Parameter: Age (day) Value: 9
  misc_feature: MA Experiment 108597 PARAMETER Experiment Name: Zm_100uM_ABA_P Parameter: Organism Value: Zea mays
  misc_feature: MA Experiment 108597 PARAMETER Experiment Name: Zm_100uM_ABA_P Parameter: Plant Line Value: 35A19
  misc_feature: MA Experiment 108597 PARAMETER Experiment Name: Zm_100uM_ABA_P Parameter: Timepoint (hr) Value: 24
  misc_feature: MA Experiment 108597 PARAMETER Experiment Name: Zm_100uM_ABA_P Parameter: Tissue Value: Aerial
  misc_feature: MA Experiment 108597 PARAMETER Experiment Name: Zm_100uM_ABA_P Parameter: Treatment Value: 100uM ABA vs. No Treatment
  misc_feature: MA Experiment ID: 20000477 Result: Down-regulated in Transcription
  misc_feature: MA Experiment 20000477 PARAMETER Experiment Name: Zm_5mM_SA_P Parameter: Age (day) Value: 10
  misc_feature: MA Experiment 20000477 PARAMETER Experiment Name: Zm_5mM_SA_P Parameter: Organism Value: Zea mays
  misc_feature: MA Experiment 20000477 PARAMETER Experiment Name: Zm_5mM_SA_P Parameter: Plant Line Value: 35A19
  misc_feature: MA Experiment 20000477 PARAMETER Experiment Name: Zm_5mM_SA_P Parameter: Timepoint (hr) Value: 48
  misc_feature: MA Experiment 20000477 PARAMETER Experiment Name: Zm_5mM_SA_P Parameter: Tissue Value: Aerial
  misc_feature: MA Experiment 20000477 PARAMETER Experiment Name: Zm_5mM_SA_P Parameter: Treatment Value: 5mM SA vs. No Treatment
  misc_feature: MA Experiment ID: 20000478 Result: Down-regulated in Transcription
  misc_feature: MA Experiment 20000478 PARAMETER Experiment Name: Zm_5mM_SA_P Parameter: Age (day) Value: 11
  misc_feature: MA Experiment 20000478 PARAMETER Experiment Name: Zm_5mM_SA_P Parameter: Organism Value: Zea mays
  misc_feature: MA Experiment 20000478 PARAMETER Experiment Name: Zm_5mM_SA_P Parameter: Plant Line Value: 35A19
  misc_feature: MA Experiment 20000478 PARAMETER Experiment Name: Zm_5mM_SA_P Parameter: Timepoint (hr) Value: 72
  misc_feature: MA Experiment 20000478 PARAMETER Experiment Name: Zm_5mM_SA_P Parameter: Tissue Value: Aerial
  misc_feature: MA Experiment 20000478 PARAMETER Experiment Name: Zm_5mM_SA_P Parameter: Treatment Value: 5mM SA vs. No Treatment
  misc_feature: MA Experiment ID: 20000479 Result: Down-regulated in Transcription
  misc_feature: MA Experiment 20000479 PARAMETER Experiment Name: Zm_Drought_P Parameter: Age (day) Value: 10
  misc_feature: MA Experiment 20000479 PARAMETER Experiment Name: Zm_Drought_P Parameter: Organism Value: Zea mays
  misc_feature: MA Experiment 20000479 PARAMETER Experiment Name: Zm_Drought_P Parameter: Plant Line Value: 35A19
  misc_feature: MA Experiment 20000479 PARAMETER Experiment Name: Zm_Drought_P Parameter: Timepoint (hr) Value: 48
  misc_feature: MA Experiment 20000479 PARAMETER Experiment Name: Zm_Drought_P Parameter: Tissue Value: Aerial
  misc_feature: MA Experiment 20000479 PARAMETER Experiment Name: Zm_Drought_P Parameter: Treatment Value: Drought vs. No Drought
  misc_feature: MA Experiment ID: 20000480 Result: Down-regulated in Transcription
  misc_feature: MA Experiment 20000480 PARAMETER Experiment Name: Zm_Drought_P Parameter: Age (day) Value: 11
  misc_feature: MA Experiment 20000480 PARAMETER Experiment Name: Zm_Drought_P Parameter: Organism Value: Zea mays
  misc_feature: MA Experiment 20000480 PARAMETER Experiment Name: Zm_Drought_P Parameter: Plant Line Value: 35A19
  misc_feature: MA Experiment 20000480 PARAMETER Experiment Name: Zm_Drought_P Parameter: Timepoint (hr) Value: 72
  misc_feature: MA Experiment 20000480 PARAMETER Experiment Name: Zm_Drought_P Parameter: Tissue Value: Aerial
  misc_feature: MA Experiment 20000480 PARAMETER Experiment Name: Zm_Drought_P Parameter: Treatment Value: Drought vs. No Drought
  misc_feature: MA Experiment ID: 20000492 Result: Down-regulated in Transcription
  misc_feature: MA Experiment 20000492 PARAMETER Experiment Name: Zm_Hybrid_Seed_Dev_P Parameter: DAP Value: 12
  misc_feature: MA Experiment 20000492 PARAMETER Experiment Name: Zm_Hybrid_Seed_Dev_P Parameter: Organism Value: Zea mays
  misc_feature: MA Experiment 20000492 PARAMETER Experiment Name: Zm_Hybrid_Seed_Dev_P Parameter: Plant Line Value: 35A19
  misc_feature: MA Experiment 20000492 PARAMETER Experiment Name: Zm_Hybrid_Seed_Dev_P Parameter: Tissue Value: Fert Kernel vs. Unfert Floret
  misc_feature: MA Experiment ID: 20000535 Result: Down-regulated in Transcription
  misc_feature: MA Experiment 20000535 PARAMETER Experiment Name: Zm_Hybrid_Seed_Dev_P Parameter: DAP Value: 30 vs. 12
  misc_feature: MA Experiment 20000535 PARAMETER Experiment Name: Zm_Hybrid_Seed_Dev_P Parameter: Organism Value: Zea mays
  misc_feature: MA Experiment 20000535 PARAMETER Experiment Name: Zm_Hybrid_Seed_Dev_P Parameter: Plant Line Value: 35A19
  misc_feature: MA Experiment 20000535 PARAMETER Experiment Name: Zm_Hybrid_Seed_Dev_P Parameter: Tissue Value: Embryo vs. Unfert Floret
  misc_feature: MA Experiment ID: 20000626 Result: Down-regulated in Transcription
  misc_feature: MA Experiment 20000626 PARAMETER Experiment Name: Zm_Herbicide-Treatments_P Parameter: Timepoint (hr) Value: 12
  misc_feature: MA Experiment 20000626 PARAMETER Experiment Name: Zm_Herbicide-Treatments_P Parameter: Tissue Value: Aerial
  misc_feature: MA Experiment 20000626 PARAMETER Experiment Name: Zm_Herbicide-Treatments_P Parameter: Treatment Value: Roundup vs. No Treatment
  misc_feature: MA Experiment ID: 20000632 Result: Down-regulated in Transcription
  misc_feature: MA Experiment 20000632 PARAMETER Experiment Name: Zm_Herbicide-Treatments_P Parameter: Timepoint (hr) Value: 4
  misc_feature: MA Experiment 20000632 PARAMETER Experiment Name: Zm_Herbicide-Treatments_P Parameter: Tissue Value: Aerial
  misc_feature: MA Experiment 20000632 PARAMETER Experiment Name: Zm_Herbicide-Treatments_P Parameter: Treatment Value: Glean vs. No Treatment
accgaaacgaaatcctcaaaccccaaacctctctcggaagttcctctcgcgtggccggtttcctcaacctccgtgtcggctcgatagtttcgcaagcgggcggggcgggggtctgagctcgatggccacttctggcgagcaatcggctggcggtgggtctgcggcgagggcgtcgaagctgcgctacccgctgcggtcggcgagcaaggggaaggccgcggccgttttctcggcggcggatgcgcctcccaccaccatatctgcaccgcgtcgggcaaaaccatcttcagatgtcagcaagagcatgtgtttaggcctttctgtgaaggataagtttgtcaagcctccacggaggcactcaatacaaaccaagccaggagctagcccaaggccaataccttctggaactgtgactccggtgtctggggttcggtcaaagagatcggacagccaggggaggtttgatactccgacatcagaagtgtccatgtccatgtcaaggcgcaagttcagcacgctttcttcaatctcgtactggatgacacagatcaggcttgcagaggctgcttccaaacactcagtttctctgggcttctttaagcttgctcttgaatcagaatgtgagcctttggaccggatgagggaagaactcaagtcctatgtagcccgccattgcctagcgacagaattggaggacccagtcaaggacattcttcaggtttatgatattgtggacgattttgagaagctgaagatctctgcagagccctcagagcaaccaaaaaagtctgacaaggctgctcgtactgtctccaatgtgtcagccaattgtgatctgaagccaaggtcactaaactctggtgctactgaaagtaaggaagctgggaagaaagagggcattcagaaagcgaaacctgatgcaagggtcagaggctccaataacaggaatccagtaaaatgcaccaccgcaaaggaagtagttgctaagaacactggtaagaaaaccaagaaagaggccaagggtcaggaggaagttagcaatggagatagcgatgcatcctcagcccttccagatcaggaatctgttgatgttgtgaaggagatcacccatgaagataaagagaacatgggcgacaatgaaatggctatggatgttgccatagcgcaaggtatctagaacagccggaccaacttcagattcaatcgttttttattgctgaagatgaagtattagtgtgtggttgcttattttggttttcattgttaatatgatagtagagcttgtctgtgtgattgctgaaccatatacgctcctgaagagtgagtgtgtcataagttgatgattgcctgtattcctttttcaagtttgcagctttgcatgtggt

SEQ ID NO: 10895 - protein, 391 aa, Zea mays subsp. mays
  peptide (1)..(391): Ceres Seq. ID no. 12374162
  misc_feature (40)..(385): Homolog of NCBI NO: 15241865 NR Description: unknown protein; protein id: At5g62550.1 thaliana] >gi|10178086|dbj|BAB11505.1| gene_id:K19B1.16~unknown
PKRNPQTPNLSRKFLSRGRFPQPPCRLDSFASGRGGGLSSMATSGEQSAGGGSAARASKLRYPLRSASKGKAAAVFSAADAPPTTISAPRRAKPSSDVSKSMCLGLSVKDKFVKPPRRHSIQTKPGASPRPIPSGTVTPVSGVRSKRSDSQGRFDTPTSEVSMSMSRRKFSTLSSISYWMTQIRLAEAASKHSVSLGFFKLALESECEPLDRMREELKSYVARHCLATELEDPVKDILQVYDIVDDFEKLKISAEPSEQPKKSDKAARTVSNVSANCDLKPRSLNSGATESKEAGKKEGIQKAKPDARVRGSNNRNPVKCTTAKEVVAKNTGKKTKKEAKGQEEVSNGDSDASSALPDQESVDVVKEITHEDKENMGDNEMAMDVAIAQGI

SEQ ID NO: 10896 - protein, 351 aa, Zea mays subsp. mays
  peptide (1)..(351): Ceres Seq. ID no. 12374163
  misc_feature (1)..(345): Homolog of NCBI NO: 15241865 NR Description: unknown protein; protein id: At5g62550.1 thaliana] >gi|10178086|dbj|BAB11505.1| gene_id:K19B1.16~unknown
MATSGEQSAGGGSAARASKLRYPLRSASKGKAAAVFSAADAPPTTISAPRRAKPSSDVSKSMCLGLSVKDKFVKPPRRHSIQTKPGASPRPIPSGTVTPVSGVRSKRSDSQGRFDTPTSEVSMSMSRRKFSTLSSISYWMTQIRLAEAASKHSVSLGFFKLALESECEPLDRMREELKSYVARHCLATELEDPVKDILQVYDIVDDFEKLKISAEPSEQPKKSDKAARTVSNVSANCDLKPRSLNSGATESKEAGKKEGIQKAKPDARVRGSNNRNPVKCTTAKEVVAKNTGKKTKKEAKGQEEVSNGDSDASSALPDQESVDVVKEITHEDKENMGDNEMAMDVAIAQGI

SEQ ID NO: 10897 - protein, 290 aa, Zea mays subsp. mays
  peptide (1)..(290): Ceres Seq. ID no. 12374164
  misc_feature (1)..(284): Homolog of NCBI NO: 15241865 NR Description: unknown protein; protein id: At5g62550.1 thaliana] >gi|10178086|dbj|BAB11505.1| gene_id:K19B1.16~unknown
MCLGLSVKDKFVKPPRRHSIQTKPGASPRPIPSGTVTPVSGVRSKRSDSQGRFDTPTSEVSMSMSRRKFSTLSSISYWMTQIRLAEAASKHSVSLGFFKLALESECEPLDRMREELKSYVARHCLATELEDPVKDILQVYDIVDDFEKLKISAEPSEQPKKSDKAARTVSNVSANCDLKPRSLNSGATESKEAGKKEGIQKAKPDARVRGSNNRNPVKCTTAKEVVAKNTGKKTKKEAKGQEEVSNGDSDASSALPDQESVDVVKEITHEDKENMGDNEMAMDVAIAQGI

SEQ ID NO: 10898 - DNA, 1635 bp, Zea mays subsp. mays
  misc_feature (1)..(1635): Ceres Seq. ID no. 12363343
  misc_feature: MA Experiment ID: 108504 Result: Up-regulated in Transcription
  misc_feature: MA Experiment 108504 PARAMETER Experiment Name: Zm_Drought_P Parameter: Age (day) Value: 8
  misc_feature: MA Experiment 108504 PARAMETER Experiment Name: Zm_Drought_P Parameter: Organism Value: Zea mays
  misc_feature: MA Experiment 108504 PARAMETER Experiment Name: Zm_Drought_P Parameter: Plant Line Value: 35A19
  misc_feature: MA Experiment 108504 PARAMETER Experiment Name: Zm_Drought_P Parameter: Timepoint (hr) Value: 12
  misc_feature: MA Experiment 108504 PARAMETER Experiment Name: Zm_Drought_P Parameter: Tissue Value: Aerial
  misc_feature: MA Experiment 108504 PARAMETER Experiment Name: Zm_Drought_P Parameter: Treatment Value: Drought vs. No Drought
  misc_feature: MA Experiment ID: 20000479 Result: Up-regulated in Transcription
  misc_feature: MA Experiment 20000479 PARAMETER Experiment Name: Zm_Drought_P Parameter: Age (day) Value: 10
  misc_feature: MA Experiment 20000479 PARAMETER Experiment Name: Zm_Drought_P Parameter: Organism Value: Zea mays
  misc_feature: MA Experiment 20000479 PARAMETER Experiment Name: Zm_Drought_P Parameter: Plant Line Value: 35A19
  misc_feature: MA Experiment 20000479 PARAMETER Experiment Name: Zm_Drought_P Parameter: Timepoint (hr) Value: 48
  misc_feature: MA Experiment 20000479 PARAMETER Experiment Name: Zm_Drought_P Parameter: Tissue Value: Aerial
  misc_feature: MA Experiment 20000479 PARAMETER Experiment Name: Zm_Drought_P Parameter: Treatment Value: Drought vs. No Drought
  misc_feature: MA Experiment ID: 20000480 Result: Up-regulated in Transcription
  misc_feature: MA Experiment 20000480 PARAMETER Experiment Name: Zm_Drought_P Parameter: Age (day) Value: 11
  misc_feature: MA Experiment 20000480 PARAMETER Experiment Name: Zm_Drought_P Parameter: Organism Value: Zea mays
  misc_feature: MA Experiment 20000480 PARAMETER Experiment Name: Zm_Drought_P Parameter: Plant Line Value: 35A19
  misc_feature: MA Experiment 20000480 PARAMETER Experiment Name: Zm_Drought_P Parameter: Timepoint (hr) Value: 72
  misc_feature: MA Experiment 20000480 PARAMETER Experiment Name: Zm_Drought_P Parameter: Tissue Value: Aerial
  misc_feature: MA Experiment 20000480 PARAMETER Experiment Name: Zm_Drought_P Parameter: Treatment Value: Drought vs. No Drought
  misc_feature: MA Experiment ID: 20000535 Result: Down-regulated in Transcription
  misc_feature: MA Experiment 20000535 PARAMETER Experiment Name: Zm_Hybrid_Seed_Dev_P Parameter: DAP Value: 30 vs. 12
  misc_feature: MA Experiment 20000535 PARAMETER Experiment Name: Zm_Hybrid_Seed_Dev_P Parameter: Organism Value: Zea mays
  misc_feature: MA Experiment 20000535 PARAMETER Experiment Name: Zm_Hybrid_Seed_Dev_P Parameter: Plant Line Value: 35A19
  misc_feature: MA Experiment 20000535 PARAMETER Experiment Name: Zm_Hybrid_Seed_Dev_P Parameter: Tissue Value: Embryo vs. Unfert Floret
gcacgagaccattacctagaacatcctaatcaaaaccccttcttccccgactcgcccggcgctgaataagattcccctgtattctgttccagagatgagctgatcgagcagcccgtcgccaagccaaccggacatggtgagcgacggcgcgcgcgggctgctgggcgcgtacgagctcgggcggacgctcggggagggcaacttcgggaaggtgaagcaggcgcggcaccgcggcagcggcgggcagtttgccgtgaagatcatggagcgcgccagggtgctgtcgcagcgcgcggacgagcagatatgccgcgagatcgccacgctcaagctgctcgcgcaccccaacgtcgtccgcctccacgaggtggctgccagcaagacgaagatctacatggtgcttgagctcgtcaacggcggcgagctgctggacaggattgcggccagtgagggaaagctcccggagcaggaggcaaggaggctcttccagcagctggttgatggtgtaagctactgccatgaaaagggcgtctgtcacagagacctcaagctggagaacgttcttgtcgaccggaagggaaacatcaagatctctgatttcgggctcagcgctttaccgcaacatctcgggaacgatgggttgctgcacacgacctgcggtagccccaactacattgcccctgaggttctgcagaacagagggtacgacgggtcgctatcggacatctggtcatgcggggtgattctctacgtgatgctcgtagggcacctcccgttcgacgaccggaacatcgtcgttctctaccagaagattttcaagggcgatgctcagatcccggagtggctctctcccggcgcacggaaccttctccggaggatccttgagccctacccggcggagcggatcgccatggcagagatcaaggcgcacccatggttccaggagcactacgtccctgtccttcctccgtacgacgacgacgacgattcagtgaagcaaatcggtgcgggtagtaaaaccactcatcacatcaacgcgtttcagttgatcggaatggcgtcgtccctagacctatcagggttttttgaggaagaggacgtgtcccaaaggaagatcaggttcacgtccgcacaaccgcctgaggatttgttcgccgagatcgaacgctctgcgactgacatgggcttccatgttcacagagggcatagtaagcttaggctgacgcgaaactgcgaccggtcgaagaatcagaagaaccctatgtcgtcgtcgtcgtcgtcgtttctagtctgcaccgaggtttttgagcttagcccctctttgtacgtcgtggagctcaacaagtcccatggcgaccctgcactgtacaggcagtgaggttacgagtcacctgatgagcaagttggtacctagaatctcaagtcccaggtcaagaacaggtaccacaggatgaggcgcatggaggatgctgcgatgtgttcgtgagaggtctagaacatcgtctcccagtcaactttgggttgttggatcgttgtctccttacgatgtaatttatttattttgttttgtacataactcctattatatagtaaagttgtaacattcgtttctgtaccatgattcatcatatgtgt

SEQ ID NO: 10899 - protein, 414 aa, Zea mays subsp. mays
  peptide (1)..(414): Ceres Seq. ID no. 12363344
  misc_feature (13)..(269): Pfam Name: Protein kinase domain Pfam Description: Protein kinase domain
  misc_feature (9)..(414): Homolog of NCBI NO: 34894358 NR Description: unnamed protein product [Oryza sativa (japonica group)] >gi|8468028|dbj|BAA96628.1| unnamed protein product
  misc_feature (10)..(414): Homolog of NCBI NO: 23237825 NR Description: putative serine/threonine kinase [Oryza sativa
  misc_feature (7)..(414): Homolog of NCBI NO: 18401539 NR Description: expressed protein; protein id: At3g17510.1, by cDNA: gi_11066951, supported by cDNA: gi_20260555 [Arabidopsis
  misc_feature (7)..(414): Homolog of NCBI NO: 20260556 NR Description: unknown protein [Arabidopsis thaliana]
  misc_feature (7)..(414): Homolog of NCBI NO: 9294138 NR Description: serine/threonine kinase [Arabidopsis thaliana]
  misc_feature (7)..(414): Homolog of NCBI NO: 11066952 NR Description: CBL-interacting protein kinase 1 [Arabidopsis
  misc_feature (70)..(414): Homolog of NCBI NO: 8778506 NR Description: F21D18.2 [Arabidopsis thaliana]
  misc_feature (1)..(102): Homolog of NCBI NO: 8778506 NR Description: F21D18.2 [Arabidopsis thaliana]
  misc_feature (1)..(414): Homolog of NCBI NO: 15221136 NR Description: serine threonine kinase, putative; protein id:
  misc_feature (1)..(414): Homolog of NCBI NO: 25387053 NR Description: hypothetical protein F11A17.18 [imported] - thaliana >gi|8778963|gb|AAD49770.2|AC007932_18 Similar to a serine/threonine kinase from Sorghum bicolor gb|Y12464. It
MVSDGARGLLGAYELGRTLGEGNFGKVKQARHRGSGGQFAVKIMERARVLSQRADEQICREIATLKLLAHPNVVRLHEVAASKTKIYMVLELVNGGELLDRIAASEGKLPEQEARRLFQQLVDGVSYCHEKGVCHRDLKLENVLVDRKGNIKISDFGLSALPQHLGNDGLLHTTCGSPNYIAPEVLQNRGYDGSLSDIWSCGVILYVMLVGHLPFDDRNIVVLYQKIFKGDAQIPEWLSPGARNLLRRILEPYPAERIAMAEIKAHPWFQEHYVPVLPPYDDDDDSVKQIGAGSKTTHHINAFQLIGMASSLDLSGFFEEEDVSQRKIRFTSAQPPEDLFAEIERSATDMGFHVHRGHSKLRLTRNCDRSKNQKNPMSSSSSSFLVCTEVFELSPSLYVVELNKSHGDPALYRQ

SEQ ID NO: 10900 - protein, 371 aa, Zea mays subsp. mays
  peptide (1)..(371): Ceres Seq. ID no. 12363345
  misc_feature (1)..(226): Pfam Name: Protein kinase domain Pfam Description: Protein kinase domain
  misc_feature (1)..(371): Homolog of NCBI NO: 34894358 NR Description: unnamed protein product [Oryza sativa (japonica group)] >gi|8468028|dbj|BAA96628.1| unnamed protein product
  misc_feature (1)..(371): Homolog of NCBI NO: 23237825 NR Description: putative serine/threonine kinase [Oryza sativa
  misc_feature (1)..(371): Homolog of NCBI NO: 18401539 NR Description: expressed protein; protein id: At3g17510.1, by cDNA: gi_11066951, supported by cDNA: gi_20260555 [Arabidopsis
  misc_feature (1)..(371): Homolog of NCBI NO: 20260556 NR Description: unknown protein [Arabidopsis thaliana]
  misc_feature (1)..(371): Homolog of NCBI NO: 9294138 NR Description: serine/threonine kinase [Arabidopsis thaliana]
  misc_feature (1)..(371): Homolog of NCBI NO: 11066952 NR Description: CBL-interacting protein kinase 1 [Arabidopsis
  misc_feature (27)..(371): Homolog of NCBI NO: 8778506 NR Description: F21D18.2 [Arabidopsis thaliana]
  misc_feature (1)..(59): Homolog of NCBI NO: 8778506 NR Description: F21D18.2 [Arabidopsis thaliana]
  misc_feature (1)..(371): Homolog of NCBI NO: 15221136 NR Description: serine threonine kinase, putative; protein id:
  misc_feature (1)..(371): Homolog of NCBI NO: 25387053 NR Description: hypothetical protein F11A17.18 [imported] - thaliana >gi|8778963|gb|AAD49770.2|AC007932_18 Similar to a serine/threonine kinase from Sorghum bicolor gb|Y12464. It
MERARVLSQRADEQICREIATLKLLAHPNVVRLHEVAASKTKIYMVLELVNGGELLDRIAASEGKLPEQEARRLFQQLVDGVSYCHEKGVCHRDLKLENVLVDRKGNIKISDFGLSALPQHLGNDGLLHTTCGSPNYIAPEVLQNRGYDGSLSDIWSCGVILYVMLVGHLPFDDRNIVVLYQKIFKGDAQIPEWLSPGARNLLRRILEPYPAERIAMAEIKAHPWFQEHYVPVLPPYDDDDDSVKQIGAGSKTTHHINAFQLIGMASSLDLSGFFEEEDVSQRKIRFTSAQPPEDLFAEIERSATDMGFHVHRGHSKLRLTRNCDRSKNQKNPMSSSSSSFLVCTEVFELSPSLYVVELNKSHGDPALYRQ

SEQ ID NO: 10901 - protein, 327 aa, Zea mays subsp. mays
  peptide (1)..(327): Ceres Seq. ID no. 12363346
  misc_feature (1)..(182): Pfam Name: Protein kinase domain Pfam Description: Protein kinase domain
  misc_feature (1)..(327): Homolog of NCBI NO: 15221136 NR Description: serine threonine kinase, putative; protein id:
  misc_feature (1)..(327): Homolog of NCBI NO: 34894358 NR Description: unnamed protein product [Oryza sativa (japonica group)] >gi|8468028|dbj|BAA96628.1| unnamed protein product
  misc_feature (1)..(327): Homolog of NCBI NO: 18401539 NR Description: expressed protein; protein id: At3g17510.1, by cDNA: gi_11066951, supported by cDNA: gi_20260555 [Arabidopsis
  misc_feature (1)..(327): Homolog of NCBI NO: 9294138 NR Description: serine/threonine kinase [Arabidopsis thaliana]
  misc_feature (1)..(327): Homolog of NCBI NO: 8778506 NR Description: F21D18.2 [Arabidopsis thaliana]
  misc_feature (1)..(15): Homolog of NCBI NO: 8778506 NR Description: F21D18.2 [Arabidopsis thaliana]
  misc_feature (1)..(327): Homolog of NCBI NO: 11066952 NR Description: CBL-interacting protein kinase 1 [Arabidopsis
  misc_feature (1)..(327): Homolog of NCBI NO: 20260556 NR Description: unknown protein [Arabidopsis thaliana]
  misc_feature (1)..(327): Homolog of NCBI NO: 23237825 NR Description: putative serine/threonine kinase [Oryza sativa
  misc_feature (1)..(327): Homolog of NCBI NO: 25387053 NR Description: hypothetical protein F11A17.18 [imported] - thaliana >gi|8778963|gb|AAD49770.2|AC007932_18 Similar to a serine/threonine kinase from Sorghum bicolor gb|Y12464. It
MVLELVNGGELLDRIAASEGKLPEQEARRLFQQLVDGVSYCHEKGVCHRDLKLENVLVDRKGNIKISDFGLSALPQHLGNDGLLHTTCGSPNYIAPEVLQNRGYDGSLSDIWSCGVILYVMLVGHLPFDDRNIVVLYQKIFKGDAQIPEWLSPGARNLLRRILEPYPAERIAMAEIKAHPWFQEHYVPVLPPYDDDDDSVKQIGAGSKTTHHINAFQLIGMASSLDLSGFFEEEDVSQRKIRFTSAQPPEDLFAEIERSATDMGFHVHRGHSKLRLTRNCDRSKNQKNPMSSSSSSFLVCTEVFELSPSLYVVELNKSHGDPALYRQ

SEQ ID NO: 10902 - DNA, 1272 bp, Zea mays subsp. mays
  misc_feature (1)..(1272): Ceres Seq. ID no. 12462451
  misc_feature: MA Experiment ID: 108543 Result: Up-regulated in Transcription
  misc_feature: MA Experiment ID: 108544 Result: Up-regulated in Transcription
  misc_feature: MA Experiment ID: 108559 Result: Down-regulated in Transcription
  misc_feature: MA Experiment 108559 PARAMETER Experiment Name: Zm_5mM_NO_P Parameter: Age (day) Value: 8
  misc_feature: MA Experiment 108559 PARAMETER Experiment Name: Zm_5mM_NO_P Parameter: Organism Value: Zea mays
  misc_feature: MA Experiment 108559 PARAMETER Experiment Name: Zm_5mM_NO_P Parameter: Plant Line Value: 35A19
  misc_feature: MA Experiment 108559 PARAMETER Experiment Name: Zm_5mM_NO_P Parameter: Timepoint (hr) Value: 12
  misc_feature: MA Experiment 108559 PARAMETER Experiment Name: Zm_5mM_NO_P Parameter: Tissue Value: Aerial
  misc_feature: MA Experiment 108559 PARAMETER Experiment Name: Zm_5mM_NO_P Parameter: Treatment Value: 5mM NO vs. No Treatment
aacgccctcgaacgcgccactttaccaccagtccccctcaccgccgcccgtctccgcctccgccgacaaccggagccagggccctcgccacccacccgattgagccaccccatgcctcctcccactgcgacgatgtcccccgcagctggcggttcctttcctgagctcacctgtcccgcggactttgccaccgtcgccgcccccggcggccgcttctccgtcgtcggcttcggatccctcctctccgagcggagcgcgaggagcacgttcccggagctggagggcttccgggtcgcggtgctgcgggggttccgtcgagtcttcgcccacgctgcccccatcttcttcgagcgcggcatcgccatcgaggccaccaaggaattctcaagcttgagcgtggagccatgcgacagtgaactgatagtagtcacggttttcgaaatcaaggaggaagaggtcccggcatttattgagagggaacatgagtttagatttcttgcggttgtccctgaaggattggatggggtaccttttacaaatcgagcagtaagtactctgcatttgaaatcataattttagttttgcctttgctctttgctgctgcttcccacaacaagaattatttttctttgtcttgttggtatttggtggttaggttgtctgtgcacgctacagcaatgaagaatatttccaagagagatgccgaggaagcaaggaaatatataacaagtactatggacggtacaatattgacaaaatatggagagatgatatcttaccatgtcgcttatacctcaggcattgtgttcttgctgcgaaaaatcttggagaaccagcatacagcaacttcttagaccacacctatcttggtgatcggaaaactacaataagggaatacttggccactaccgctgctggactcatggaagaggagcctcccgagtcgctaaaaagtcgctacggtggctgattcgatggctgactctcatatccaccacaggttgagctatcatgcgctcgcagtttatcatattaacagttactgaattaggatttagtagtagtgttccaggatgttcgaaataatgcatggtgctccgttgcagaagatctaggattctggtttgttcggcaggtggcgccaaaacatgtgatatgtgaccaaattgtgattgatgtgcatctataatttgcgactgtttgctacaacaacagaaattcagggccagacacccaaaaatgaggacaaaatgcatctttcccccctttttc

SEQ ID NO: 10903 - protein, 190 aa, Zea mays subsp. mays
  peptide (1)..(190): Ceres Seq. ID no. 12462452
  misc_feature (55)..(183): Homolog of NCBI NO: 30683505 NR Description: expressed protein [Arabidopsis thaliana]
  misc_feature (55)..(169): Homolog of NCBI NO: 7485175 NR Description: hypothetical protein - Arabidopsis thaliana hypothetical protein [Arabidopsis thaliana]
  misc_feature (80)..(183): Homolog of NCBI NO: 26452147 NR Description: unknown protein [Arabidopsis thaliana]
NALERATLPPVPLTAARLRLRRQPEPGPSPPTRLSHPMPPPTATMSPAAGGSFPELTCPADFATVAAPGGRFSVVGFGSLLSERSARSTFPELEGFRVAVLRGFRRVFAHAAPIFFERGIAIEATKEFSSLSVEPCDSELIVVTVFEIKEEEVPAFIEREHEFRFLAVVPEGLDGVPFTNRAVSTLHLKS

SEQ ID NO: 10904 - protein, 153 aa, Zea mays subsp. mays
  peptide (1)..(153): Ceres Seq. ID no. 12462453
  misc_feature (18)..(146): Homolog of NCBI NO: 30683505 NR Description: expressed protein [Arabidopsis thaliana]
  misc_feature (18)..(132): Homolog of NCBI NO: 7485175 NR Description: hypothetical protein - Arabidopsis thaliana hypothetical protein [Arabidopsis thaliana]
  misc_feature (43)..(146): Homolog of NCBI NO: 26452147 NR Description: unknown protein [Arabidopsis thaliana]
MPPPTATMSPAAGGSFPELTCPADFATVAAPGGRFSVVGFGSLLSERSARSTFPELEGFRVAVLRGFRRVFAHAAPIFFERGIAIEATKEFSSLSVEPCDSELIVVTVFEIKEEEVPAFIEREHEFRFLAVVPEGLDGVPFTNRAVSTLHLKS

SEQ ID NO: 10905 - protein, 146 aa, Zea mays subsp. mays
  peptide (1)..(146): Ceres Seq. ID no. 12462454
  misc_feature (11)..(139): Homolog of NCBI NO: 30683505 NR Description: expressed protein [Arabidopsis thaliana]
  misc_feature (11)..(125): Homolog of NCBI NO: 7485175 NR Description: hypothetical protein - Arabidopsis thaliana hypothetical protein [Arabidopsis thaliana]
  misc_feature (36)..(139): Homolog of NCBI NO: 26452147 NR Description: unknown protein [Arabidopsis thaliana]
MSPAAGGSFPELTCPADFATVAAPGGRFSVVGFGSLLSERSARSTFPELEGFRVAVLRGFRRVFAHAAPIFFERGIAIEATKEFSSLSVEPCDSELIVVTVFEIKEEEVPAFIEREHEFRFLAVVPEGLDGVPFTNRAVSTLHLKS

SEQ ID NO: 10906 - DNA, 1639 bp, Zea mays subsp. mays
  misc_feature (1)..(1639): Ceres Seq. ID no. 12412046
  misc_feature: MA Experiment ID: 108528 Result: Up-regulated in Transcription
  misc_feature: MA Experiment 108528 PARAMETER Experiment Name: Zm_Imbibed_Seeds_P Parameter: Age (day) Value: 5 vs. 2
  misc_feature: MA Experiment 108528 PARAMETER Experiment Name: Zm_Imbibed_Seeds_P Parameter: Organism Value: Zea mays
  misc_feature: MA Experiment 108528 PARAMETER Experiment Name: Zm_Imbibed_Seeds_P Parameter: Plant Line Value: 35A19
  misc_feature: MA Experiment 108528 PARAMETER Experiment Name: Zm_Imbibed_Seeds_P Parameter: Tissue Value: Aerial vs. Embryo
  misc_feature: MA Experiment ID: 108530 Result: Up-regulated in Transcription
  misc_feature: MA Experiment 108530 PARAMETER Experiment Name: Zm_Imbibed_Seeds_P Parameter: Age (day) Value: 6 vs. 2
  misc_feature: MA Experiment 108530 PARAMETER Experiment Name: Zm_Imbibed_Seeds_P Parameter: Organism Value: Zea mays
  misc_feature: MA Experiment 108530 PARAMETER Experiment Name: Zm_Imbibed_Seeds_P Parameter: Plant Line Value: 35A19
  misc_feature: MA Experiment 108530 PARAMETER Experiment Name: Zm_Imbibed_Seeds_P Parameter: Tissue Value: Aerial vs. Embryo
  misc_feature: MA Experiment ID: 108543 Result: Down-regulated in Transcription
  misc_feature: MA Experiment ID: 108545 Result: Up-regulated in Transcription
  misc_feature: MA Experiment 108545 PARAMETER Experiment Name: Zm_Imbibed_Seeds_P Parameter: Age (day) Value: 3 vs. 2
  misc_feature: MA Experiment 108545 PARAMETER Experiment Name: Zm_Imbibed_Seeds_P Parameter: Organism Value: Zea mays
  misc_feature: MA Experiment 108545 PARAMETER Experiment Name: Zm_Imbibed_Seeds_P Parameter: Plant Line Value: 35A19
  misc_feature: MA Experiment 108545 PARAMETER Experiment Name: Zm_Imbibed_Seeds_P Parameter: Tissue Value: Aerial vs. Embryo
  misc_feature: MA Experiment ID: 108547 Result: Up-regulated in Transcription
  misc_feature: MA Experiment 108547 PARAMETER Experiment Name: Zm_Imbibed_Seeds_P Parameter: Age (day) Value: 4 vs. 2
  misc_feature: MA Experiment 108547 PARAMETER Experiment Name: Zm_Imbibed_Seeds_P Parameter: Organism Value: Zea mays
  misc_feature: MA Experiment 108547 PARAMETER Experiment Name: Zm_Imbibed_Seeds_P Parameter: Plant Line Value: 35A19
  misc_feature: MA Experiment 108547 PARAMETER Experiment Name: Zm_Imbibed_Seeds_P Parameter: Tissue Value: Aerial vs. Embryo
agctttgcgtctgtggccaaccaggcgcctccctggctccctcccaccacccggctctccacgccgccgccgccgccgccgccacaagcgaccgcgcatccgctcttctccctcccttcgctctcggcggccggcgatgggggagaccgtacgggcgggcgacgttgcaatcacgactcacgagatggagagccacaacccatcgcactctcagatcgccgaagtgacgatggacatcgcagcgtcagcttctggagcggcagggagcaagttctgcaagggcgcagcctgcgacttctccgacgccagcaactcctcgaaggacgccagggagaggtcggcgtcgatgaggaagctgatagtcgcggtggtcctctgcgtcgtattcatggcggtggaggtggtggggggcatcaaggcgaacagcctggccatcctgaccgacgcggcgcacctcctgtcggacgtggcggcgttcgccatctcgctgttctcgctctgggccgccgggtgggaggcgacgccgcggcagtcgtacgggttcttccgggtggagatcctcggcgccctcgtctccatccagctcatctggctgctcgccggcatactggtgtacgaggccgtcgtgaggctcgtcggcgagagcggcgacgtgcgggggtcgctcatgttcgccgtgtcggcgttcgggctggccgtcaacgttctcatggccgtgttgctgggccatgaccacgggcacggccacggccatggacatggacattcgcatgaccatggccacggccatggggattcggacgatggccattcccaccacgacgacgaggagcaagaacagggccgtgtccatcaccacgagcacggccatggaggcgctatcactgtcacaacccaccaccaccaccatcatcacgatcacgatgttgaggaggcgctgatcaagcatgagggtacccagtctgctggcagagctggtaagaagcctcggcggaacatcaacgtgcacagcgcatacctccacgtgctcggggactccgtccagagcgtcggggtcatggtgggcggggcgatcatctggtacaagccggagtggaaggtcatcgacctcatctgcacgctcgtcttctcggtggtggtgctgttcaccacgatccggatgctgcgcagcatcctcgaagtgttgatggagagcacgccccgcgaggtcgacgccaccaggctggagagcgggctctgcgggatggagggcgtggtggccgtccacgagctgcacatctgggccatcacggtgggcaaggtgctgctggcgtgccatgtgaccatcgccagggatgcggacgctgatgagatccttgacaaggtgatcgggtacatcaagacggagtacaacatcagccatgtgaccatccaggtcgagcgcgagtagggagctctgtctttggctgctgtcttgggcataaatggctggcgccattcgagctctggtgtgctcggtggtgttgtctattgctagtctattaggcaggcgggggaattgtttgcgtcgaggtggtggtggtggtcgtcagtaagtcagtcggtgcataaacaaggatgtaattttcggtaatgctattgacagcatcgtggttcattg

SEQ ID NO: 10907 - protein, 475 aa, Zea mays subsp. mays
  peptide (1)..(475): Ceres Seq. ID no. 12412047
  misc_feature (119)..(474): Pfam Name: Cation efflux family Pfam Description: Cation efflux family
  misc_feature (62)..(475): Homolog of NCBI NO: 30420736 NR Description: zinc transporter [Oryza sativa (japonica
  misc_feature (62)..(474): Homolog of NCBI NO: 15226441 NR Description: putative zinc transporter; protein id: supported by cDNA: 207558., supported by cDNA: gi_4206639
  misc_feature (62)..(278): Homolog of NCBI NO: 15231581 NR Description: zinc transporter -like protein; protein id:
  misc_feature (257)..(475): Homolog of NCBI NO: 15231581 NR Description: zinc transporter -like protein; protein id:
  misc_feature (62)..(475): Homolog of NCBI NO: 16550925 NR Description: zinc transporter [Eucalyptus grandis]
  misc_feature (62)..(474): Homolog of NCBI NO: 40287446 NR Description: heavy metal transporter MTP1 [Arabis shortii]
  misc_feature (62)..(474): Homolog of NCBI NO: 40287442 NR Description: heavy metal transporter MTP1 [Thlaspi arvense]
  misc_feature (62)..(474): Homolog of NCBI NO: 4206640 NR Description: zinc transporter ZAT [Arabidopsis thaliana]
  misc_feature (68)..(474): Homolog of NCBI NO: 39919138 NR Description: zinc transporter CDF1-3 [Arabidopsis halleri
  misc_feature (68)..(262): Homolog of NCBI NO: 28315880 NR Description: putative vacuolar metal-ion transport protein
ALRLWPTRRLPGSLPPPGSPRRRRRRRHKRPRIRSSPSLRSRRPAMGETVRAGDVAITTHEMESHNPSHSQIAEVTMDIAASASGAAGSKFCKGAACDFSDASNSSKDARERSASMRKLIVAVVLCVVFMAVEVVGGIKANSLAILTDAAHLLSDVAAFAISLFSLWAAGWEATPRQSYGFFRVEILGALVSIQLIWLLAGILVYEAVVRLVGESGDVRGSLMFAVSAFGLAVNVLMAVLLGHDHGHGHGHGHGHSHDHGHGHGDSDDGHSHHDDEEQEQGRVHHHEHGHGGAITVTTHHHHHHHDHDVEEALIKHEGTQSAGRAGKKPRRNINVHSAYLHVLGDSVQSVGVMVGGAIIWYKPEWKVIDLICTLVFSVVVLFTTIRMLRSILEVLMESTPREVDATRLESGLCGMEGVVAVHELHIWAITVGKVLLACHVTIARDADADEILDKVIGYIKTEYNISHVTIQVERE

SEQ ID NO: 10908 - protein, 430 aa, Zea mays subsp. mays
  peptide (1)..(430): Ceres Seq. ID no. 12412048
  misc_feature (74)..(429): Pfam Name: Cation efflux family Pfam Description: Cation efflux family
  misc_feature (17)..(430): Homolog of NCBI NO: 30420736 NR Description: zinc transporter [Oryza sativa (japonica
  misc_feature (17)..(429): Homolog of NCBI NO: 15226441 NR Description: putative zinc transporter; protein id: supported by cDNA: 207558., supported by cDNA: gi_4206639
  misc_feature (17)..(233): Homolog of NCBI NO: 15231581 NR Description: zinc transporter -like protein; protein id:
  misc_feature (212)..(430): Homolog of NCBI NO: 15231581 NR Description: zinc transporter -like protein; protein id:
  misc_feature (17)..(430): Homolog of NCBI NO: 16550925 NR Description: zinc transporter [Eucalyptus grandis]
  misc_feature (17)..(429): Homolog of NCBI NO: 40287446 NR Description: heavy metal transporter MTP1 [Arabis shortii]
  misc_feature (17)..(429): Homolog of NCBI NO: 40287442 NR Description: heavy metal transporter MTP1 [Thlaspi arvense]
  misc_feature (17)..(429): Homolog of NCBI NO: 4206640 NR Description: zinc transporter ZAT [Arabidopsis thaliana]
  misc_feature (23)..(429): Homolog of NCBI NO: 39919138 NR Description: zinc transporter CDF1-3 [Arabidopsis halleri
  misc_feature (23)..(217): Homolog of NCBI NO: 28315880 NR Description: putative vacuolar metal-ion transport protein
MGETVRAGDVAITTHEMESHNPSHSQIAEVTMDIAASASGAAGSKFCKGAACDFSDASNSSKDARERSASMRKLIVAVVLCVVFMAVEVVGGIKANSLAILTDAAHLLSDVAAFAISLFSLWAAGWEATPRQSYGFFRVEILGALVSIQLIWLLAGILVYEAVVRLVGESGDVRGSLMFAVSAFGLAVNVLMAVLLGHDHGHGHGHGHGHSHDHGHGHGDSDDGHSHHDDEEQEQGRVHHHEHGHGGAITVTTHHHHHHHDHDVEEALIKHEGTQSAGRAGKKPRRNINVHSAYLHVLGDSVQSVGVMVGGAIIWYKPEWKVIDLICTLVFSVVVLFTTIRMLRSILEVLMESTPREVDATRLESGLCGMEGVVAVHELHIWAITVGKVLLACHVTIARDADADEILDKVIGYIKTEYNISHVTIQVERE

SEQ ID NO: 10909 - protein, 414 aa, Zea mays subsp. mays
  peptide (1)..(414): Ceres Seq. ID no. 12412049
  misc_feature (58)..(413): Pfam Name: Cation efflux family Pfam Description: Cation efflux family
  misc_feature (1)..(414): Homolog of NCBI NO: 30420736 NR Description: zinc transporter [Oryza sativa (japonica
  misc_feature (1)..(413): Homolog of NCBI NO: 15226441 NR Description: putative zinc transporter; protein id: supported by cDNA: 207558., supported by cDNA: gi_4206639
  misc_feature (1)..(217): Homolog of NCBI NO: 15231581 NR Description: zinc transporter -like protein; protein id:
  misc_feature (196)..(414): Homolog of NCBI NO: 15231581 NR Description: zinc transporter -like protein; protein id:
  misc_feature (1)..(414): Homolog of NCBI NO: 16550925 NR Description: zinc transporter [Eucalyptus grandis]
  misc_feature (1)..(413): Homolog of NCBI NO: 40287446 NR Description: heavy metal transporter MTP1 [Arabis shortii]
  misc_feature (1)..(413): Homolog of NCBI NO: 40287442 NR Description: heavy metal transporter MTP1 [Thlaspi arvense]
  misc_feature (1)..(413): Homolog of NCBI NO: 4206640 NR Description: zinc transporter ZAT [Arabidopsis thaliana]
  misc_feature (7)..(413): Homolog of NCBI NO: 39919138 NR Description: zinc transporter CDF1-3 [Arabidopsis halleri
  misc_feature (7)..(201): Homolog of NCBI NO: 28315880 NR Description: putative vacuolar metal-ion transport protein
MESHNPSHSQIAEVTMDIAASASGAAGSKFCKGAACDFSDASNSSKDARERSASMRKLIVAVVLCVVFMAVEVVGGIKANSLAILTDAAHLLSDVAAFAISLFSLWAAGWEATPRQSYGFFRVEILGALVSIQLIWLLAGILVYEAVVRLVGESGDVRGSLMFAVSAFGLAVNVLMAVLLGHDHGHGHGHGHGHSHDHGHGHGDSDDGHSHHDDEEQEQGRVHHHEHGHGGAITVTTHHHHHHHDHDVEEALIKHEGTQSAGRAGKKPRRNINVHSAYLHVLGDSVQSVGVMVGGAIIWYKPEWKVIDLICTLVFSVVVLFTTIRMLRSILEVLMESTPREVDATRLESGLCGMEGVVAVHELHIWAITVGKVLLACHVTIARDADADEILDKVIGYIKTEYNISHVTIQVERE

SEQ ID NO: 10910 - DNA, 948 bp, Zea mays subsp. mays
  misc_feature (1)..(948): Ceres Seq. ID no. 12344862
  misc_feature: MA Experiment ID: 20000477 Result: Down-regulated in Transcription
  misc_feature: MA Experiment 20000477 PARAMETER Experiment Name: Zm_5mM_SA_P Parameter: Age (day) Value: 10
  misc_feature: MA Experiment 20000477 PARAMETER Experiment Name: Zm_5mM_SA_P Parameter: Organism Value: Zea mays
  misc_feature: MA Experiment 20000477 PARAMETER Experiment Name: Zm_5mM_SA_P Parameter: Plant Line Value: 35A19
  misc_feature: MA Experiment 20000477 PARAMETER Experiment Name: Zm_5mM_SA_P Parameter: Timepoint (hr) Value: 48
  misc_feature: MA Experiment 20000477 PARAMETER Experiment Name: Zm_5mM_SA_P Parameter: Tissue Value: Aerial
  misc_feature: MA Experiment 20000477 PARAMETER Experiment Name: Zm_5mM_SA_P Parameter: Treatment Value: 5mM SA vs. No Treatment
  misc_feature: MA Experiment ID: 20000478 Result: Down-regulated in Transcription
  misc_feature: MA Experiment 20000478 PARAMETER Experiment Name: Zm_5mM_SA_P Parameter: Age (day) Value: 11
  misc_feature: MA Experiment 20000478 PARAMETER Experiment Name: Zm_5mM_SA_P Parameter: Organism Value: Zea mays
  misc_feature: MA Experiment 20000478 PARAMETER Experiment Name: Zm_5mM_SA_P Parameter: Plant Line Value: 35A19
  misc_feature: MA Experiment 20000478 PARAMETER Experiment Name: Zm_5mM_SA_P Parameter: Timepoint (hr) Value: 72
  misc_feature: MA Experiment 20000478 PARAMETER Experiment Name: Zm_5mM_SA_P Parameter: Tissue Value: Aerial
  misc_feature: MA Experiment 20000478 PARAMETER Experiment Name: Zm_5mM_SA_P Parameter: Treatment Value: 5mM SA vs. No Treatment
  misc_feature: MA Experiment ID: 20000492 Result: Down-regulated in Transcription
  misc_feature: MA Experiment 20000492 PARAMETER Experiment Name: Zm_Hybrid_Seed_Dev_P Parameter: DAP Value: 12
  misc_feature: MA Experiment 20000492 PARAMETER Experiment Name: Zm_Hybrid_Seed_Dev_P Parameter: Organism Value: Zea mays
  misc_feature: MA Experiment 20000492 PARAMETER Experiment Name: Zm_Hybrid_Seed_Dev_P Parameter: Plant Line Value: 35A19
  misc_feature: MA Experiment 20000492 PARAMETER Experiment Name: Zm_Hybrid_Seed_Dev_P Parameter: Tissue Value: Fert Kernel vs. Unfert Floret
  misc_feature: MA Experiment ID: 20000629 Result: Up-regulated in Transcription
  misc_feature: MA Experiment 20000629 PARAMETER Experiment Name: Zm_Herbicide-Treatments_P Parameter: Timepoint (hr) Value: 12
  misc_feature: MA Experiment 20000629 PARAMETER Experiment Name: Zm_Herbicide-Treatments_P Parameter: Tissue Value: Aerial
  misc_feature: MA Experiment 20000629 PARAMETER Experiment Name: Zm_Herbicide-Treatments_P Parameter: Treatment Value: Trimec vs. No Treatment
atattagtggcatttccctttcttcactggttcacccggcatactctcactcactctctccctcggtccctcctcgtcgttctcccgtgtccgccgtgcactgtctgtctctggtggcggcgactgggcggcctccgccgctgccctacgccaggatcccaggctgcatcttccgtacgccaggagggcctcgccgcaggttgggtgggaggcagagatgagccgggggcggtcgccggagccgctggatttcttcatctggactgtgcaggatgtagggttatggttggaggaaataaatcttggaagctaccgccaggcttttgaagaaaatggtgtcaatggagagtatctagaaagcctgtcggtgttcaccactgagcagattctccgctttataagacgatgccatatgaaatggggagattttatcaccctctgtaaagagttgagacgcatcaaagttgcctgcctgaaaggggagcaggaggtccgcaggccgtggtgggcgccgtcatgcctgtcggtcgtgttcacgcgggtggccaggcacaaccggcagtcccgggtcgtctccttgaagctggaagcttagcaagttagcaggctcgccctcagccagtggaactggcagagtcccgcgtcgtctcctgatgccggaagcttagtagcaggctcgccgtcagccaccttgcctcgcgcgctgccatccccgtcgttccagtgccgtagggcacacaaggggcgcctctctctgtgtaccatatagcaagcaatgggtctcagtgttcttgaaaggtgctctcgcgttacagtcgtcgtgtgttggcatgcgtgtgttttcgttgatttgtttattttcttcacgtataggggttgtgggtttgagttcgagatggtaagatgttgtactgtagacgatgaatatacgtatgctttgcgtgttgt

SEQ ID NO: 10911 - protein, 125 aa, Zea mays subsp. mays
  peptide (1)..(125): Ceres Seq. ID no. 12344863
  misc_feature (13)..(42): Pfam Name: SAM domain (Sterile alpha motif) Pfam Description: SAM domain (Sterile alpha motif)
  misc_feature (1)..(125): Homolog of NCBI NO: 6466959 NR Description: unknown protein [Arabidopsis thaliana]
  misc_feature (1)..(125): Homolog of NCBI NO: 18398048 NR Description: auxin-regulated protein; protein id: At3g07760.2, by cDNA: 7246., supported by cDNA: gi_15451021, supported by gi_16226486, supported by cDNA: gi_17978802 [Arabidopsis
MSRGRSPEPLDFFIWTVQDVGLWLEEINLGSYRQAFEENGVNGEYLESLSVFTTEQILRFIRRCHMKWGDFITLCKELRRIKVACLKGEQEVRRPWWAPSCLSVVFTRVARHNRQSRVVSLKLEA

SEQ ID NO: 10912 - protein, 108 aa, Zea mays subsp. mays
  peptide (1)..(108): Ceres Seq. ID no. 12344864
ILVAFPFLHWFTRHTLTHSLPRSLLVVLPCPPCTVCLWWRRLGGLRRCPTPGSQAASSVRQEGLAAGWVGGRDEPGAVAGAAGFLHLDCAGCRVMVGGNKSWKLPPGF

SEQ ID NO: 10913 - protein, 72 aa, Zea mays subsp. mays
  peptide (1)..(72): Ceres Seq. ID no. 12344865
ISGISLSSLVHPAYSHSLSPSVPPRRSPVSAVHCLSLVAATGRPPPLPYARIPGCIFRTPGGPRRRLGGRQR

SEQ ID NO: 10914 - DNA, 1466 bp, Zea mays subsp. mays
  misc_feature (1)..(1466): Ceres Seq. ID no. 12412035
  misc_feature: MA Experiment ID: 108522 Result: Down-regulated in Transcription
  misc_feature: MA Experiment 108522 PARAMETER Experiment Name: Zm_42deg_Heat_P Parameter: Age (day) Value: 8
  misc_feature: MA Experiment 108522 PARAMETER Experiment Name: Zm_42deg_Heat_P Parameter: Organism Value: Zea mays
  misc_feature: MA Experiment 108522 PARAMETER Experiment Name: Zm_42deg_Heat_P Parameter: Plant Line Value: 35A19
  misc_feature: MA Experiment 108522 PARAMETER Experiment Name: Zm_42deg_Heat_P Parameter: Temperature (deg C) Value: 42 vs. 22
  misc_feature: MA Experiment 108522 PARAMETER Experiment Name: Zm_42deg_Heat_P Parameter: Timepoint (hr) Value: 1
  misc_feature: MA Experiment 108522 PARAMETER Experiment Name: Zm_42deg_Heat_P Parameter: Tissue Value: Aerial
  misc_feature: MA Experiment ID: 108529 Result: Up-regulated in Transcription
  misc_feature: MA Experiment 108529 PARAMETER Experiment Name: Zm_Imbibed_Seeds_P Parameter: Age (day) Value: 5 vs. 2
  misc_feature: MA Experiment 108529 PARAMETER Experiment Name: Zm_Imbibed_Seeds_P Parameter: Organism Value: Zea mays
  misc_feature: MA Experiment 108529 PARAMETER Experiment Name: Zm_Imbibed_Seeds_P Parameter: Plant Line Value: 35A19
  misc_feature: MA Experiment 108529 PARAMETER Experiment Name: Zm_Imbibed_Seeds_P Parameter: Tissue Value: Roots vs. Embryo
  misc_feature: MA Experiment ID: 108545 Result: Down-regulated in Transcription
  misc_feature: MA Experiment 108545 PARAMETER Experiment Name: Zm_Imbibed_Seeds_P Parameter: Age (day) Value: 3 vs. 2
  misc_feature: MA Experiment 108545 PARAMETER Experiment Name: Zm_Imbibed_Seeds_P Parameter: Organism Value: Zea mays
  misc_feature: MA Experiment 108545 PARAMETER Experiment Name: Zm_Imbibed_Seeds_P Parameter: Plant Line Value: 35A19
  misc_feature: MA Experiment 108545 PARAMETER Experiment Name: Zm_Imbibed_Seeds_P Parameter: Tissue Value: Aerial vs. Embryo
  misc_feature: MA Experiment ID: 108547 Result: Down-regulated in Transcription
  misc_feature: MA Experiment 108547 PARAMETER Experiment Name: Zm_Imbibed_Seeds_P Parameter: Age (day) Value: 4 vs. 2
  misc_feature: MA Experiment 108547 PARAMETER Experiment Name: Zm_Imbibed_Seeds_P Parameter: Organism Value: Zea mays
  misc_feature: MA Experiment 108547 PARAMETER Experiment Name: Zm_Imbibed_Seeds_P Parameter: Plant Line Value: 35A19
  misc_feature: MA Experiment 108547 PARAMETER Experiment Name: Zm_Imbibed_Seeds_P Parameter: Tissue Value: Aerial vs. Embryo
  misc_feature: MA Experiment ID: 108688 Result: Down-regulated in Transcription
  misc_feature: MA Experiment 108688 PARAMETER Experiment Name: Zm_Embryos-Flowers__P Parameter: Tissue Value: Immature Flowers vs. Aerial+
  misc_feature: MA Experiment ID: 20000108 Result: Down-regulated in Transcription
  misc_feature: MA Experiment 20000108 PARAMETER Experiment Name: Zm_Root-Tips_P Parameter: Age (day) Value: 12
  misc_feature: MA Experiment 20000108 PARAMETER Experiment Name: Zm_Root-Tips_P Parameter: Organism Value: Zea mays
  misc_feature: MA Experiment 20000108 PARAMETER Experiment Name: Zm_Root-Tips_P Parameter: Tissue Value: Root tips vs. Root mid region    35
  misc_feature: MA Experiment 20000108 PARAMETER Experiment Name: Zm_Root-Tips_P Parameter: Tissue Value: Root tips vs. Root mid region   Sequence Listing-Misc Features (4)
  misc_feature: MA Experiment ID: 20000487 Result: Down-regulated in Transcription
  misc_feature: MA Experiment 20000487 PARAMETER Experiment Name: Zm_50mM_NH4NO3_L_to_H_P Parameter: Organism Value: Zea mays
  misc_feature: MA Experiment 20000487 PARAMETER Experiment Name: Zm_50mM_NH4NO3_L_to_H_P Parameter: Timepoint (hr) Value: 4
  misc_feature: MA Experiment 20000487 PARAMETER Experiment Name: Zm_50mM_NH4NO3_L_to_H_P Parameter: Tissue Value: Leaves
  misc_feature: MA Experiment 20000487 PARAMETER Experiment Name: Zm_50mM_NH4NO3_L_to_H_P Parameter: Treatment Value: 50mM NH4NO3 vs. 100mM Mannitol
  misc_feature: MA Experiment ID: 20000488 Result: Down-regulated in Transcription
  misc_feature: MA Experiment 20000488 PARAMETER Experiment Name: Zm_50mM_NH4NO3_L_to_H_P Parameter: Organism Value: Zea mays
  misc_feature: MA Experiment 20000488 PARAMETER Experiment Name: Zm_50mM_NH4NO3_L_to_H_P Parameter: Timepoint (hr) Value: 8
  misc_feature: MA Experiment 20000488 PARAMETER Experiment Name: Zm_50mM_NH4NO3_L_to_H_P Parameter: Tissue Value: Leaves
  misc_feature: MA Experiment 20000488 PARAMETER Experiment Name: Zm_50mM_NH4NO3_L_to_H_P Parameter: Treatment Value: 50mM NH4NO3 vs. 100mM Mannitol
  misc_feature: MA Experiment ID: 20000535 Result: Down-regulated in Transcription
  misc_feature: MA Experiment 20000535 PARAMETER Experiment Name: Zm_Hybrid_Seed_Dev_P Parameter: DAP Value: 30 vs. 12
  misc_feature: MA Experiment 20000535 PARAMETER Experiment Name: Zm_Hybrid_Seed_Dev_P Parameter: Organism Value: Zea mays
  misc_feature: MA Experiment 20000535 PARAMETER Experiment Name: Zm_Hybrid_Seed_Dev_P Parameter: Plant Line Value: 35A19
  misc_feature: MA Experiment 20000535 PARAMETER Experiment Name: Zm_Hybrid_Seed_Dev_P Parameter: Tissue Value: Embryo vs. Unfert Floret
  misc_feature: MA Experiment ID: 20000632 Result: Up-regulated in Transcription
  misc_feature: MA Experiment 20000632 PARAMETER Experiment Name: Zm_Herbicide-Treatments_P Parameter: Timepoint (hr) Value: 4
  misc_feature: MA Experiment 20000632 PARAMETER Experiment Name: Zm_Herbicide-Treatments_P Parameter: Tissue Value: Aerial
  misc_feature: MA Experiment 20000632 PARAMETER Experiment Name: Zm_Herbicide-Treatments_P Parameter: Treatment Value: Glean vs. No Treatment
  misc_feature: MA Experiment ID: 20000633 Result: Up-regulated in Transcription
  misc_feature: MA Experiment 20000633 PARAMETER Experiment Name: Zm_Herbicide-Treatments_P Parameter: Timepoint (hr) Value: 4
  misc_feature: MA Experiment 20000633 PARAMETER Experiment Name: Zm_Herbicide-Treatments_P Parameter: Tissue Value: Aerial
  misc_feature: MA Experiment 20000633 PARAMETER Experiment Name: Zm_Herbicide-Treatments_P Parameter: Treatment Value: Trimec vs. No Treatment
  misc_feature: MA Experiment ID: 20001608 Result: Down-regulated in Transcription
  misc_feature: MA Experiment 20001608 PARAMETER Experiment Name: Zm_50ppm_KNO3_L-to-H_P Parameter: Age (day) Value: 21
  misc_feature: MA Experiment 20001608 PARAMETER Experiment Name: Zm_50ppm_KNO3_L-to-H_P Parameter: Organism Value: Zea mays
  misc_feature: MA Experiment 20001608 PARAMETER Experiment Name: Zm_50ppm_KNO3_L-to-H_P Parameter: Plant Line Value: 35A19
  misc_feature: MA Experiment 20001608 PARAMETER Experiment Name: Zm_50ppm_KNO3_L-to-H_P Parameter: Timepoint (hr) Value: 48
  misc_feature: MA Experiment 20001608 PARAMETER Experiment Name: Zm_50ppm_KNO3_L-to-H_P Parameter: Tissue Value: Shoots
  misc_feature: MA Experiment 20001608 PARAMETER Experiment Name: Zm_50ppm_KNO3_L-to-H_P Parameter: Treatment Value: 50ppm KNO3 vs. 50ppm KCl
gatccagcaatacccgacgcgcaagccagtgccgcgcccagatctccgcgacagatcagtcgttcgtccagctaactgcactgcacgcaatggccaccacggcgaccaagacgactgcaccggcgcaggagcagcaggccaacggcaacggcaacggcgagcagaagacgcgccactccgaggtcggccacaagagcctgctcaagagcgacgacctctaccagtacatcctggacacgagcgtgtacccgcgggagccggagagcatgaaggagctgcgcgagatcaccgccaagcacccatggaacctgatgaccacctccgccgacgagggccagttcctcaacatgctcatcaagctcatcggcgccaagaagaccatggagatcggcgtctacaccggctactcgctcctcgccaccgcgctcgcactcccggaggacggcacgatcttggccatggacatcaaccgcgagaactacgagctaggcctgccctgcatcaacaaggccggcgtgggccacaagatcgacttccgcgagggccccgcgctccccgtcctggacgacctcgtggcggacaaggagcagcacgggtcgttcgacttcgccttcgtggacgccgacaaggacaactacctcagctaccacgagcggctcctgaagctggtgaggcccggcggcctcatcggctacgacaacacgctgtggaacggctccgtcgtgctccccgacgacgcgcccatgcgcaagtacatccgcttctaccgcgacttcgtgctcgccctcaacagcgcgctcgccgccgacgaccgcgtcgagatctgccagctccccgtcggcgacggcgtcacgctctgccgccgcgtcaagtgaaaaaaaaaacacacatactccctccggtgcagtaaaagaagtcatcctgcgcgtgagcgagagtgcacaaaagaagtcgtagcgcacgtgggtctgggatttttgacgtcgctgcccctgagtaattgcatcgggaaaaaaaaaagctgcgctcaagggaaatcgagcttgagacctccaatctagaatgcctcgggaggtactgcaacaaccaatcgaacttgattgttttggtgatgttaatgcactcatatccctatttaataagggcaaacatagaaaactccatgataattaatcactccttggtatgcacaatcatgtcctaaacgactacctttactgcaccggagggagtaccctgcgttcctgccccggctgtctggcccccactgccaccgacggcgccgcaccccccgttccaatcatatcgtagacgacgcgcagcattaaattatcaatcaccggctctggctctttcttggccctgtactgtactgatgttccttcttgtttttttttcttgggaattgtcgccgtttcagtatacgtaaaatctcgaggtcgataatacagtaatactaccaattt

SEQ ID NO: 10915 - protein, 302 aa, Zea mays subsp. mays
  peptide (1)..(302): Ceres Seq. ID no. 12412036
IQQYPTRKPVPRPDLRDRSVVRPANCTARNGHHGDQDDCTGAGAAGQRQRQRRAEDAPLRGRPQEPAQERRPLPVHPGHERVPAGAGEHEGAARDHRQAPMEPDDHLRRRGPVPQHAHQAHRRQEDHGDRRLHRLLAPRHRARTPGGRHDLGHGHQPRELRARPALHQQGRRGPQDRLPRGPRAPRPGRPRGGQGAARVVRLRLRGRRQGQLPQLPRAAPEAGEARRPHRLRQHAVERLRRAPRRRAHAQVHPLLPRLRARPQQRARRRRPRRDLPAPRRRRRHALPPRQVKKKTHILPPVQ

SEQ ID NO: 10916 - protein, 290 aa, Zea mays subsp. mays
  peptide (1)..(290): Ceres Seq. ID no. 12412037
  misc_feature (77)..(289): Pfam Name: O-methyltransferase Pfam Description: O-methyltransferase
  misc_feature (31)..(290): Homolog of NCBI NO: 32347441 NR Description: caffeoyl CoA 3-O-methyltransferase [Zea mays]
  misc_feature (31)..(290): Homolog of NCBI NO: 30580384 NR Description: Caffeoyl-CoA O-methyltransferase 2
  misc_feature (30)..(290): Homolog of NCBI NO: 32347437 NR Description: caffeoyl CoA 3-O-methyltransferase [Zea mays]
  misc_feature (31)..(290): Homolog of NCBI NO: 32347443 NR Description: caffeoyl CoA 3-O-methyltransferase [Zea mays]
  misc_feature (30)..(290): Homolog of NCBI NO: 32347431 NR Description: caffeoyl CoA 3-O-methyltransferase [Zea mays]
  misc_feature (31)..(290): Homolog of NCBI NO: 32347435 NR Description: caffeoyl CoA 3-O-methyltransferase [Zea mays]
  misc_feature (30)..(290): Homolog of NCBI NO: 32347427 NR Description: caffeoyl CoA 3-O-methyltransferase [Zea mays]
  misc_feature (31)..(290): Homolog of NCBI NO: 32347447 NR Description: caffeoyl CoA 3-O-methyltransferase [Zea mays]
  misc_feature (30)..(290): Homolog of NCBI NO: 37221545 NR Description: caffeoyl-CoA 3-O-methyltransferase 1 [Zea mays]
  misc_feature (30)..(290): Homolog of NCBI NO: 30580385 NR Description: Caffeoyl-CoA O-methyltransferase 1
SSNTRRASQCRAQISATDQSFVQLTALHAMATTATKTTAPAQEQQANGNGNGEQKTRHSEVGHKSLLKSDDLYQYILDTSVYPREPESMKELREITAKHPWNLMTTSADEGQFLNMLIKLIGAKKTMEIGVYTGYSLLATALALPEDGTILAMDINRENYELGLPCINKAGVGHKIDFREGPALPVLDDLVADKEQHGSFDFAFVDADKDNYLSYHERLLKLVRPGGLIGYDNTLWNGSVVLPDDAPMRKYIRFYRDFVLALNSALAADDRVEICQLPVGDGVTLCRRVK

SEQ ID NO: 10917 - protein, 261 aa, Zea mays subsp. mays
  peptide (1)..(261): Ceres Seq. ID no. 12412038
  misc_feature (48)..(260): Pfam Name: O-methyltransferase Pfam Description: O-methyltransferase
  misc_feature (2)..(261): Homolog of NCBI NO: 32347441 NR Description: caffeoyl CoA 3-O-methyltransferase [Zea mays]
  misc_feature (2)..(261): Homolog of NCBI NO: 30580384 NR Description: Caffeoyl-CoA O-methyltransferase 2
  misc_feature (1)..(261): Homolog of NCBI NO: 32347437 NR Description: caffeoyl CoA 3-O-methyltransferase [Zea mays]
  misc_feature (2)..(261): Homolog of NCBI NO: 32347443 NR Description: caffeoyl CoA 3-O-methyltransferase [Zea mays]
  misc_feature (1)..(261): Homolog of NCBI NO: 32347431 NR Description: caffeoyl CoA 3-O-methyltransferase [Zea mays]
  misc_feature (2)..(261): Homolog of NCBI NO: 32347435 NR Description: caffeoyl CoA 3-O-methyltransferase [Zea mays]
  misc_feature (1)..(261): Homolog of NCBI NO: 32347427 NR Description: caffeoyl CoA 3-O-methyltransferase [Zea mays]
  misc_feature (2)..(261): Homolog of NCBI NO: 32347447 NR Description: caffeoyl CoA 3-O-methyltransferase [Zea mays]
  misc_feature (1)..(261): Homolog of NCBI NO: 37221545 NR Description: caffeoyl-CoA 3-O-methyltransferase 1 [Zea mays]
  misc_feature (1)..(261): Homolog of NCBI NO: 30580385 NR Description: Caffeoyl-CoA O-methyltransferase 1
MATTATKTTAPAQEQQANGNGNGEQKTRHSEVGHKSLLKSDDLYQYILDTSVYPREPESMKELREITAKHPWNLMTTSADEGQFLNMLIKLIGAKKTMEIGVYTGYSLLATALALPEDGTILAMDINRENYELGLPCINKAGVGHKIDFREGPALPVLDDLVADKEQHGSFDFAFVDADKDNYLSYHERLLKLVRPGGLIGYDNTLWNGSVVLPDDAPMRKYIRFYRDFVLALNSALAADDRVEICQLPVGDGVTLCRRVK

SEQ ID NO: 10918 - DNA, 937 bp, Zea mays subsp. mays
  misc_feature (1)..(937): Ceres Seq. ID no. 12355635
  misc_feature: MA Experiment ID: 108535 Result: Up-regulated in Transcription
  misc_feature: MA Experiment 108535 PARAMETER Experiment Name: Zm_Meristem_P Parameter: Age (day) Value: 8
  misc_feature: MA Experiment 108535 PARAMETER Experiment Name: Zm_Meristem_P Parameter: Organism Value: Zea mays
  misc_feature: MA Experiment 108535 PARAMETER Experiment Name: Zm_Meristem_P Parameter: Plant Line Value: 35A19
  misc_feature: MA Experiment 108535 PARAMETER Experiment Name: Zm_Meristem_P Parameter: Tissue Value: Root Meristem vs. Above Root Meristem
  misc_feature: MA Experiment ID: 108556 Result: Down-regulated in Transcription
  misc_feature: MA Experiment 108556 PARAMETER Experiment Name: Zm_Drought_P Parameter: Age (day) Value: 9
  misc_feature: MA Experiment 108556 PARAMETER Experiment Name: Zm_Drought_P Parameter: Organism Value: Zea mays
  misc_feature: MA Experiment 108556 PARAMETER Experiment Name: Zm_Drought_P Parameter: Plant Line Value: 35A19
  misc_feature: MA Experiment 108556 PARAMETER Experiment Name: Zm_Drought_P Parameter: Timepoint (hr) Value: 24
  misc_feature: MA Experiment 108556 PARAMETER Experiment Name: Zm_Drought_P Parameter: Tissue Value: Aerial
  misc_feature: MA Experiment 108556 PARAMETER Experiment Name: Zm_Drought_P Parameter: Treatment Value: Drought vs. No Drought
  misc_feature: MA Experiment ID: 108687 Result: Down-regulated in Transcription
  misc_feature: MA Experiment 108687 PARAMETER Experiment Name: Zm_Embryos-Flowers__P Parameter: Tissue Value: Embryo vs. Aerial+
  misc_feature: MA Experiment ID: 20000477 Result: Down-regulated in Transcription
  misc_feature: MA Experiment 20000477 PARAMETER Experiment Name: Zm_5mM_SA_P Parameter: Age (day) Value: 10
  misc_feature: MA Experiment 20000477 PARAMETER Experiment Name: Zm_5mM_SA_P Parameter: Organism Value: Zea mays
  misc_feature: MA Experiment 20000477 PARAMETER Experiment Name: Zm_5mM_SA_P Parameter: Plant Line Value: 35A19
  misc_feature: MA Experiment 20000477 PARAMETER Experiment Name: Zm_5mM_SA_P Parameter: Timepoint (hr) Value: 48
  misc_feature: MA Experiment 20000477 PARAMETER Experiment Name: Zm_5mM_SA_P Parameter: Tissue Value: Aerial
  misc_feature: MA Experiment 20000477 PARAMETER Experiment Name: Zm_5mM_SA_P Parameter: Treatment Value: 5mM SA vs. No Treatment
  misc_feature: MA Experiment ID: 20000478 Result: Down-regulated in Transcription
  misc_feature: MA Experiment 20000478 PARAMETER Experiment Name: Zm_5mM_SA_P Parameter: Age (day) Value: 11
  misc_feature: MA Experiment 20000478 PARAMETER Experiment Name: Zm_5mM_SA_P Parameter: Organism Value: Zea mays
  misc_feature: MA Experiment 20000478 PARAMETER Experiment Name: Zm_5mM_SA_P Parameter: Plant Line Value: 35A19
  misc_feature: MA Experiment 20000478 PARAMETER Experiment Name: Zm_5mM_SA_P Parameter: Timepoint (hr) Value: 72
  misc_feature: MA Experiment 20000478 PARAMETER Experiment Name: Zm_5mM_SA_P Parameter: Tissue Value: Aerial
  misc_feature: MA Experiment 20000478 PARAMETER Experiment Name: Zm_5mM_SA_P Parameter: Treatment Value: 5mM SA vs. No Treatment
cgaaagtcgaaacacagcacagcacaacaggagccaccgccccctttttccttccccccgtctcttcaattcaattcgtacggcacggccaccgggtcaccgcagcaacagaatgcggcgaatctgcatccccaagcttgtgattcttctgctgctctgcaccaggacgctgccggcgggcgtatcctctgcaaagatccatgggaacccagccaacgacctcgtggccctcatcaacggcaagagggaggcgagcaggctgcctgcgctgcgcaacagcagaggcctcgggtgcatggcgctgcagtacatctccgagtgcatggcggccaccacgggcggcgccgcctgcagcagcggcaacacgatggcgtgccagacccccgaggcccacatcacggaggtctacggccgccaactgcggcgtggagctccccacggtggacgtcatctccggccgcctcttcggctgccaccgggaccgcgacggcccggaggacgcgctggcatcagccaccgcgctctcggtgatccgcggcaaggagcacacccaggtaggcgccggcttcgaccgccgcgggcccttcttctggtgcctcctcttcagcagcggcagccccaactccacctttctcctggaggccggcggcaagggcatcgaccagacccatggctgcttcagcgctccggatcgcccctcgtgcaacgccacgccgccgcgccccggccagctcatgtgcaccattaccgcagcggcggctgtgctgctcttccgttgccttgtctccacctagctactccgaccggagtatcctactagcagcagctatgagcttcctggatgatgatattgtattgtattgcaaatctcggaccaatgtcatattccattcattcctggaactggaccagtgtcatattgtatttgcttacgccg

SEQ ID NO: 10919 - protein, 272 aa, Zea mays subsp. mays
  peptide (1)..(272): Ceres Seq. ID no. 12355636
  misc_feature (47)..(136): Homolog of NCBI NO: 30678256 NR Description: expressed protein [Arabidopsis thaliana]
ESRNTAQHNRSHRPLFPSPRLFNSIRTARPPGHRSNRMRRICIPKLVILLLLCTRTLPAGVSSAKIHGNPANDLVALINGKREASRLPALRNSRGLGCMALQYISECMAATTGGAACSSGNTMACQTPEAHITEVYGRQLRRGAPHGGRHLRPPLRLPPGPRRPGGRAGISHRALGDPRQGAHPGRRRLRPPRALLLVPPLQQRQPQLHLSPGGRRQGHRPDPWLLQRSGSPLVQRHAAAPRPAHVHHYRSGGCAALPLPCLHLATPTGVSY

SEQ ID NO: 10920 - protein, 235 aa, Zea mays subsp. mays
  peptide (1)..(235): Ceres Seq. ID no. 12355637
  misc_feature (10)..(99): Homolog of NCBI NO: 30678256 NR Description: expressed protein [Arabidopsis thaliana]
MRRICIPKLVILLLLCTRTLPAGVSSAKIHGNPANDLVALINGKREASRLPALRNSRGLGCMALQYISECMAATTGGAACSSGNTMACQTPEAHITEVYGRQLRRGAPHGGRHLRPPLRLPPGPRRPGGRAGISHRALGDPRQGAHPGRRRLRPPRALLLVPPLQQRQPQLHLSPGGRRQGHRPDPWLLQRSGSPLVQRHAAAPRPAHVHHYRSGGCAALPLPCLHLATPTGVSY

SEQ ID NO: 10921 - protein, 197 aa, Zea mays subsp. mays
  peptide (1)..(197): Ceres Seq. ID no. 12355638
  misc_feature (71)..(170): Homolog of NCBI NO: 30678256 NR Description: expressed protein [Arabidopsis thaliana]
MGTQPTTSWPSSTARGRRAGCLRCATAEASGAWRCSTSPSAWRPPRAAPPAAAATRWRARPPRPTSRRSTAANCGVELPTVDVISGRLFGCHRDRDGPEDALASATALSVIRGKEHTQVGAGFDRRGPFFWCLLFSSGSPNSTFLLEAGGKGIDQTHGCFSAPDRPSCNATPPRPGQLMCTITAAAAVLLFRCLVST

SEQ ID NO: 10922 - DNA, 1232 bp, Zea mays subsp. mays
  misc_feature (1)..(1232): Ceres Seq. ID no. 12341884
  misc_feature: MA Experiment ID: 108528 Result: Down-regulated in Transcription
  misc_feature: MA Experiment 108528 PARAMETER Experiment Name: Zm_Imbibed_Seeds_P Parameter: Age (day) Value: 5 vs. 2
  misc_feature: MA Experiment 108528 PARAMETER Experiment Name: Zm_Imbibed_Seeds_P Parameter: Organism Value: Zea mays
  misc_feature: MA Experiment 108528 PARAMETER Experiment Name: Zm_Imbibed_Seeds_P Parameter: Plant Line Value: 35A19
  misc_feature: MA Experiment 108528 PARAMETER Experiment Name: Zm_Imbibed_Seeds_P Parameter: Tissue Value: Aerial vs. Embryo
  misc_feature: MA Experiment ID: 108530 Result: Down-regulated in Transcription
  misc_feature: MA Experiment 108530 PARAMETER Experiment Name: Zm_Imbibed_Seeds_P Parameter: Age (day) Value: 6 vs. 2
  misc_feature: MA Experiment 108530 PARAMETER Experiment Name: Zm_Imbibed_Seeds_P Parameter: Organism Value: Zea mays
  misc_feature: MA Experiment 108530 PARAMETER Experiment Name: Zm_Imbibed_Seeds_P Parameter: Plant Line Value: 35A19
  misc_feature: MA Experiment 108530 PARAMETER Experiment Name: Zm_Imbibed_Seeds_P Parameter: Tissue Value: Aerial vs. Embryo
  misc_feature: MA Experiment ID: 108535 Result: Down-regulated in Transcription
  misc_feature: MA Experiment 108535 PARAMETER Experiment Name: Zm_Meristem_P Parameter: Age (day) Value: 8
  misc_feature: MA Experiment 108535 PARAMETER Experiment Name: Zm_Meristem_P Parameter: Organism Value: Zea mays
  misc_feature: MA Experiment 108535 PARAMETER Experiment Name: Zm_Meristem_P Parameter: Plant Line Value: 35A19
  misc_feature: MA Experiment 108535 PARAMETER Experiment Name: Zm_Meristem_P Parameter: Tissue Value: Root Meristem vs. Above Root Meristem
  misc_feature: MA Experiment ID: 108536 Result: Up-regulated in Transcription
  misc_feature: MA Experiment 108536 PARAMETER Experiment Name: Zm_Meristem_P Parameter: Age (day) Value: 8
  misc_feature: MA Experiment 108536 PARAMETER Experiment Name: Zm_Meristem_P Parameter: Organism Value: Zea mays
  misc_feature: MA Experiment 108536 PARAMETER Experiment Name: Zm_Meristem_P Parameter: Plant Line Value: 35A19
  misc_feature: MA Experiment 108536 PARAMETER Experiment Name: Zm_Meristem_P Parameter: Tissue Value: Shoot Meristem vs. Above Shoot Meristem
  misc_feature: MA Experiment ID: 108543 Result: Up-regulated in Transcription
  misc_feature: MA Experiment ID: 108545 Result: Down-regulated in Transcription
  misc_feature: MA Experiment 108545 PARAMETER Experiment Name: Zm_Imbibed_Seeds_P Parameter: Age (day) Value: 3 vs. 2
  misc_feature: MA Experiment 108545 PARAMETER Experiment Name: Zm_Imbibed_Seeds_P Parameter: Organism Value: Zea mays
  misc_feature: MA Experiment 108545 PARAMETER Experiment Name: Zm_Imbibed_Seeds_P Parameter: Plant Line Value: 35A19
  misc_feature: MA Experiment 108545 PARAMETER Experiment Name: Zm_Imbibed_Seeds_P Parameter: Tissue Value: Aerial vs. Embryo
  misc_feature: MA Experiment ID: 108547 Result: Down-regulated in Transcription
  misc_feature: MA Experiment 108547 PARAMETER Experiment Name: Zm_Imbibed_Seeds_P Parameter: Age (day) Value: 4 vs. 2
  misc_feature: MA Experiment 108547 PARAMETER Experiment Name: Zm_Imbibed_Seeds_P Parameter: Organism Value: Zea mays
  misc_feature: MA Experiment 108547 PARAMETER Experiment Name: Zm_Imbibed_Seeds_P Parameter: Plant Line Value: 35A19
  misc_feature: MA Experiment 108547 PARAMETER Experiment Name: Zm_Imbibed_Seeds_P Parameter: Tissue Value: Aerial vs. Embryo
  misc_feature: MA Experiment ID: 108687 Result: Down-regulated in Transcription
  misc_feature: MA Experiment 108687 PARAMETER Experiment Name: Zm_Embryos-Flowers__P Parameter: Tissue Value: Embryo vs. Aerial+
  misc_feature: MA Experiment ID: 20000478 Result: Down-regulated in Transcription
  misc_feature: MA Experiment 20000478 PARAMETER Experiment Name: Zm_5mM_SA_P Parameter: Age (day) Value: 11
  misc_feature: MA Experiment 20000478 PARAMETER Experiment Name: Zm_5mM_SA_P Parameter: Organism Value: Zea mays
  misc_feature: MA Experiment 20000478 PARAMETER Experiment Name: Zm_5mM_SA_P Parameter: Plant Line Value: 35A19
  misc_feature: MA Experiment 20000478 PARAMETER Experiment Name: Zm_5mM_SA_P Parameter: Timepoint (hr) Value: 72
  misc_feature: MA Experiment 20000478 PARAMETER Experiment Name: Zm_5mM_SA_P Parameter: Tissue Value: Aerial
  misc_feature: MA Experiment 20000478 PARAMETER Experiment Name: Zm_5mM_SA_P Parameter: Treatment Value: 5mM SA vs. No Treatment
  misc_feature: MA Experiment ID: 20000492 Result: Down-regulated in Transcription
  misc_feature: MA Experiment 20000492 PARAMETER Experiment Name: Zm_Hybrid_Seed_Dev_P Parameter: DAP Value: 12
  misc_feature: MA Experiment 20000492 PARAMETER Experiment Name: Zm_Hybrid_Seed_Dev_P Parameter: Organism Value: Zea mays
  misc_feature: MA Experiment 20000492 PARAMETER Experiment Name: Zm_Hybrid_Seed_Dev_P Parameter: Plant Line Value: 35A19
  misc_feature: MA Experiment 20000492 PARAMETER Experiment Name: Zm_Hybrid_Seed_Dev_P Parameter: Tissue Value: Fert Kernel vs. Unfert Floret
  misc_feature: MA Experiment ID: 20000535 Result: Down-regulated in Transcription
  misc_feature: MA Experiment 20000535 PARAMETER Experiment Name: Zm_Hybrid_Seed_Dev_P Parameter: DAP Value: 30 vs. 12
  misc_feature: MA Experiment 20000535 PARAMETER Experiment Name: Zm_Hybrid_Seed_Dev_P Parameter: Organism Value: Zea mays
  misc_feature: MA Experiment 20000535 PARAMETER Experiment Name: Zm_Hybrid_Seed_Dev_P Parameter: Plant Line Value: 35A19
  misc_feature: MA Experiment 20000535 PARAMETER Experiment Name: Zm_Hybrid_Seed_Dev_P Parameter: Tissue Value: Embryo vs. Unfert Floret
  misc_feature: MA Experiment ID: 20000632 Result: Down-regulated in Transcription
  misc_feature: MA Experiment 20000632 PARAMETER Experiment Name: Zm_Herbicide-Treatments_P Parameter: Timepoint (hr) Value: 4
  misc_feature: MA Experiment 20000632 PARAMETER Experiment Name: Zm_Herbicide-Treatments_P Parameter: Tissue Value: Aerial
  misc_feature: MA Experiment 20000632 PARAMETER Experiment Name: Zm_Herbicide-Treatments_P Parameter: Treatment Value: Glean vs. No Treatment
atccacaagaggagaagaaacaatcaaccagcaacactcttctcttataacatagtacagcgaaggtaactcacatggcaacttccatgggttgtctcgtcttgctctgccttgtttcttctctccttcccagtgccgtccttggccacccatggggtggcttgttcccacagttctatgaccattcgtgccccaaggcgaaggagattgtgcagtccattgtggcacaggctgtggccaaggagaccaggatggcggcatctttagtcagactgcatttccatgactgctttgtcaagggctgcgatgcttcggtgctgttggacaacagcagcagcatagttagtgagaaagggtccaacccgaacaggaactccctcagggggtttgaggtgatcgaccagattaaggctgctcttgaggctgcctgcccaggcacagtctcctgtgccgacattgttgcccttgcggctcgtgattccaccgccctggttggtggaccatactgggacgtgccacttggccggagagactcgctcggtgcaagcatccagggctccaacaatgacatcccagcccccaacaacacactccccactatcatcaccaagttcaagcgccagggcctcaatgttgttgatgttgtcgccctctcaggtggtcacaccattggtatgtctcggtgcactagtttccggcagaggctatacaaccagacaggcaatggcatggctgacagcacactggatgtatcctacgccgcaaagctgaggcagggatgcccccgctctggtggtgacaacaacctcttccccttggacttcatcacccctgccaagtttgacaatttttactacaagaacctcctggccggcaagggccttctaagctctgatgagattctgttaaccaagagcgctgagacagcggccctcgtgaaggcatatgctgctgatgtcaatctcttcttccagcactttgcacagtctatggtgaatatgggaaacatctcgccactgacagggtcacaaggtgagatcaggaagaactgcaggaggctcaacaatgaccactgagggcactgaagtcgcttgatgtgctgaattgtttgtgatgttggtggcgtattttgtttaaataagtaagcatggctgtgattttatcatatgatcgatctttggggttttatttaacacattgtaaaatgtgtatctattaataactcaatgtat

SEQ ID NO: 10923 - protein, 333 aa, Zea mays subsp. mays
  peptide (1)..(333): Ceres Seq. ID no. 12341885
  misc_feature (46)..(294): Pfam Name: Peroxidase Pfam Description: Peroxidase
  misc_feature (5)..(331): Homolog of NCBI NO: 34903044 NR Description: unnamed protein product [Oryza sativa (japonica group)] >gi|7242902|dbj|BAA92500.1| unnamed protein product
  misc_feature (1)..(331): Homolog of NCBI NO: 25044849 NR Description: peroxidase [Ananas comosus]
  misc_feature (5)..(333): Homolog of NCBI NO: 34913714 NR Description: putative peroxidase [Oryza sativa (japonica >gi|20146478|dbj|BAB89258.1| putative peroxidase [Oryza sativa
  misc_feature (1)..(330): Homolog of NCBI NO: 7453855 NR Description: peroxidase prx15 precursor [Spinacia oleracea]
  misc_feature (1)..(330): Homolog of NCBI NO: 7453853 NR Description: peroxidase prx14 precursor [Spinacia oleracea]
  misc_feature (1)..(331): Homolog of NCBI NO: 7658147 NR Description: peroxidase [Asparagus officinalis]
  misc_feature (1)..(331): Homolog of NCBI NO: 15239370 NR Description: peroxidase, putative; protein id: At5g66390.1 thaliana] >gi|26397792|sp|Q9FJZ9|PE72_ARATH Peroxidase 72 (Atperox P72) (PRXR8) (ATP6a) >gi|10177520|dbj|BAB10915.1|
  misc_feature (1)..(331): Homolog of NCBI NO: 1402918 NR Description: peroxidase [Arabidopsis thaliana]
  misc_feature (8)..(331): Homolog of NCBI NO: 7453851 NR Description: peroxidase prx13 precursor [Spinacia oleracea]
  misc_feature (28)..(331): Homolog of NCBI NO: 15224116 NR Description: peroxidase, putative; protein id: At2g18150.1, by cDNA: 126030., supported by cDNA: gi_19698902 [Arabidopsis >gi|25453215|sp|Q9SI16|PE15_ARATH Peroxidase 15 precursor
MATSMGCLVLLCLVSSLLPSAVLGHPWGGLFPQFYDHSCPKAKEIVQSIVAQAVAKETRMAASLVRLHFHDCFVKGCDASVLLDNSSSIVSEKGSNPNRNSLRGFEVIDQIKAALEAACPGTVSCADIVALAARDSTALVGGPYWDVPLGRRDSLGASIQGSNNDIPAPNNTLPTIITKFKRQGLNVVDVVALSGGHTIGMSRCTSFRQRLYNQTGNGMADSTLDVSYAAKLRQGCPRSGGDNNLFPLDFITPAKFDNFYYKNLLAGKGLLSSDEILLTKSAETAALVKAYAADVNLFFQHFAQSMVNMGNISPLTGSQGEIRKNCRRLNNDH

SEQ ID NO: 10924 - protein, 329 aa, Zea mays subsp. mays
  peptide (1)..(329): Ceres Seq. ID no. 12341886
  misc_feature (42)..(290): Pfam Name: Peroxidase Pfam Description: Peroxidase
  misc_feature (1)..(327): Homolog of NCBI NO: 34903044 NR Description: unnamed protein product [Oryza sativa (japonica group)] >gi|7242902|dbj|BAA92500.1| unnamed protein product
  misc_feature (1)..(327): Homolog of NCBI NO: 25044849 NR Description: peroxidase [Ananas comosus]
  misc_feature (1)..(329): Homolog of NCBI NO: 34913714 NR Description: putative peroxidase [Oryza sativa (japonica >gi|20146478|dbj|BAB89258.1| putative peroxidase [Oryza sativa
  misc_feature (1)..(326): Homolog of NCBI NO: 7453855 NR Description: peroxidase prx15 precursor [Spinacia oleracea]
  misc_feature (1)..(326): Homolog of NCBI NO: 7453853 NR Description: peroxidase prx14 precursor [Spinacia oleracea]
  misc_feature (1)..(327): Homolog of NCBI NO: 7658147 NR Description: peroxidase [Asparagus officinalis]
  misc_feature (1)..(327): Homolog of NCBI NO: 15239370 NR Description: peroxidase, putative; protein id: At5g66390.1 thaliana] >gi|26397792|sp|Q9FJZ9|PE72_ARATH Peroxidase 72 (Atperox P72) (PRXR8) (ATP6a) >gi|10177520|dbj|BAB10915.1|
  misc_feature (1)..(327): Homolog of NCBI NO: 1402918 NR Description: peroxidase [Arabidopsis thaliana]
  misc_feature (4)..(327): Homolog of NCBI NO: 7453851 NR Description: peroxidase prx13 precursor [Spinacia oleracea]
  misc_feature (24)..(327): Homolog of NCBI NO: 15224116 NR Description: peroxidase, putative; protein id: At2g18150.1, by cDNA: 126030., supported by cDNA: gi_19698902 [Arabidopsis >gi|25453215|sp|Q9SI16|PE15_ARATH Peroxidase 15 precursor
MGCLVLLCLVSSLLPSAVLGHPWGGLFPQFYDHSCPKAKEIVQSIVAQAVAKETRMAASLVRLHFHDCFVKGCDASVLLDNSSSIVSEKGSNPNRNSLRGFEVIDQIKAALEAACPGTVSCADIVALAARDSTALVGGPYWDVPLGRRDSLGASIQGSNNDIPAPNNTLPTIITKFKRQGLNVVDVVALSGGHTIGMSRCTSFRQRLYNQTGNGMADSTLDVSYAAKLRQGCPRSGGDNNLFPLDFITPAKFDNFYYKNLLAGKGLLSSDEILLTKSAETAALVKAYAADVNLFFQHFAQSMVNMGNISPLTGSQGEIRKNCRRLNNDH

SEQ ID NO: 10925 - protein, 274 aa, Zea mays subsp. mays
  peptide (1)..(274): Ceres Seq. ID no. 12341887
  misc_feature (1)..(235): Pfam Name: Peroxidase Pfam Description: Peroxidase
  misc_feature (1)..(272): Homolog of NCBI NO: 34903044 NR Description: unnamed protein product [Oryza sativa (japonica group)] >gi|7242902|dbj|BAA92500.1| unnamed protein product
  misc_feature (1)..(272): Homolog of NCBI NO: 25044849 NR Description: peroxidase [Ananas comosus]
  misc_feature (1)..(274): Homolog of NCBI NO: 34913714 NR Description: putative peroxidase [Oryza sativa (japonica >gi|20146478|dbj|BAB89258.1| putative peroxidase [Oryza sativa
  misc_feature (1)..(271): Homolog of NCBI NO: 7453855 NR Description: peroxidase prx15 precursor [Spinacia oleracea]
  misc_feature (1)..(271): Homolog of NCBI NO: 7453853 NR Description: peroxidase prx14 precursor [Spinacia oleracea]
  misc_feature (1)..(272): Homolog of NCBI NO: 7658147 NR Description: peroxidase [Asparagus officinalis]
  misc_feature (1)..(272): Homolog of NCBI NO: 15239370 NR Description: peroxidase, putative; protein id: At5g66390.1 thaliana] >gi|26397792|sp|Q9FJZ9|PE72_ARATH Peroxidase 72 (Atperox P72) (PRXR8) (ATP6a) >gi|10177520|dbj|BAB10915.1|
  misc_feature (1)..(272): Homolog of NCBI NO: 1402918 NR Description: peroxidase [Arabidopsis thaliana]
  misc_feature (1)..(272): Homolog of NCBI NO: 7453851 NR Description: peroxidase prx13 precursor [Spinacia oleracea]
  misc_feature (1)..(272): Homolog of NCBI NO: 15224116 NR Description: peroxidase, putative; protein id: At2g18150.1, by cDNA: 126030., supported by cDNA: gi_19698902 [Arabidopsis >gi|25453215|sp|Q9SI16|PE15_ARATH Peroxidase 15 precursor
MAASLVRLHFHDCFVKGCDASVLLDNSSSIVSEKGSNPNRNSLRGFEVIDQIKAALEAACPGTVSCADIVALAARDSTALVGGPYWDVPLGRRDSLGASIQGSNNDIPAPNNTLPTIITKFKRQGLNVVDVVALSGGHTIGMSRCTSFRQRLYNQTGNGMADSTLDVSYAAKLRQGCPRSGGDNNLFPLDFITPAKFDNFYYKNLLAGKGLLSSDEILLTKSAETAALVKAYAADVNLFFQHFAQSMVNMGNISPLTGSQGEIRKNCRRLNNDH

SEQ ID NO: 10926 - DNA, 1495 bp, Zea mays subsp. mays
  misc_feature (1)..(1495): Ceres Seq. ID no. 12566151
  misc_feature: MA Experiment ID: 108543 Result: Up-regulated in Transcription
  misc_feature: MA Experiment ID: 108559 Result: Down-regulated in Transcription
  misc_feature: MA Experiment 108559 PARAMETER Experiment Name: Zm_5mM_NO_P Parameter: Age (day) Value: 8
  misc_feature: MA Experiment 108559 PARAMETER Experiment Name: Zm_5mM_NO_P Parameter: Organism Value: Zea mays
  misc_feature: MA Experiment 108559 PARAMETER Experiment Name: Zm_5mM_NO_P Parameter: Plant Line Value: 35A19
  misc_feature: MA Experiment 108559 PARAMETER Experiment Name: Zm_5mM_NO_P Parameter: Timepoint (hr) Value: 12
  misc_feature: MA Experiment 108559 PARAMETER Experiment Name: Zm_5mM_NO_P Parameter: Tissue Value: Aerial
  misc_feature: MA Experiment 108559 PARAMETER Experiment Name: Zm_5mM_NO_P Parameter: Treatment Value: 5mM NO vs. No Treatment
  misc_feature: MA Experiment ID: 20000477 Result: Down-regulated in Transcription
  misc_feature: MA Experiment 20000477 PARAMETER Experiment Name: Zm_5mM_SA_P Parameter: Age (day) Value: 10
  misc_feature: MA Experiment 20000477 PARAMETER Experiment Name: Zm_5mM_SA_P Parameter: Organism Value: Zea mays
  misc_feature: MA Experiment 20000477 PARAMETER Experiment Name: Zm_5mM_SA_P Parameter: Plant Line Value: 35A19
  misc_feature: MA Experiment 20000477 PARAMETER Experiment Name: Zm_5mM_SA_P Parameter: Timepoint (hr) Value: 48
  misc_feature: MA Experiment 20000477 PARAMETER Experiment Name: Zm_5mM_SA_P Parameter: Tissue Value: Aerial
  misc_feature: MA Experiment 20000477 PARAMETER Experiment Name: Zm_5mM_SA_P Parameter: Treatment Value: 5mM SA vs. No Treatment
  misc_feature: MA Experiment ID: 20000535 Result: Down-regulated in Transcription
  misc_feature: MA Experiment 20000535 PARAMETER Experiment Name: Zm_Hybrid_Seed_Dev_P Parameter: DAP Value: 30 vs. 12
  misc_feature: MA Experiment 20000535 PARAMETER Experiment Name: Zm_Hybrid_Seed_Dev_P Parameter: Organism Value: Zea mays
  misc_feature: MA Experiment 20000535 PARAMETER Experiment Name: Zm_Hybrid_Seed_Dev_P Parameter: Plant Line Value: 35A19
  misc_feature: MA Experiment 20000535 PARAMETER Experiment Name: Zm_Hybrid_Seed_Dev_P Parameter: Tissue Value: Embryo vs. Unfert Floret
gcacgagaccattacctagaacatcctaatcgaaaaaacgacagcgcgcacttggattcggcgaccaccggagcgcggaggaggcacaggcgccgatctaaagacgatggccgccgcgggctcctcgccgtccttctcctcctcgagtaagcggtgcgtgccctgcttctttcttcaattttcccccgatccatggctcgtgcgtgggttccctgctcctagctccactcccccgtccatggcttgcatctatgctgcacagctcggttgctgttgcagttcaacctacttgttactccaaaaagaaggcgggcttatccaagatattgatcaaaatttccaccttttcgcgtcgaagggcgatgaattgaaggatccacccaggccaagcactggtgctctgtgcttatcttttagcgagcgaagtggtcatttccccctctcttctttatgggaggaaaataggaaatggtgtgccaagtgtatcctcaaccattctactgttccaaacgtgcagtatacatcggcatacagtcgatccagttgcaacaccatagctggaagggaaggtggccctcgtcactggtggcgccaccggcatcggtgaggccatcgttcgcctcttcatggagcacggcgccaaggtctgcatcgcggacatccaggatgaggctgggcagcagctgcgcgacgccctgggaggtgacgcgcagggcgccatgttcgtccactgcgacgtgacgtcggaggaggacgtgagccgcgccgtggacgctgcggcggagcggttcggcgcgctggacgtgatggtgaacaacgccggcgtgacgggcaccaaggtgacggacatccgcaacgtggacttcgcggaggcgcgcagggtgctcgacgtcaacgtgcacggcgtgttcctggggatgaagcacgcggcgcgcgctatgatcccgcggaagcggggctccatcgtgtcgctggccagcgtggccagcgccatcggcgggacgggcccgcacgtctacacggcgtccaagcacgccgtggtcgggctcaccaagagcgtcgccgcggagctcggccgccacggggtgcgcgtcaactgcgtgtccccctatgccgtgcccacggcgctgtcgatgccgcacctgccccagggcgcgcgcgcagatgacgcgctcaaggacttcctggcctttgtcggcggcgaggccaacctcaagggcgtcgacgccatgcccgaggacgtcgcccaggcggtgctctacctggccagcgacgaggcgaggtacgtcagcgcggtcaacctcatggtggacggaggcttcacagccgtaaacaataacctcagggcgtttgaggattagttgaggcatttatgccagctctgggattgggagggagtattaccgctatttcttctgctgttgtgacaagtgtgtgcaagactaataaaccgcagcatgttcatgtagccaacagatgattgaacattccaagt

SEQ ID NO: 10927 - protein, 244 aa, Zea mays subsp. mays
  peptide (1)..(244): Ceres Seq. ID no. 12566152
  misc_feature (1)..(242): Homolog of NCBI NO: 15218213 NR Description: short chain alcohol dehydrogenase, putative; id: At1g52340.1, supported by cDNA: gi_20466273 [Arabidopsis
  misc_feature (1)..(185): Homolog of NCBI NO: 1717794 NR Description: SEX DETERMINATION PROTEIN TASSELSEED 2
  misc_feature (179)..(237): Homolog of NCBI NO: 1717794 NR Description: SEX DETERMINATION PROTEIN TASSELSEED 2
  misc_feature (1)..(237): Homolog of NCBI NO: 1877480 NR Description: short-chain alcohol dehydrogenase [Tripsacum
  misc_feature (1)..(237): Homolog of NCBI NO: 34898190 NR Description: putative short-chain alcohol dehydrogenase [Oryza
  misc_feature (1)..(244): Homolog of NCBI NO: 38346185 NR Description: OSJNBa0096F01.12 [Oryza sativa (japonica
  misc_feature (1)..(243): Homolog of NCBI NO: 13752458 NR Description: stem secoisolariciresinol dehydrogenase
  misc_feature (1)..(237): Homolog of NCBI NO: 33146885 NR Description: putative short-chain alcohol dehydrogenase [Oryza
  misc_feature (1)..(244): Homolog of NCBI NO: 38346186 NR Description: OSJNBa0096F01.13 [Oryza sativa (japonica
  misc_feature (1)..(185): Homolog of NCBI NO: 15192925 NR Description: alcohol dehydrogenase [Zea mays subsp. mays]
MEHGAKVCIADIQDEAGQQLRDALGGDAQGAMFVHCDVTSEEDVSRAVDAAAERFGALDVMVNNAGVTGTKVTDIRNVDFAEARRVLDVNVHGVFLGMKHAARAMIPRKRGSIVSLASVASAIGGTGPHVYTASKHAVVGLTKSVAAELGRHGVRVNCVSPYAVPTALSMPHLPQGARADDALKDFLAFVGGEANLKGVDAMPEDVAQAVLYLASDEARYVSAVNLMVDGGFTAVNNNLRAFED

SEQ ID NO: 10928 - protein, 213 aa, Zea mays subsp. mays
  peptide (1)..(213): Ceres Seq. ID no. 12566153
  misc_feature (1)..(211): Homolog of NCBI NO: 15218213 NR Description: short chain alcohol dehydrogenase, putative; id: At1g52340.1, supported by cDNA: gi_20466273 [Arabidopsis
  misc_feature (1)..(154): Homolog of NCBI NO: 1717794 NR Description: SEX DETERMINATION PROTEIN TASSELSEED 2
  misc_feature (148)..(206): Homolog of NCBI NO: 1717794 NR Description: SEX DETERMINATION PROTEIN TASSELSEED 2
  misc_feature (1)..(206): Homolog of NCBI NO: 1877480 NR Description: short-chain alcohol dehydrogenase [Tripsacum
  misc_feature (1)..(206): Homolog of NCBI NO: 34898190 NR Description: putative short-chain alcohol dehydrogenase [Oryza
  misc_feature (1)..(213): Homolog of NCBI NO: 38346185 NR Description: OSJNBa0096F01.12 [Oryza sativa (japonica
  misc_feature (1)..(212): Homolog of NCBI NO: 13752458 NR Description: stem secoisolariciresinol dehydrogenase
  misc_feature (1)..(206): Homolog of NCBI NO: 33146885 NR Description: putative short-chain alcohol dehydrogenase [Oryza
  misc_feature (1)..(213): Homolog of NCBI NO: 38346186 NR Description: OSJNBa0096F01.13 [Oryza sativa (japonica
  misc_feature (1)..(154): Homolog of NCBI NO: 15192925 NR Description: alcohol dehydrogenase [Zea mays subsp. mays]
MFVHCDVTSEEDVSRAVDAAAERFGALDVMVNNAGVTGTKVTDIRNVDFAEARRVLDVNVHGVFLGMKHAARAMIPRKRGSIVSLASVASAIGGTGPHVYTASKHAVVGLTKSVAAELGRHGVRVNCVSPYAVPTALSMPHLPQGARADDALKDFLAFVGGEANLKGVDAMPEDVAQAVLYLASDEARYVSAVNLMVDGGFTAVNNNLRAFED

SEQ ID NO: 10929 - protein, 184 aa, Zea mays subsp. mays
  peptide (1)..(184): Ceres Seq. ID no. 12566154
  misc_feature (1)..(184): Homolog of NCBI NO: 38346185 NR Description: OSJNBa0096F01.12 [Oryza sativa (japonica
  misc_feature (1)..(183): Homolog of NCBI NO: 13752458 NR Description: stem secoisolariciresinol dehydrogenase
  misc_feature (1)..(177): Homolog of NCBI NO: 33146885 NR Description: putative short-chain alcohol dehydrogenase [Oryza
  misc_feature (1)..(184): Homolog of NCBI NO: 38346186 NR Description: OSJNBa0096F01.13 [Oryza sativa (japonica
  misc_feature (1)..(125): Homolog of NCBI NO: 15192925 NR Description: alcohol dehydrogenase [Zea mays subsp. mays]
  misc_feature (1)..(182): Homolog of NCBI NO: 15218213 NR Description: short chain alcohol dehydrogenase, putative; id: At1g52340.1, supported by cDNA: gi_20466273 [Arabidopsis
  misc_feature (1)..(125): Homolog of NCBI NO: 1717794 NR Description: SEX DETERMINATION PROTEIN TASSELSEED 2
  misc_feature (119)..(177): Homolog of NCBI NO: 1717794 NR Description: SEX DETERMINATION PROTEIN TASSELSEED 2
  misc_feature (1)..(177): Homolog of NCBI NO: 1877480 NR Description: short-chain alcohol dehydrogenase [Tripsacum
  misc_feature (1)..(177): Homolog of NCBI NO: 34898190 NR Description: putative short-chain alcohol dehydrogenase [Oryza
MVNNAGVTGTKVTDIRNVDFAEARRVLDVNVHGVFLGMKHAARAMIPRKRGSIVSLASVASAIGGTGPHVYTASKHAVVGLTKSVAAELGRHGVRVNCVSPYAVPTALSMPHLPQGARADDALKDFLAFVGGEANLKGVDAMPEDVAQAVLYLASDEARYVSAVNLMVDGGFTAVNNNLRAFED

SEQ ID NO: 10930 - DNA, 1122 bp, Zea mays subsp. mays
  misc_feature (1)..(1122): Ceres Seq. ID no. 12413380
  misc_feature: MA Experiment ID: 108528 Result: Up-regulated in Transcription
  misc_feature: MA Experiment 108528 PARAMETER Experiment Name: Zm_Imbibed_Seeds_P Parameter: Age (day) Value: 5 vs. 2
  misc_feature: MA Experiment 108528 PARAMETER Experiment Name: Zm_Imbibed_Seeds_P Parameter: Organism Value: Zea mays
  misc_feature: MA Experiment 108528 PARAMETER Experiment Name: Zm_Imbibed_Seeds_P Parameter: Plant Line Value: 35A19
  misc_feature: MA Experiment 108528 PARAMETER Experiment Name: Zm_Imbibed_Seeds_P Parameter: Tissue Value: Aerial vs. Embryo
  misc_feature: MA Experiment ID: 108530 Result: Up-regulated in Transcription
  misc_feature: MA Experiment 108530 PARAMETER Experiment Name: Zm_Imbibed_Seeds_P Parameter: Age (day) Value: 6 vs. 2
  misc_feature: MA Experiment 108530 PARAMETER Experiment Name: Zm_Imbibed_Seeds_P Parameter: Organism Value: Zea mays
  misc_feature: MA Experiment 108530 PARAMETER Experiment Name: Zm_Imbibed_Seeds_P Parameter: Plant Line Value: 35A19
  misc_feature: MA Experiment 108530 PARAMETER Experiment Name: Zm_Imbibed_Seeds_P Parameter: Tissue Value: Aerial vs. Embryo
  misc_feature: MA Experiment ID: 108535 Result: Down-regulated in Transcription
  misc_feature: MA Experiment 108535 PARAMETER Experiment Name: Zm_Meristem_P Parameter: Age (day) Value: 8
  misc_feature: MA Experiment 108535 PARAMETER Experiment Name: Zm_Meristem_P Parameter: Organism Value: Zea mays
  misc_feature: MA Experiment 108535 PARAMETER Experiment Name: Zm_Meristem_P Parameter: Plant Line Value: 35A19
  misc_feature: MA Experiment 108535 PARAMETER Experiment Name: Zm_Meristem_P Parameter: Tissue Value: Root Meristem vs. Above Root Meristem
  misc_feature: MA Experiment ID: 108543 Result: Up-regulated in Transcription
  misc_feature: MA Experiment ID: 108545 Result: Up-regulated in Transcription
  misc_feature: MA Experiment 108545 PARAMETER Experiment Name: Zm_Imbibed_Seeds_P Parameter: Age (day) Value: 3 vs. 2
  misc_feature: MA Experiment 108545 PARAMETER Experiment Name: Zm_Imbibed_Seeds_P Parameter: Organism Value: Zea mays
  misc_feature: MA Experiment 108545 PARAMETER Experiment Name: Zm_Imbibed_Seeds_P Parameter: Plant Line Value: 35A19
  misc_feature: MA Experiment 108545 PARAMETER Experiment Name: Zm_Imbibed_Seeds_P Parameter: Tissue Value: Aerial vs. Embryo
  misc_feature: MA Experiment ID: 108547 Result: Up-regulated in Transcription
  misc_feature: MA Experiment 108547 PARAMETER Experiment Name: Zm_Imbibed_Seeds_P Parameter: Age (day) Value: 4 vs. 2
  misc_feature: MA Experiment 108547 PARAMETER Experiment Name: Zm_Imbibed_Seeds_P Parameter: Organism Value: Zea mays
  misc_feature: MA Experiment 108547 PARAMETER Experiment Name: Zm_Imbibed_Seeds_P Parameter: Plant Line Value: 35A19
  misc_feature: MA Experiment 108547 PARAMETER Experiment Name: Zm_Imbibed_Seeds_P Parameter: Tissue Value: Aerial vs. Embryo
  misc_feature: MA Experiment ID: 20000535 Result: Up-regulated in Transcription
  misc_feature: MA Experiment 20000535 PARAMETER Experiment Name: Zm_Hybrid_Seed_Dev_P Parameter: DAP Value: 30 vs. 12
  misc_feature: MA Experiment 20000535 PARAMETER Experiment Name: Zm_Hybrid_Seed_Dev_P Parameter: Organism Value: Zea mays
  misc_feature: MA Experiment 20000535 PARAMETER Experiment Name: Zm_Hybrid_Seed_Dev_P Parameter: Plant Line Value: 35A19
  misc_feature: MA Experiment 20000535 PARAMETER Experiment Name: Zm_Hybrid_Seed_Dev_P Parameter: Tissue Value: Embryo vs. Unfert Floret
  misc_feature: MA Experiment ID: 20000626 Result: Down-regulated in Transcription
  misc_feature: MA Experiment 20000626 PARAMETER Experiment Name: Zm_Herbicide-Treatments_P Parameter: Timepoint (hr) Value: 12
  misc_feature: MA Experiment 20000626 PARAMETER Experiment Name: Zm_Herbicide-Treatments_P Parameter: Tissue Value: Aerial
  misc_feature: MA Experiment 20000626 PARAMETER Experiment Name: Zm_Herbicide-Treatments_P Parameter: Treatment Value: Roundup vs. No Treatment
acggacgcttccacgcgaccaagcagccagagccacgcggcgctggtctggccagccatgtcctgcctcgcggcgccgccggctgcaccgccaaaggcgggggaacgcatgctccgcgccgtcgctcctttgcgctcgccttcgccgtgccggggcctgcattacgcggtgcgggggactggagggcgagaagccgggtgcggccggcggcagctggcgctgctgcgggtgctccccagctggcgagtccagggcgtccggggacggcggcctttccagcttctgtataattgaaggtccagagacgatcgaggactttgctcaaatgcaatcgcaggagattgaagacaacatcatgagccgacgcaacaaaattttccttctgatggaagaggttagacggttgcgagtgcagcagcgtatccgaacttctgaaagcaaagatgccaacactgaaggaaatgaaatgcctgagattccatcaactattccatttatgcctgatgcgtcaccaaagactatgaagcaactctatatgacatcgttctctgtcatatctgggataatcatttttggaggcttgatagccccagtacttgaactgaaactagggctgggtggcacatcttatgaagattttataaggaccttgcacttacctcttcaattgagtcaggtagatcctatagtggcatcattttcaggtggcgcagttggtgttatctcagctttaatgttggtcgaagtgagaaatgtcaggcagcaagagaagaaaagatgcacatattgtcatgggactgggtacttgccatgtgctcgctgttctgctagtgggatgttattgaacacaaagcacttttcattattggggcataatatgtggtcaatgaaaggaaggtgtcagaattgttctggagctggaaaggtgatgtgtccgacgtgcttgtgcacaggaatggcgatggcaagtgagcatgatccacggattgacccttttgattagtttgatatgacaatacgctttttgtctgtttcttggaaaatatgttgccgataacagcaataaactcatgtttgtatgtacgttatgtttgttactgcgtgatcacttgagataagttg

SEQ ID NO: 10931 - protein, 333 aa, Zea mays subsp. mays
  peptide (1)..(333): Ceres Seq. ID no. 12413381
  misc_feature (256)..(309): Pfam Name: DnaJ central domain (4 repeats) Pfam Description: DnaJ central domain (4 repeats)
  misc_feature (69)..(333): Homolog of NCBI NO: 22326624 NR Description: putative protein; protein id: At5g06130.1, by cDNA: gi_18176019 [Arabidopsis thaliana] unknown protein [Arabidopsis thaliana]
  misc_feature (69)..(333): Homolog of NCBI NO: 8978349 NR Description: gene_id:K16F4.10~pir||T00468~similar to unknown
  misc_feature (92)..(333): Homolog of NCBI NO: 30681288 NR Description: expressed protein [Arabidopsis thaliana]
  misc_feature (72)..(333): Homolog of NCBI NO: 15240312 NR Description: putative protein; protein id: At5g61670.1, by cDNA: 112078., supported by cDNA: gi_20453123 [Arabidopsis >gi|9758482|dbj|BAB09011.1| gene_id:K11J9.20~unknown protein
RTLPRDQAARATRRWSGQPCPASRRRRLHRQRRGNACSAPSLLCARLRRAGACITRCGGLEGEKPGAAGGSWRCCGCSPAGESRASGDGGLSSFCIIEGPETIEDFAQMQSQEIEDNIMSRRNKIFLLMEEVRRLRVQQRIRTSESKDANTEGNEMPEIPSTIPFMPDASPKTMKQLYMTSFSVISGIIIFGGLIAPVLELKLGLGGTSYEDFIRTLHLPLQLSQVDPIVASFSGGAVGVISALMLVEVRNVRQQEKKRCTYCHGTGYLPCARCSASGMLLNTKHFSLLGHNMWSMKGRCQNCSGAGKVMCPTCLCTGMAMASEHDPRIDPFD

SEQ ID NO: 10932 - protein, 225 aa, Zea mays subsp. mays
  peptide (1)..(225): Ceres Seq. ID no. 12413382
  misc_feature (148)..(201): Pfam Name: DnaJ central domain (4 repeats) Pfam Description: DnaJ central domain (4 repeats)
  misc_feature (1)..(225): Homolog of NCBI NO: 22326624 NR Description: putative protein; protein id: At5g06130.1, by cDNA: gi_18176019 [Arabidopsis thaliana] unknown protein [Arabidopsis thaliana]
  misc_feature (1)..(225): Homolog of NCBI NO: 8978349 NR Description: gene_id:K16F4.10~pir||T00468~similar to unknown
  misc_feature (1)..(225): Homolog of NCBI NO: 30681288 NR Description: expressed protein [Arabidopsis thaliana]
  misc_feature (1)..(225): Homolog of NCBI NO: 15240312 NR Description: putative protein; protein id: At5g61670.1, by cDNA: 112078., supported by cDNA: gi_20453123 [Arabidopsis >gi|9758482|dbj|BAB09011.1| gene_id:K11J9.20~unknown protein
MQSQEIEDNIMSRRNKIFLLMEEVRRLRVQQRIRTSESKDANTEGNEMPEIPSTIPFMPDASPKTMKQLYMTSFSVISGIIIFGGLIAPVLELKLGLGGTSYEDFIRTLHLPLQLSQVDPIVASFSGGAVGVISALMLVEVRNVRQQEKKRCTYCHGTGYLPCARCSASGMLLNTKHFSLLGHNMWSMKGRCQNCSGAGKVMCPTCLCTGMAMASEHDPRIDPFD

SEQ ID NO: 10933 - protein, 215 aa, Zea mays subsp. mays
  peptide (1)..(215): Ceres Seq. ID no. 12413383
  misc_feature (138)..(191): Pfam Name: DnaJ central domain (4 repeats) Pfam Description: DnaJ central domain (4 repeats)
  misc_feature (1)..(215): Homolog of NCBI NO: 22326624 NR Description: putative protein; protein id: At5g06130.1, by cDNA: gi_18176019 [Arabidopsis thaliana] unknown protein [Arabidopsis thaliana]
  misc_feature (1)..(215): Homolog of NCBI NO: 8978349 NR Description: gene_id:K16F4.10~pir||T00468~similar to unknown
  misc_feature (1)..(215): Homolog of NCBI NO: 30681288 NR Description: expressed protein [Arabidopsis thaliana]
  misc_feature (1)..(215): Homolog of NCBI NO: 15240312 NR Description: putative protein; protein id: At5g61670.1, by cDNA: 112078., supported by cDNA: gi_20453123 [Arabidopsis >gi|9758482|dbj|BAB09011.1| gene_id:K11J9.20~unknown protein
MSRRNKIFLLMEEVRRLRVQQRIRTSESKDANTEGNEMPEIPSTIPFMPDASPKTMKQLYMTSFSVISGIIIFGGLIAPVLELKLGLGGTSYEDFIRTLHLPLQLSQVDPIVASFSGGAVGVISALMLVEVRNVRQQEKKRCTYCHGTGYLPCARCSASGMLLNTKHFSLLGHNMWSMKGRCQNCSGAGKVMCPTCLCTGMAMASEHDPRIDPFD

SEQ ID NO: 10934 - DNA, 1030 bp, Zea mays subsp. mays
  misc_feature (1)..(1030): Ceres Seq. ID no. 12412023
  misc_feature: MA Experiment ID: 108522 Result: Down-regulated in Transcription
  misc_feature: MA Experiment 108522 PARAMETER Experiment Name: Zm_42deg_Heat_P Parameter: Age (day) Value: 8
  misc_feature: MA Experiment 108522 PARAMETER Experiment Name: Zm_42deg_Heat_P Parameter: Organism Value: Zea mays
  misc_feature: MA Experiment 108522 PARAMETER Experiment Name: Zm_42deg_Heat_P Parameter: Plant Line Value: 35A19
  misc_feature: MA Experiment 108522 PARAMETER Experiment Name: Zm_42deg_Heat_P Parameter: Temperature (deg C) Value: 42 vs. 22
  misc_feature: MA Experiment 108522 PARAMETER Experiment Name: Zm_42deg_Heat_P Parameter: Timepoint (hr) Value: 1
  misc_feature: MA Experiment 108522 PARAMETER Experiment Name: Zm_42deg_Heat_P Parameter: Tissue Value: Aerial
  misc_feature: MA Experiment ID: 108527 Result: Up-regulated in Transcription
  misc_feature: MA Experiment 108527 PARAMETER Experiment Name: Zm_5mM_NO_P Parameter: Age (day) Value: 8
  misc_feature: MA Experiment 108527 PARAMETER Experiment Name: Zm_5mM_NO_P Parameter: Organism Value: Zea mays
  misc_feature: MA Experiment 108527 PARAMETER Experiment Name: Zm_5mM_NO_P Parameter: Plant Line Value: 35A19
  misc_feature: MA Experiment 108527 PARAMETER Experiment Name: Zm_5mM_NO_P Parameter: Timepoint (hr) Value: 6
  misc_feature: MA Experiment 108527 PARAMETER Experiment Name: Zm_5mM_NO_P Parameter: Tissue Value: Aerial
  misc_feature: MA Experiment 108527 PARAMETER Experiment Name: Zm_5mM_NO_P Parameter: Treatment Value: 5mM NO vs. No Treatment
  misc_feature: MA Experiment ID: 108543 Result: Down-regulated in Transcription
  misc_feature: MA Experiment ID: 108544 Result: Down-regulated in Transcription
  misc_feature: MA Experiment ID: 20000626 Result: Up-regulated in Transcription
  misc_feature: MA Experiment 20000626 PARAMETER Experiment Name: Zm_Herbicide-Treatments_P Parameter: Timepoint (hr) Value: 12
  misc_feature: MA Experiment 20000626 PARAMETER Experiment Name: Zm_Herbicide-Treatments_P Parameter: Tissue Value: Aerial
  misc_feature: MA Experiment 20000626 PARAMETER Experiment Name: Zm_Herbicide-Treatments_P Parameter: Treatment Value: Roundup vs. No Treatment
  misc_feature: MA Experiment ID: 20000627 Result: Up-regulated in Transcription
  misc_feature: MA Experiment 20000627 PARAMETER Experiment Name: Zm_Herbicide-Treatments_P Parameter: Timepoint (hr) Value: 12
  misc_feature: MA Experiment 20000627 PARAMETER Experiment Name: Zm_Herbicide-Treatments_P Parameter: Tissue Value: Aerial
  misc_feature: MA Experiment 20000627 PARAMETER Experiment Name: Zm_Herbicide-Treatments_P Parameter: Treatment Value: Finale vs. No Treatment
ataaatatagcttggagcaaatctttcagccacccgatccccaaccgcccggcccgacattccctccaaccgccgctgcggctgcgccgcccaccgccgacaggcgcagcagtcaacaggaaccgagccatggcgagcgcggatctgctgcggagggaggaggagttctactcctccctgtttgattccgccaaaggcgatggcgccaggtcgcgctcacagctgatcgagaggaagatcgaggccctggaggacatggccaccagggtcagtaaccggagatcgcggaagtggtttaacgaccgtttgctgattgaactcgtcccgcgtctttacgttgaagagatcaaaggcctattcgctcctccgccgtggggtgagcaagtgcccttgtcagcattctacagggcaaatgttggtgaatgggattccttcaggagcattgacatggatgctgaggcaagattgatgcagcatatgaaaaaatcattggaaaaacccaggaatcatgtcgatgaaggggaatcgattgcgctgaatgcttggcatcgaatagatcgacacactagagaagcaataaagagaaatttccttcctgatctgcttggaatatatgaagaacgcgttagggccttcattgaagacgctagtgacaaagatgctcttgtgctgaatgttcaggacccatttcagagactactgctccacggtgtttgtgagttctacaacgtgagctcgacaaccaccagcagtgtgagagaagatgggaggccttggaaggcaaccaccatcaagaagaggcagggcaccggcgttccctctagaatcacactagttagctttctgagaatgaagaagaatggatcgcagtaacgttagttagcgttcaagaatacaacaaaattgctttagattccgtttaggctgttgcaagacaagtgagtggtcactggcaatgtgttcttatatcgcatcagcctgctggctacggtttggaacttcctgacagaaagtagaaacttccggttct

SEQ ID NO: 10935 - protein, 290 aa, Zea mays subsp. mays
  peptide (1)..(290): Ceres Seq. ID no. 12412024
  misc_feature (44)..(289): Homolog of NCBI NO: 18379075 NR Description: expressed protein; protein id: At1g03250.1, by cDNA: 40461. [Arabidopsis thaliana] unknown [Arabidopsis thaliana] >gi|22022560|gb|AAM83237.1|
  misc_feature (44)..(243): Homolog of NCBI NO: 25372999 NR Description: hypothetical protein F15K9.15 [imported] - thaliana >gi|3850581|gb|AAC72121.1| EST gb|N96383 comes from this
INIAWSKSFSHPIPNRPARHSLQPPLRLRRPPPTGAAVNRNRAMASADLLRREEEFYSSLFDSAKGDGARSRSQLIERKIEALEDMATRVSNRRSRKWFNDRLLIELVPRLYVEEIKGLFAPPPWGEQVPLSAFYRANVGEWDSFRSIDMDAEARLMQHMKKSLEKPRNHVDEGESIALNAWHRIDRHTREAIKRNFLPDLLGIYEERVRAFIEDASDKDALVLNVQDPFQRLLLHGVCEFYNVSSTTTSSVREDGRPWKATTIKKRQGTGVPSRITLVSFLRMKKNGSQ

SEQ ID NO: 10936 - protein, 247 aa, Zea mays subsp. mays
  peptide (1)..(247): Ceres Seq. ID no. 12412025
  misc_feature (1)..(246): Homolog of NCBI NO: 18379075 NR Description: expressed protein; protein id: At1g03250.1, by cDNA: 40461. [Arabidopsis thaliana] unknown [Arabidopsis thaliana] >gi|22022560|gb|AAM83237.1|
  misc_feature (1)..(200): Homolog of NCBI NO: 25372999 NR Description: hypothetical protein F15K9.15 [imported] - thaliana >gi|3850581|gb|AAC72121.1| EST gb|N96383 comes from this
MASADLLRREEEFYSSLFDSAKGDGARSRSQLIERKIEALEDMATRVSNRRSRKWFNDRLLIELVPRLYVEEIKGLFAPPPWGEQVPLSAFYRANVGEWDSFRSIDMDAEARLMQHMKKSLEKPRNHVDEGESIALNAWHRIDRHTREAIKRNFLPDLLGIYEERVRAFIEDASDKDALVLNVQDPFQRLLLHGVCEFYNVSSTTTSSVREDGRPWKATTIKKRQGTGVPSRITLVSFLRMKKNGSQ

SEQ ID NO: 10937 - protein, 205 aa, Zea mays subsp. mays
  peptide (1)..(205): Ceres Seq. ID no. 12412026
  misc_feature (1)..(204): Homolog of NCBI NO: 18379075 NR Description: expressed protein; protein id: At1g03250.1, by cDNA: 40461. [Arabidopsis thaliana] unknown [Arabidopsis thaliana] >gi|22022560|gb|AAM83237.1|
  misc_feature (1)..(158): Homolog of NCBI NO: 25372999 NR Description: hypothetical protein F15K9.15 [imported] - thaliana >gi|3850581|gb|AAC72121.1| EST gb|N96383 comes from this
MATRVSNRRSRKWFNDRLLIELVPRLYVEEIKGLFAPPPWGEQVPLSAFYRANVGEWDSFRSIDMDAEARLMQHMKKSLEKPRNHVDEGESIALNAWHRIDRHTREAIKRNFLPDLLGIYEERVRAFIEDASDKDALVLNVQDPFQRLLLHGVCEFYNVSSTTTSSVREDGRPWKATTIKKRQGTGVPSRITLVSFLRMKKNGSQ

SEQ ID NO: 10938 - DNA, 1316 bp, Zea mays subsp. mays
  misc_feature (1)..(1316): Ceres Seq. ID no. 12412019
  misc_feature: MA Experiment ID: 108526 Result: Up-regulated in Transcription
  misc_feature: MA Experiment 108526 PARAMETER Experiment Name: Zm_5mM_NO_P Parameter: Age (day) Value: 8
  misc_feature: MA Experiment 108526 PARAMETER Experiment Name: Zm_5mM_NO_P Parameter: Organism Value: Zea mays
  misc_feature: MA Experiment 108526 PARAMETER Experiment Name: Zm_5mM_NO_P Parameter: Plant Line Value: 35A19
  misc_feature: MA Experiment 108526 PARAMETER Experiment Name: Zm_5mM_NO_P Parameter: Timepoint (hr) Value: 1
  misc_feature: MA Experiment 108526 PARAMETER Experiment Name: Zm_5mM_NO_P Parameter: Tissue Value: Aerial
  misc_feature: MA Experiment 108526 PARAMETER Experiment Name: Zm_5mM_NO_P Parameter: Treatment Value: 5mM NO vs. No Treatment
  misc_feature: MA Experiment ID: 108527 Result: Up-regulated in Transcription
  misc_feature: MA Experiment 108527 PARAMETER Experiment Name: Zm_5mM_NO_P Parameter: Age (day) Value: 8
  misc_feature: MA Experiment 108527 PARAMETER Experiment Name: Zm_5mM_NO_P Parameter: Organism Value: Zea mays
  misc_feature: MA Experiment 108527 PARAMETER Experiment Name: Zm_5mM_NO_P Parameter: Plant Line Value: 35A19
  misc_feature: MA Experiment 108527 PARAMETER Experiment Name: Zm_5mM_NO_P Parameter: Timepoint (hr) Value: 6
  misc_feature: MA Experiment 108527 PARAMETER Experiment Name: Zm_5mM_NO_P Parameter: Tissue Value: Aerial
  misc_feature: MA Experiment 108527 PARAMETER Experiment Name: Zm_5mM_NO_P Parameter: Treatment Value: 5mM NO vs. No Treatment
  misc_feature: MA Experiment ID: 108528 Result: Up-regulated in Transcription
  misc_feature: MA Experiment 108528 PARAMETER Experiment Name: Zm_Imbibed_Seeds_P Parameter: Age (day) Value: 5 vs. 2
  misc_feature: MA Experiment 108528 PARAMETER Experiment Name: Zm_Imbibed_Seeds_P Parameter: Organism Value: Zea mays
  misc_feature: MA Experiment 108528 PARAMETER Experiment Name: Zm_Imbibed_Seeds_P Parameter: Plant Line Value: 35A19
  misc_feature: MA Experiment 108528 PARAMETER Experiment Name: Zm_Imbibed_Seeds_P Parameter: Tissue Value: Aerial vs. Embryo
  misc_feature: MA Experiment ID: 108530 Result: Up-regulated in Transcription
  misc_feature: MA Experiment 108530 PARAMETER Experiment Name: Zm_Imbibed_Seeds_P Parameter: Age (day) Value: 6 vs. 2
  misc_feature: MA Experiment 108530 PARAMETER Experiment Name: Zm_Imbibed_Seeds_P Parameter: Organism Value: Zea mays
  misc_feature: MA Experiment 108530 PARAMETER Experiment Name: Zm_Imbibed_Seeds_P Parameter: Plant Line Value: 35A19
  misc_feature: MA Experiment 108530 PARAMETER Experiment Name: Zm_Imbibed_Seeds_P Parameter: Tissue Value: Aerial vs. Embryo
  misc_feature: MA Experiment ID: 108534 Result: Up-regulated in Transcription
  misc_feature: MA Experiment 108534 PARAMETER Experiment Name: Zm_4deg_Cold_P Parameter: Age (hr) Value: 8
  misc_feature: MA Experiment 108534 PARAMETER Experiment Name: Zm_4deg_Cold_P Parameter: Organism Value: Zea mays
  misc_feature: MA Experiment 108534 PARAMETER Experiment Name: Zm_4deg_Cold_P Parameter: Plant Line Value: 35A19
  misc_feature: MA Experiment 108534 PARAMETER Experiment Name: Zm_4deg_Cold_P Parameter: Temperature (deg C) Value: 4 vs. 22
  misc_feature: MA Experiment 108534 PARAMETER Experiment Name: Zm_4deg_Cold_P Parameter: Timepoint (hr) Value: 6
  misc_feature: MA Experiment 108534 PARAMETER Experiment Name: Zm_4deg_Cold_P Parameter: Tissue Value: Aerial
  misc_feature: MA Experiment ID: 108542 Result: Up-regulated in Transcription
  misc_feature: MA Experiment 108542 PARAMETER Experiment Name: Zm_150mM_NaCl_P Parameter: Age (day) Value: 8
  misc_feature: MA Experiment 108542 PARAMETER Experiment Name: Zm_150mM_NaCl_P Parameter: Organism Value: Zea mays
  misc_feature: MA Experiment 108542 PARAMETER Experiment Name: Zm_150mM_NaCl_P Parameter: Plant Line Value: 35A19
  misc_feature: MA Experiment 108542 PARAMETER Experiment Name: Zm_150mM_NaCl_P Parameter: Timepoint (hr) Value: 6
  misc_feature: MA Experiment 108542 PARAMETER Experiment Name: Zm_150mM_NaCl_P Parameter: Tissue Value: Aerial
  misc_feature: MA Experiment 108542 PARAMETER Experiment Name: Zm_150mM_NaCl_P Parameter: Treatment Value: 150mM NaCl vs. No Treatment
  misc_feature: MA Experiment ID: 108559 Result: Up-regulated in Transcription
  misc_feature: MA Experiment 108559 PARAMETER Experiment Name: Zm_5mM_NO_P Parameter: Age (day) Value: 8
  misc_feature: MA Experiment 108559 PARAMETER Experiment Name: Zm_5mM_NO_P Parameter: Organism Value: Zea mays
  misc_feature: MA Experiment 108559 PARAMETER Experiment Name: Zm_5mM_NO_P Parameter: Plant Line Value: 35A19
  misc_feature: MA Experiment 108559 PARAMETER Experiment Name: Zm_5mM_NO_P Parameter: Timepoint (hr) Value: 12
  misc_feature: MA Experiment 108559 PARAMETER Experiment Name: Zm_5mM_NO_P Parameter: Tissue Value: Aerial
  misc_feature: MA Experiment 108559 PARAMETER Experiment Name: Zm_5mM_NO_P Parameter: Treatment Value: 5mM NO vs. No Treatment
  misc_feature: MA Experiment ID: 20000108 Result: Down-regulated in Transcription
  misc_feature: MA Experiment 20000108 PARAMETER Experiment Name: Zm_Root-Tips_P Parameter: Age (day) Value: 12
  misc_feature: MA Experiment 20000108 PARAMETER Experiment Name: Zm_Root-Tips_P Parameter: Organism Value: Zea mays
  misc_feature: MA Experiment 20000108 PARAMETER Experiment Name: Zm_Root-Tips_P Parameter: Tissue Value: Root tips vs. Root mid region    35
  misc_feature: MA Experiment 20000108 PARAMETER Experiment Name: Zm_Root-Tips_P Parameter: Tissue Value: Root tips vs. Root mid region   Sequence Listing-Misc Features (4)
  misc_feature: MA Experiment ID: 20000480 Result: Down-regulated in Transcription
  misc_feature: MA Experiment 20000480 PARAMETER Experiment Name: Zm_Drought_P Parameter: Age (day) Value: 11
  misc_feature: MA Experiment 20000480 PARAMETER Experiment Name: Zm_Drought_P Parameter: Organism Value: Zea mays
  misc_feature: MA Experiment 20000480 PARAMETER Experiment Name: Zm_Drought_P Parameter: Plant Line Value: 35A19
  misc_feature: MA Experiment 20000480 PARAMETER Experiment Name: Zm_Drought_P Parameter: Timepoint (hr) Value: 72
  misc_feature: MA Experiment 20000480 PARAMETER Experiment Name: Zm_Drought_P Parameter: Tissue Value: Aerial
  misc_feature: MA Experiment 20000480 PARAMETER Experiment Name: Zm_Drought_P Parameter: Treatment Value: Drought vs. No Drought
  misc_feature: MA Experiment ID: 20000532 Result: Up-regulated in Transcription
  misc_feature: MA Experiment 20000532 PARAMETER Experiment Name: Zm_0.001percent_MeJA_P Parameter: Age (day) Value: 10
  misc_feature: MA Experiment 20000532 PARAMETER Experiment Name: Zm_0.001percent_MeJA_P Parameter: Organism Value: Zea mays
  misc_feature: MA Experiment 20000532 PARAMETER Experiment Name: Zm_0.001percent_MeJA_P Parameter: Plant Line Value: 35A19
  misc_feature: MA Experiment 20000532 PARAMETER Experiment Name: Zm_0.001percent_MeJA_P Parameter: Timepoint (hr) Value: 48
  misc_feature: MA Experiment 20000532 PARAMETER Experiment Name: Zm_0.001percent_MeJA_P Parameter: Tissue Value: Aerial
  misc_feature: MA Experiment 20000532 PARAMETER Experiment Name: Zm_0.001percent_MeJA_P Parameter: Treatment Value: 0.001percent MeJA vs. No Treatment
  misc_feature: MA Experiment ID: 20000533 Result: Up-regulated in Transcription
  misc_feature: MA Experiment 20000533 PARAMETER Experiment Name: Zm_0.001percent_MeJA_P Parameter: Age (day) Value: 11
  misc_feature: MA Experiment 20000533 PARAMETER Experiment Name: Zm_0.001percent_MeJA_P Parameter: Organism Value: Zea mays
  misc_feature: MA Experiment 20000533 PARAMETER Experiment Name: Zm_0.001percent_MeJA_P Parameter: Plant Line Value: 35A19
  misc_feature: MA Experiment 20000533 PARAMETER Experiment Name: Zm_0.001percent_MeJA_P Parameter: Timepoint (hr) Value: 72
  misc_feature: MA Experiment 20000533 PARAMETER Experiment Name: Zm_0.001percent_MeJA_P Parameter: Tissue Value: Aerial
  misc_feature: MA Experiment 20000533 PARAMETER Experiment Name: Zm_0.001percent_MeJA_P Parameter: Treatment Value: 0.001percent MeJA vs. No Treatment
  misc_feature: MA Experiment ID: 20000626 Result: Up-regulated in Transcription
  misc_feature: MA Experiment 20000626 PARAMETER Experiment Name: Zm_Herbicide-Treatments_P Parameter: Timepoint (hr) Value: 12
  misc_feature: MA Experiment 20000626 PARAMETER Experiment Name: Zm_Herbicide-Treatments_P Parameter: Tissue Value: Aerial
  misc_feature: MA Experiment 20000626 PARAMETER Experiment Name: Zm_Herbicide-Treatments_P Parameter: Treatment Value: Roundup vs. No Treatment
  misc_feature: MA Experiment ID: 20000627 Result: Up-regulated in Transcription
  misc_feature: MA Experiment 20000627 PARAMETER Experiment Name: Zm_Herbicide-Treatments_P Parameter: Timepoint (hr) Value: 12
  misc_feature: MA Experiment 20000627 PARAMETER Experiment Name: Zm_Herbicide-Treatments_P Parameter: Tissue Value: Aerial
  misc_feature: MA Experiment 20000627 PARAMETER Experiment Name: Zm_Herbicide-Treatments_P Parameter: Treatment Value: Finale vs. No Treatment
  misc_feature: MA Experiment ID: 20000633 Result: Up-regulated in Transcription
  misc_feature: MA Experiment 20000633 PARAMETER Experiment Name: Zm_Herbicide-Treatments_P Parameter: Timepoint (hr) Value: 4
  misc_feature: MA Experiment 20000633 PARAMETER Experiment Name: Zm_Herbicide-Treatments_P Parameter: Tissue Value: Aerial
  misc_feature: MA Experiment 20000633 PARAMETER Experiment Name: Zm_Herbicide-Treatments_P Parameter: Treatment Value: Trimec vs. No Treatment
  misc_feature: MA Experiment ID: 20001608 Result: Down-regulated in Transcription
  misc_feature: MA Experiment 20001608 PARAMETER Experiment Name: Zm_50ppm_KNO3_L-to-H_P Parameter: Age (day) Value: 21
  misc_feature: MA Experiment 20001608 PARAMETER Experiment Name: Zm_50ppm_KNO3_L-to-H_P Parameter: Organism Value: Zea mays
  misc_feature: MA Experiment 20001608 PARAMETER Experiment Name: Zm_50ppm_KNO3_L-to-H_P Parameter: Plant Line Value: 35A19
  misc_feature: MA Experiment 20001608 PARAMETER Experiment Name: Zm_50ppm_KNO3_L-to-H_P Parameter: Timepoint (hr) Value: 48
  misc_feature: MA Experiment 20001608 PARAMETER Experiment Name: Zm_50ppm_KNO3_L-to-H_P Parameter: Tissue Value: Shoots
  misc_feature: MA Experiment 20001608 PARAMETER Experiment Name: Zm_50ppm_KNO3_L-to-H_P Parameter: Treatment Value: 50ppm KNO3 vs. 50ppm KCl
ccaagaccaagaccaacaccactccactccctccatttccctcacctcccgcagcagctagccgccagccaacaaccgaaccaaccaaccaacccacaggccacagcgagcgagtaaagcgtccaatggtagcgatggcggccgtgcagcagcagcagcagcagcagcgccgcgacgcggaggcggagctcaacctgcccccgggcttccggttccacccgacggacgaggagctggtggcgcactacctctgcgcgcgcgccgcggggcgccgcccgccggtgtccatcatcgccgaggtcgacctgtaccgcttcgacccctgggacctgccggagcgcgccctcttcgggcgccgcaagtggtacttcttcacgccgcgggaccgcaagtaccccaacggctcccgccccaaccgcgccgccgggtcgggctactggaaggccacgggcgcggacaagcccgtggagcacgagggccggacggcggggatcaagaaggcgctcgtgttctaccacggcaagccgccgcgcggggtcaagacggagtggatcatgcacgagtaccgcctcgccgaagccggcggcgcccgcgccaagaagtccggcgccggcacgctcaggctggatgactgggtgctgtgccgcctgtacaacaagaagaacgagtgggagaagatgcagcagcagaaggagaaggagaagaaggcgatggagtcggaggcgtcgctctcgcactcccactccgacacgcggacgccggaatcggagatcgacgacgaccccgttcccggagctgggctctctaccggcgttcgacgacatgggcgcagcccccagcccctgccggcgtcgtcctgcccaaggaggaggtggaggacttcggcgacctcggcggcgacgactggctcgcgggcatcaacctcgacgacctgcagatgccgggggacgccgccgatttctacggctccatgctcgtctcgccgatggccgccaagatggagccggacggcggcttccccttcttctgagatccttcggcgactccggggacgaccggatgcagcgcaacgcaaactgtgtatagttcagattttcttcatggaaccaacaacaacaaaaaaagttcttgctaatatcttgttctagtggtgtagtgcagaagtagcagcaacatgattgaagttccattgtagtactgatgttcatcgccacttgagctgtgacaagtgacgacattctttcgtttcttggctgcaaattcttcgttgtccagaatataatttcagatgggtaatgccaattcgggacgtgttg

SEQ ID NO: 10939 - protein, 381 aa, Zea mays subsp. mays
  peptide (1)..(381): Ceres Seq. ID no. 12412020
  misc_feature (65)..(191): Pfam Name: No apical meristem (NAM) protein Pfam Description: No apical meristem (NAM) protein
  misc_feature (55)..(263): Homolog of NCBI NO: 4218535 NR Description: GRAB1 protein [Triticum sp.]
  misc_feature (57)..(263): Homolog of NCBI NO: 34900404 NR Description: OsNAC3 protein [Oryza sativa (japonica
  misc_feature (54)..(303): Homolog of NCBI NO: 40786563 NR Description: putative NAC-domain protein [Oryza sativa
  misc_feature (56)..(275): Homolog of NCBI NO: 34909234 NR Description: development regulation gene OsNAC4 [Oryza sativa
  misc_feature (61)..(263): Homolog of NCBI NO: 21105748 NR Description: nam-like protein 10 [Petunia x hybrida]
  misc_feature (62)..(323): Homolog of NCBI NO: 21105734 NR Description: nam-like protein 3 [Petunia x hybrida]
  misc_feature (60)..(288): Homolog of NCBI NO: 22326685 NR Description: Expressed protein; protein id: At5g08790.1, by cDNA: gi_19424090 [Arabidopsis thaliana] ATAF2 protein [Arabidopsis thaliana] >gi|19424091|gb|AAL87335.1|
  misc_feature (62)..(233): Homolog of NCBI NO: 40647397 NR Description: NAC domain protein [Lycopersicon esculentum]
  misc_feature (62)..(233): Homolog of NCBI NO: 14485513 NR Description: putative NAC domain protein [Solanum tuberosum]
  misc_feature (50)..(261): Homolog of NCBI NO: 30697896 NR Description: No apical meristem (NAM) protein family thaliana] >gi|24030239|gb|AAN41296.1| unknown protein
KTKTNTTPLPPFPSPPAAASRQPTTEPTNQPTGHSERVKRPMVAMAAVQQQQQQQRRDAEAELNLPPGFRFHPTDEELVAHYLCARAAGRRPPVSIIAEVDLYRFDPWDLPERALFGRRKWYFFTPRDRKYPNGSRPNRAAGSGYWKATGADKPVEHEGRTAGIKKALVFYHGKPPRGVKTEWIMHEYRLAEAGGARAKKSGAGTLRLDDWVLCRLYNKKNEWEKMQQQKEKEKKAMESEASLSHSHSDTRTPESEIDDDPVPGAGLSTGVRRHGRSPQPLPASSCPRRRWRTSATSAATTGSRASTSTTCRCRGTPPISTAPCSSRRWPPRWSRTAASPSSEILRRLRGRPDAAQRKLCIVQIFFMEPTTTKKVLANILF

SEQ ID NO: 10940 - protein, 340 aa, Zea mays subsp. mays
  peptide (1)..(340): Ceres Seq. ID no. 12412021
  misc_feature (24)..(150): Pfam Name: No apical meristem (NAM) protein Pfam Description: No apical meristem (NAM) protein
  misc_feature (14)..(222): Homolog of NCBI NO: 4218535 NR Description: GRAB1 protein [Triticum sp.]
  misc_feature (16)..(222): Homolog of NCBI NO: 34900404 NR Description: OsNAC3 protein [Oryza sativa (japonica
  misc_feature (13)..(262): Homolog of NCBI NO: 40786563 NR Description: putative NAC-domain protein [Oryza sativa
  misc_feature (15)..(234): Homolog of NCBI NO: 34909234 NR Description: development regulation gene OsNAC4 [Oryza sativa
  misc_feature (20)..(222): Homolog of NCBI NO: 21105748 NR Description: nam-like protein 10 [Petunia x hybrida]
  misc_feature (21)..(282): Homolog of NCBI NO: 21105734 NR Description: nam-like protein 3 [Petunia x hybrida]
  misc_feature (19)..(247): Homolog of NCBI NO: 22326685 NR Description: Expressed protein; protein id: At5g08790.1, by cDNA: gi_19424090 [Arabidopsis thaliana] ATAF2 protein [Arabidopsis thaliana] >gi|19424091|gb|AAL87335.1|
  misc_feature (21)..(192): Homolog of NCBI NO: 40647397 NR Description: NAC domain protein [Lycopersicon esculentum]
  misc_feature (21)..(192): Homolog of NCBI NO: 14485513 NR Description: putative NAC domain protein [Solanum tuberosum]
  misc_feature (9)..(220): Homolog of NCBI NO: 30697896 NR Description: No apical meristem (NAM) protein family thaliana] >gi|24030239|gb|AAN41296.1| unknown protein
MVAMAAVQQQQQQQRRDAEAELNLPPGFRFHPTDEELVAHYLCARAAGRRPPVSIIAEVDLYRFDPWDLPERALFGRRKWYFFTPRDRKYPNGSRPNRAAGSGYWKATGADKPVEHEGRTAGIKKALVFYHGKPPRGVKTEWIMHEYRLAEAGGARAKKSGAGTLRLDDWVLCRLYNKKNEWEKMQQQKEKEKKAMESEASLSHSHSDTRTPESEIDDDPVPGAGLSTGVRRHGRSPQPLPASSCPRRRWRTSATSAATTGSRASTSTTCRCRGTPPISTAPCSSRRWPPRWSRTAASPSSEILRRLRGRPDAAQRKLCIVQIFFMEPTTTKKVLANILF

SEQ ID NO: 10941 - protein, 337 aa, Zea mays subsp. mays
  peptide (1)..(337): Ceres Seq. ID no. 12412022
  misc_feature (21)..(147): Pfam Name: No apical meristem (NAM) protein Pfam Description: No apical meristem (NAM) protein
  misc_feature (11)..(219): Homolog of NCBI NO: 4218535 NR Description: GRAB1 protein [Triticum sp.]
  misc_feature (13)..(219): Homolog of NCBI NO: 34900404 NR Description: OsNAC3 protein [Oryza sativa (japonica
  misc_feature (10)..(259): Homolog of NCBI NO: 40786563 NR Description: putative NAC-domain protein [Oryza sativa
  misc_feature (12)..(231): Homolog of NCBI NO: 34909234 NR Description: development regulation gene OsNAC4 [Oryza sativa
  misc_feature (17)..(219): Homolog of NCBI NO: 21105748 NR Description: nam-like protein 10 [Petunia x hybrida]
  misc_feature (18)..(279): Homolog of NCBI NO: 21105734 NR Description: nam-like protein 3 [Petunia x hybrida]
  misc_feature (16)..(244): Homolog of NCBI NO: 22326685 NR Description: Expressed protein; protein id: At5g08790.1, by cDNA: gi_19424090 [Arabidopsis thaliana] ATAF2 protein [Arabidopsis thaliana] >gi|19424091|gb|AAL87335.1|
  misc_feature (18)..(189): Homolog of NCBI NO: 40647397 NR Description: NAC domain protein [Lycopersicon esculentum]
  misc_feature (18)..(189): Homolog of NCBI NO: 14485513 NR Description: putative NAC domain protein [Solanum tuberosum]
  misc_feature (6)..(217): Homolog of NCBI NO: 30697896 NR Description: No apical meristem (NAM) protein family thaliana] >gi|24030239|gb|AAN41296.1| unknown protein
MAAVQQQQQQQRRDAEAELNLPPGFRFHPTDEELVAHYLCARAAGRRPPVSIIAEVDLYRFDPWDLPERALFGRRKWYFFTPRDRKYPNGSRPNRAAGSGYWKATGADKPVEHEGRTAGIKKALVFYHGKPPRGVKTEWIMHEYRLAEAGGARAKKSGAGTLRLDDWVLCRLYNKKNEWEKMQQQKEKEKKAMESEASLSHSHSDTRTPESEIDDDPVPGAGLSTGVRRHGRSPQPLPASSCPRRRWRTSATSAATTGSRASTSTTCRCRGTPPISTAPCSSRRWPPRWSRTAASPSSEILRRLRGRPDAAQRKLCIVQIFFMEPTTTKKVLANILF

SEQ ID NO: 10942 - DNA, 1516 bp, Zea mays subsp. mays
  misc_feature (1)..(1516): Ceres Seq. ID no. 12340974
  misc_feature: MA Experiment ID: 108535 Result: Up-regulated in Transcription
  misc_feature: MA Experiment 108535 PARAMETER Experiment Name: Zm_Meristem_P Parameter: Age (day) Value: 8
  misc_feature: MA Experiment 108535 PARAMETER Experiment Name: Zm_Meristem_P Parameter: Organism Value: Zea mays
  misc_feature: MA Experiment 108535 PARAMETER Experiment Name: Zm_Meristem_P Parameter: Plant Line Value: 35A19
  misc_feature: MA Experiment 108535 PARAMETER Experiment Name: Zm_Meristem_P Parameter: Tissue Value: Root Meristem vs. Above Root Meristem
  misc_feature: MA Experiment ID: 108543 Result: Up-regulated in Transcription
  misc_feature: MA Experiment ID: 108544 Result: Down-regulated in Transcription
  misc_feature: MA Experiment ID: 108556 Result: Down-regulated in Transcription
  misc_feature: MA Experiment 108556 PARAMETER Experiment Name: Zm_Drought_P Parameter: Age (day) Value: 9
  misc_feature: MA Experiment 108556 PARAMETER Experiment Name: Zm_Drought_P Parameter: Organism Value: Zea mays
  misc_feature: MA Experiment 108556 PARAMETER Experiment Name: Zm_Drought_P Parameter: Plant Line Value: 35A19
  misc_feature: MA Experiment 108556 PARAMETER Experiment Name: Zm_Drought_P Parameter: Timepoint (hr) Value: 24
  misc_feature: MA Experiment 108556 PARAMETER Experiment Name: Zm_Drought_P Parameter: Tissue Value: Aerial
  misc_feature: MA Experiment 108556 PARAMETER Experiment Name: Zm_Drought_P Parameter: Treatment Value: Drought vs. No Drought
  misc_feature: MA Experiment ID: 20000478 Result: Down-regulated in Transcription
  misc_feature: MA Experiment 20000478 PARAMETER Experiment Name: Zm_5mM_SA_P Parameter: Age (day) Value: 11
  misc_feature: MA Experiment 20000478 PARAMETER Experiment Name: Zm_5mM_SA_P Parameter: Organism Value: Zea mays
  misc_feature: MA Experiment 20000478 PARAMETER Experiment Name: Zm_5mM_SA_P Parameter: Plant Line Value: 35A19
  misc_feature: MA Experiment 20000478 PARAMETER Experiment Name: Zm_5mM_SA_P Parameter: Timepoint (hr) Value: 72
  misc_feature: MA Experiment 20000478 PARAMETER Experiment Name: Zm_5mM_SA_P Parameter: Tissue Value: Aerial
  misc_feature: MA Experiment 20000478 PARAMETER Experiment Name: Zm_5mM_SA_P Parameter: Treatment Value: 5mM SA vs. No Treatment
  misc_feature: MA Experiment ID: 20000479 Result: Down-regulated in Transcription
  misc_feature: MA Experiment 20000479 PARAMETER Experiment Name: Zm_Drought_P Parameter: Age (day) Value: 10
  misc_feature: MA Experiment 20000479 PARAMETER Experiment Name: Zm_Drought_P Parameter: Organism Value: Zea mays
  misc_feature: MA Experiment 20000479 PARAMETER Experiment Name: Zm_Drought_P Parameter: Plant Line Value: 35A19
  misc_feature: MA Experiment 20000479 PARAMETER Experiment Name: Zm_Drought_P Parameter: Timepoint (hr) Value: 48
  misc_feature: MA Experiment 20000479 PARAMETER Experiment Name: Zm_Drought_P Parameter: Tissue Value: Aerial
  misc_feature: MA Experiment 20000479 PARAMETER Experiment Name: Zm_Drought_P Parameter: Treatment Value: Drought vs. No Drought
  misc_feature: MA Experiment ID: 20000480 Result: Down-regulated in Transcription
  misc_feature: MA Experiment 20000480 PARAMETER Experiment Name: Zm_Drought_P Parameter: Age (day) Value: 11
  misc_feature: MA Experiment 20000480 PARAMETER Experiment Name: Zm_Drought_P Parameter: Organism Value: Zea mays
  misc_feature: MA Experiment 20000480 PARAMETER Experiment Name: Zm_Drought_P Parameter: Plant Line Value: 35A19
  misc_feature: MA Experiment 20000480 PARAMETER Experiment Name: Zm_Drought_P Parameter: Timepoint (hr) Value: 72
  misc_feature: MA Experiment 20000480 PARAMETER Experiment Name: Zm_Drought_P Parameter: Tissue Value: Aerial
  misc_feature: MA Experiment 20000480 PARAMETER Experiment Name: Zm_Drought_P Parameter: Treatment Value: Drought vs. No Drought
  misc_feature: MA Experiment ID: 20000626 Result: Down-regulated in Transcription
  misc_feature: MA Experiment 20000626 PARAMETER Experiment Name: Zm_Herbicide-Treatments_P Parameter: Timepoint (hr) Value: 12
  misc_feature: MA Experiment 20000626 PARAMETER Experiment Name: Zm_Herbicide-Treatments_P Parameter: Tissue Value: Aerial
  misc_feature: MA Experiment 20000626 PARAMETER Experiment Name: Zm_Herbicide-Treatments_P Parameter: Treatment Value: Roundup vs. No Treatment
aaccagctccggcccaaacacagccacgagcacctacacccccccgctgtcacctctccttccatcgccgcctcccttacccctctcgctgtgctcctccgcaccgtcattccctagcattccccacgggcgagtggcggcttggtcgagatgggcgatgcggttgatgacatcatctgtgcaacggatgcggcggtcgccgtcgaggatgcggccagtgggaagcccgcaatgctctctagcttaggggggcagggtgaggaagagcatgaggagaaggacaatgaggacaagtcaggcgagagcgaggtgatcaacccgccagaagacgctggcggggaggccacctcacccctggaagggttgaagcctcgcctttccaaggggaatcaaagccatggacctaatgctgtcaaatcaaagagcccaacgagtggagacgaaggtcagacgaggaaaaaggctcccaattcttctcttcctaaggcacccattgtccaggtgtcccatggtgacgctggtgtcggcagtaataaagatggcaagaatgagtctcgctcatcttccgtggatgcaacattgctggatgactccaaggagaaaaggaaaactcaaaagccattagcacagctcttttccatcaaaagtgacgaagaacagtcaaatggtgagagtgcaaagcctcgaaaagttggcagcattccatcatatggtttcaccttcaagtgtgatgagagatctgaaaaaagaagagagttctattcgaagcttgaggagaagattcatgcaagagagttagaaataagcaatttgcaagcgaaatcaaaggaaactgaagaagcagaactcaaaatgctgagaaagagtttgaacttcaaggcaacaccaatgccaagcttctataaggaaccaactcctgtcaaggttgaattgaaaaagatccccccaacaagagccaaatcgccaaagtttggtcgttctaaaaacaagtccacaccagagactgaagaaaatgctaccgcggaccagcctgcccacctgagcctcgaggagaatgtttctcaaaccggtgtgaaaaaaccaaccccgttgaatccagcaaagaagccccagaggaagtcactccccagactgccatctgaagaaaccggtccgcttgatgccacctcaaggcaacttataaagagcgccaagctggatgcagttagtgctccggagacaggatcagctacaggacaggcacaactacaaggaagtcagacggaaacagattctggtcaggggccagttgaagctggagctaatcctgatgaacaagacgccagcgaacagagtgttgtttagtgaagatcacgatgaccaaaccagctgatttgtgatgtgcatggtgttcctcggctttgtataatatattgtgcttgcctgctagagtaacctgtagtctgtattatgttatgtgatatatactactactcctggtttattttcctggaattgagccgtatgttgcttatcg

SEQ ID NO: 10943 - protein, 397 aa, Zea mays subsp. mays; identical to SEQ ID NO: 10816
  peptide (1)..(397): Ceres Seq. ID no. 12340975
  misc_feature (1)..(393): Homolog of NCBI NO: 18417986 NR Description: putative protein; protein id: At4g32330.1, by cDNA: gi_14334555, supported by cDNA: gi_21280970 [Arabidopsis >gi|14334556|gb|AAK59686.1| unknown protein [Arabidopsis
  misc_feature (6)..(395): Homolog of NCBI NO: 15224733 NR Description: unknown protein; protein id: At2g25480.1
  misc_feature (48)..(325): Homolog of NCBI NO: 18403980 NR Description: expressed protein; protein id: At2g35880.1, by cDNA: gi_16209719 [Arabidopsis thaliana] At2g35880/F11F19.21 [Arabidopsis thaliana]
  misc_feature (121)..(325): Homolog of NCBI NO: 25408425 NR Description: hypothetical protein At2g35880 [imported] -
  misc_feature (13)..(263): Homolog of NCBI NO: 7485356 NR Description: hypothetical protein F10M6.40 - Arabidopsis >gi|2864611|emb|CAA16958.1| putative protein [Arabidopsis
  misc_feature (13)..(263): Homolog of NCBI NO: 7486636 NR Description: hypothetical protein F8B4.30 - Arabidopsis >gi|4049335|emb|CAA22560.1| putative protein [Arabidopsis >gi|7270137|emb|CAB79950.1| putative protein [Arabidopsis
  misc_feature (38)..(326): Homolog of NCBI NO: 34897180 NR Description: unknown protein [Oryza sativa (japonica
  misc_feature (36)..(280): Homolog of NCBI NO: 9294199 NR Description: gb|AAF04893.1~gene_id:MXC7.13~similar to unknown
  misc_feature (36)..(280): Homolog of NCBI NO: 15228950 NR Description: unknown protein; protein id: At3g23090.1 thaliana] >gi|27765054|gb|AAO23648.1| At3g23090 [Arabidopsis
  misc_feature (155)..(280): Homolog of NCBI NO: 32395575 NR Description: seed specific protein Bn15D14A [Brassica napus]

SEQ ID NO: 10944 - protein, 370 aa, Zea mays subsp. mays; identical to SEQ ID NO: 10817
  peptide (1)..(370): Ceres Seq. ID no. 12340976
  misc_feature (1)..(366): Homolog of NCBI NO: 18417986 NR Description: putative protein; protein id: At4g32330.1, by cDNA: gi_14334555, supported by cDNA: gi_21280970 [Arabidopsis >gi|14334556|gb|AAK59686.1| unknown protein [Arabidopsis
  misc_feature (1)..(368): Homolog of NCBI NO: 15224733 NR Description: unknown protein; protein id: At2g25480.1
  misc_feature (21)..(298): Homolog of NCBI NO: 18403980 NR Description: expressed protein; protein id: At2g35880.1, by cDNA: gi_16209719 [Arabidopsis thaliana] At2g35880/F11F19.21 [Arabidopsis thaliana]
  misc_feature (94)..(298): Homolog of NCBI NO: 25408425 NR Description: hypothetical protein At2g35880 [imported] -
  misc_feature (1)..(236): Homolog of NCBI NO: 7485356 NR Description: hypothetical protein F10M6.40 - Arabidopsis >gi|2864611|emb|CAA16958.1| putative protein [Arabidopsis
  misc_feature (1)..(236): Homolog of NCBI NO: 7486636 NR Description: hypothetical protein F8B4.30 - Arabidopsis >gi|4049335|emb|CAA22560.1| putative protein [Arabidopsis >gi|7270137|emb|CAB79950.1| putative protein [Arabidopsis
  misc_feature (11)..(299): Homolog of NCBI NO: 34897180 NR Description: unknown protein [Oryza sativa (japonica
  misc_feature (9)..(253): Homolog of NCBI NO: 9294199 NR Description: gb|AAF04893.1~gene_id:MXC7.13~similar to unknown
  misc_feature (9)..(253): Homolog of NCBI NO: 15228950 NR Description: unknown protein; protein id: At3g23090.1 thaliana] >gi|27765054|gb|AAO23648.1| At3g23090 [Arabidopsis
  misc_feature (128)..(253): Homolog of NCBI NO: 32395575 NR Description: seed specific protein Bn15D14A [Brassica napus]

SEQ ID NO: 10945 - DNA, 1309 bp, Zea mays subsp. mays
  misc_feature (1)..(1309): Ceres Seq. ID no. 12412015
  misc_feature: MA Experiment ID: 108544 Result: Down-regulated in Transcription
  misc_feature: MA Experiment ID: 108556 Result: Down-regulated in Transcription
  misc_feature: MA Experiment 108556 PARAMETER Experiment Name: Zm_Drought_P Parameter: Age (day) Value: 9
  misc_feature: MA Experiment 108556 PARAMETER Experiment Name: Zm_Drought_P Parameter: Organism Value: Zea mays
  misc_feature: MA Experiment 108556 PARAMETER Experiment Name: Zm_Drought_P Parameter: Plant Line Value: 35A19
  misc_feature: MA Experiment 108556 PARAMETER Experiment Name: Zm_Drought_P Parameter: Timepoint (hr) Value: 24
  misc_feature: MA Experiment 108556 PARAMETER Experiment Name: Zm_Drought_P Parameter: Tissue Value: Aerial
  misc_feature: MA Experiment 108556 PARAMETER Experiment Name: Zm_Drought_P Parameter: Treatment Value: Drought vs. No Drought
  misc_feature: MA Experiment ID: 20000478 Result: Down-regulated in Transcription
  misc_feature: MA Experiment 20000478 PARAMETER Experiment Name: Zm_5mM_SA_P Parameter: Age (day) Value: 11
  misc_feature: MA Experiment 20000478 PARAMETER Experiment Name: Zm_5mM_SA_P Parameter: Organism Value: Zea mays
  misc_feature: MA Experiment 20000478 PARAMETER Experiment Name: Zm_5mM_SA_P Parameter: Plant Line Value: 35A19
  misc_feature: MA Experiment 20000478 PARAMETER Experiment Name: Zm_5mM_SA_P Parameter: Timepoint (hr) Value: 72
  misc_feature: MA Experiment 20000478 PARAMETER Experiment Name: Zm_5mM_SA_P Parameter: Tissue Value: Aerial
  misc_feature: MA Experiment 20000478 PARAMETER Experiment Name: Zm_5mM_SA_P Parameter: Treatment Value: 5mM SA vs. No Treatment
  misc_feature: MA Experiment ID: 20000480 Result: Down-regulated in Transcription
  misc_feature: MA Experiment 20000480 PARAMETER Experiment Name: Zm_Drought_P Parameter: Age (day) Value: 11
  misc_feature: MA Experiment 20000480 PARAMETER Experiment Name: Zm_Drought_P Parameter: Organism Value: Zea mays
  misc_feature: MA Experiment 20000480 PARAMETER Experiment Name: Zm_Drought_P Parameter: Plant Line Value: 35A19
  misc_feature: MA Experiment 20000480 PARAMETER Experiment Name: Zm_Drought_P Parameter: Timepoint (hr) Value: 72
  misc_feature: MA Experiment 20000480 PARAMETER Experiment Name: Zm_Drought_P Parameter: Tissue Value: Aerial
  misc_feature: MA Experiment 20000480 PARAMETER Experiment Name: Zm_Drought_P Parameter: Treatment Value: Drought vs. No Drought
aggacgccattagcagcggttggccaccagcccaccacccgacgccggaggcccggaggaggaggcggcgatggcggggaagcacgggcgcaacggcttcgacgacgacaacgtcaaccctttcgcgggaggaagtgttccacctgccaccaattctcgtctctcacctctatcacatgaaccggctgatttctacaatgtggacattcctctcgactcatcaaaggatctgaagaaaaaggagaaagaactccaggctatggaggctgagctaaacaaaagagaacgggaattgaaaaggaaggaagaggcggcatcccgagctggcgttgtgatagaagagaaaaactggcctccctttttccccctcatccaccacgacatttccaatgaaatacctatccatctacaaaggatgcagtaccttgcattctcatcattcttgggattgatagcgtgtctcttttggaatgtcatagcaactacaacagcatggattaaaggggaaggtgttatgatctggctgcttgccattatctacttcatatctggtgcgcctggggcttatgtgttatggtatcgacctctttataatgcaatgagaactgagagcgctttgaagtttgggtggtttttcctattttacatgattcatataatattctgtgtgtgggcagctgtggctcctccattccctttcaaaggaaaatctttggctgggattttaccagcaattgatgtcataagcaagaatgctattgtcgggatattttacttcgttggatttggcttgttctgccttgaatcacttctgagcatcggtgtcattcagcaagtctacatgtatttccgtggaagtggaaaagctgcagagatgaaacgtgaggcagcacgtagtgctctaagttcagccttctgatgaacatagggcggtctgattagagcagtagatggataagggaagggaacgagatgtgccaattaagccacgcggtcttgtacatcactgcagtacgtggatttggatcgctgaaagcgtacagctgatcgtctttttgctcttctgtaaaatatgaacaatcatcatatggtccggatgcgtcagggtgttggtttcatttcttgccatggtttagatgtggttgatagggaaaacggtgaagtatttttttggagcagcgaatataatgtatcttcatcgtacttttacatgtgagtgtaatagcttatttcttgtggtaggaatacagctttgctgtgttttcgggaatgacatttgttgtgtaaggttattcacaatggctatttc

SEQ ID NO: 10946 - protein, 282 aa, Zea mays subsp. mays
  peptide (1)..(282): Ceres Seq. ID no. 12412016
  misc_feature (90)..(264): Pfam Name: SCAMP family Pfam Description: SCAMP family
  misc_feature (1)..(282): Homolog of NCBI NO: 7109232 NR Description: secretory carrier membrane protein [Oryza sativa]
  misc_feature (22)..(282): Homolog of NCBI NO: 34899754 NR Description: putative secretory carrier membrane protein
  misc_feature (1)..(281): Homolog of NCBI NO: 15219893 NR Description: secretory carrier membrane protein; protein id: supported by cDNA: 27197., supported by cDNA: gi_15027862, by cDNA: gi_19310672, supported by cDNA: gi_7109227 [Arabidopsis
  misc_feature (1)..(281): Homolog of NCBI NO: 15220305 NR Description: secretory carrier membrane protein, putative;
  misc_feature (4)..(281): Homolog of NCBI NO: 15226410 NR Description: putative secretory carrier-associated membrane protein id: At2g20840.1 [Arabidopsis thaliana]
  misc_feature (1)..(281): Homolog of NCBI NO: 3941289 NR Description: similarity to SCAMP37 [Pisum sativum]
  misc_feature (4)..(281): Homolog of NCBI NO: 18379111 NR Description: expressed protein; protein id: At1g03550.1, by cDNA: 30006. [Arabidopsis thaliana] F21B7.17 [Arabidopsis thaliana] >gi|21592580|gb|AAM64529.1|
  misc_feature (1)..(281): Homolog of NCBI NO: 25402653 NR Description: hypothetical protein [imported] - Arabidopsis >gi|5734732|gb|AAD49997.1|AC007259_10 Hypothetical protein
  misc_feature (5)..(263): Homolog of NCBI NO: 15222550 NR Description: secretory carrier membrane protein, putative; id: At1g32050.1, supported by cDNA: 34837. [Arabidopsis thaliana]
  misc_feature (5)..(263): Homolog of NCBI NO: 38347080 NR Description: OSJNBa0006A01.21 [Oryza sativa (japonica
MAGKHGRNGFDDDNVNPFAGGSVPPATNSRLSPLSHEPADFYNVDIPLDSSKDLKKKEKELQAMEAELNKRERELKRKEEAASRAGVVIEEKNWPPFFPLIHHDISNEIPIHLQRMQYLAFSSFLGLIACLFWNVIATTTAWIKGEGVMIWLLAIIYFISGAPGAYVLWYRPLYNAMRTESALKFGWFFLFYMIHIIFCVWAAVAPPFPFKGKSLAGILPAIDVISKNAIVGIFYFVGFGLFCLESLLSIGVIQQVYMYFRGSGKAAEMKREAARSALSSAF

SEQ ID NO: 10947 - protein, 219 aa, Zea mays subsp. mays
  peptide (1)..(219): Ceres Seq. ID no. 12412017
  misc_feature (27)..(201): Pfam Name: SCAMP family Pfam Description: SCAMP family
  misc_feature (1)..(200): Homolog of NCBI NO: 38347080 NR Description: OSJNBa0006A01.21 [Oryza sativa (japonica
  misc_feature (1)..(219): Homolog of NCBI NO: 7109232 NR Description: secretory carrier membrane protein [Oryza sativa]
  misc_feature (1)..(219): Homolog of NCBI NO: 34899754 NR Description: putative secretory carrier membrane protein
  misc_feature (1)..(218): Homolog of NCBI NO: 15219893 NR Description: secretory carrier membrane protein; protein id: supported by cDNA: 27197., supported by cDNA: gi_15027862, by cDNA: gi_19310672, supported by cDNA: gi_7109227 [Arabidopsis
  misc_feature (1)..(218): Homolog of NCBI NO: 15220305 NR Description: secretory carrier membrane protein, putative;
  misc_feature (1)..(218): Homolog of NCBI NO: 15226410 NR Description: putative secretory carrier-associated membrane protein id: At2g20840.1 [Arabidopsis thaliana]
  misc_feature (1)..(218): Homolog of NCBI NO: 3941289 NR Description: similarity to SCAMP37 [Pisum sativum]
  misc_feature (1)..(218): Homolog of NCBI NO: 18379111 NR Description: expressed protein; protein id: At1g03550.1, by cDNA: 30006. [Arabidopsis thaliana] F21B7.17 [Arabidopsis thaliana] >gi|21592580|gb|AAM64529.1|
  misc_feature (1)..(218): Homolog of NCBI NO: 25402653 NR Description: hypothetical protein [imported] - Arabidopsis >gi|5734732|gb|AAD49997.1|AC007259_10 Hypothetical protein
  misc_feature (1)..(200): Homolog of NCBI NO: 15222550 NR Description: secretory carrier membrane protein, putative; id: At1g32050.1, supported by cDNA: 34837. [Arabidopsis thaliana]
MEAELNKRERELKRKEEAASRAGVVIEEKNWPPFFPLIHHDISNEIPIHLQRMQYLAFSSFLGLIACLFWNVIATTTAWIKGEGVMIWLLAIIYFISGAPGAYVLWYRPLYNAMRTESALKFGWFFLFYMIHIIFCVWAAVAPPFPFKGKSLAGILPAIDVISKNAIVGIFYFVGFGLFCLESLLSIGVIQQVYMYFRGSGKAAEMKREAARSALSSAF

SEQ ID NO: 10948 - protein, 167 aa, Zea mays subsp. mays
  peptide (1)..(167): Ceres Seq. ID no. 12412018
  misc_feature (1)..(149): Pfam Name: SCAMP family Pfam Description: SCAMP family
  misc_feature (1)..(167): Homolog of NCBI NO: 7109232 NR Description: secretory carrier membrane protein [Oryza sativa]
  misc_feature (1)..(167): Homolog of NCBI NO: 34899754 NR Description: putative secretory carrier membrane protein
  misc_feature (1)..(166): Homolog of NCBI NO: 15219893 NR Description: secretory carrier membrane protein; protein id: supported by cDNA: 27197., supported by cDNA: gi_15027862, by cDNA: gi_19310672, supported by cDNA: gi_7109227 [Arabidopsis
  misc_feature (1)..(166): Homolog of NCBI NO: 15220305 NR Description: secretory carrier membrane protein, putative;
  misc_feature (1)..(166): Homolog of NCBI NO: 15226410 NR Description: putative secretory carrier-associated membrane protein id: At2g20840.1 [Arabidopsis thaliana]
  misc_feature (1)..(166): Homolog of NCBI NO: 3941289 NR Description: similarity to SCAMP37 [Pisum sativum]
  misc_feature (1)..(166): Homolog of NCBI NO: 18379111 NR Description: expressed protein; protein id: At1g03550.1, by cDNA: 30006. [Arabidopsis thaliana] F21B7.17 [Arabidopsis thaliana] >gi|21592580|gb|AAM64529.1|
  misc_feature (1)..(166): Homolog of NCBI NO: 25402653 NR Description: hypothetical protein [imported] - Arabidopsis >gi|5734732|gb|AAD49997.1|AC007259_10 Hypothetical protein
  misc_feature (1)..(148): Homolog of NCBI NO: 15222550 NR Description: secretory carrier membrane protein, putative; id: At1g32050.1, supported by cDNA: 34837. [Arabidopsis thaliana]
  misc_feature (1)..(148): Homolog of NCBI NO: 38347080 NR Description: OSJNBa0006A01.21 [Oryza sativa (japonica
MQYLAFSSFLGLIACLFWNVIATTTAWIKGEGVMIWLLAIIYFISGAPGAYVLWYRPLYNAMRTESALKFGWFFLFYMIHIIFCVWAAVAPPFPFKGKSLAGILPAIDVISKNAIVGIFYFVGFGLFCLESLLSIGVIQQVYMYFRGSGKAAEMKREAARSALSSAF

SEQ ID NO: 10949 - DNA, 1433 bp, Zea mays subsp. mays
  misc_feature (1)..(1433): Ceres Seq. ID no. 12413803
  misc_feature: MA Experiment ID: 108528 Result: Up-regulated in Transcription
  misc_feature: MA Experiment 108528 PARAMETER Experiment Name: Zm_Imbibed_Seeds_P Parameter: Age (day) Value: 5 vs. 2
  misc_feature: MA Experiment 108528 PARAMETER Experiment Name: Zm_Imbibed_Seeds_P Parameter: Organism Value: Zea mays
  misc_feature: MA Experiment 108528 PARAMETER Experiment Name: Zm_Imbibed_Seeds_P Parameter: Plant Line Value: 35A19
  misc_feature: MA Experiment 108528 PARAMETER Experiment Name: Zm_Imbibed_Seeds_P Parameter: Tissue Value: Aerial vs. Embryo
  misc_feature: MA Experiment ID: 108530 Result: Up-regulated in Transcription
  misc_feature: MA Experiment 108530 PARAMETER Experiment Name: Zm_Imbibed_Seeds_P Parameter: Age (day) Value: 6 vs. 2
  misc_feature: MA Experiment 108530 PARAMETER Experiment Name: Zm_Imbibed_Seeds_P Parameter: Organism Value: Zea mays
  misc_feature: MA Experiment 108530 PARAMETER Experiment Name: Zm_Imbibed_Seeds_P Parameter: Plant Line Value: 35A19
  misc_feature: MA Experiment 108530 PARAMETER Experiment Name: Zm_Imbibed_Seeds_P Parameter: Tissue Value: Aerial vs. Embryo
  misc_feature: MA Experiment ID: 108536 Result: Down-regulated in Transcription
  misc_feature: MA Experiment 108536 PARAMETER Experiment Name: Zm_Meristem_P Parameter: Age (day) Value: 8
  misc_feature: MA Experiment 108536 PARAMETER Experiment Name: Zm_Meristem_P Parameter: Organism Value: Zea mays
  misc_feature: MA Experiment 108536 PARAMETER Experiment Name: Zm_Meristem_P Parameter: Plant Line Value: 35A19
  misc_feature: MA Experiment 108536 PARAMETER Experiment Name: Zm_Meristem_P Parameter: Tissue Value: Shoot Meristem vs. Above Shoot Meristem
  misc_feature: MA Experiment ID: 108543 Result: Down-regulated in Transcription
  misc_feature: MA Experiment ID: 108545 Result: Up-regulated in Transcription
  misc_feature: MA Experiment 108545 PARAMETER Experiment Name: Zm_Imbibed_Seeds_P Parameter: Age (day) Value: 3 vs. 2
  misc_feature: MA Experiment 108545 PARAMETER Experiment Name: Zm_Imbibed_Seeds_P Parameter: Organism Value: Zea mays
  misc_feature: MA Experiment 108545 PARAMETER Experiment Name: Zm_Imbibed_Seeds_P Parameter: Plant Line Value: 35A19
  misc_feature: MA Experiment 108545 PARAMETER Experiment Name: Zm_Imbibed_Seeds_P Parameter: Tissue Value: Aerial vs. Embryo
  misc_feature: MA Experiment ID: 108547 Result: Up-regulated in Transcription
  misc_feature: MA Experiment 108547 PARAMETER Experiment Name: Zm_Imbibed_Seeds_P Parameter: Age (day) Value: 4 vs. 2
  misc_feature: MA Experiment 108547 PARAMETER Experiment Name: Zm_Imbibed_Seeds_P Parameter: Organism Value: Zea mays
  misc_feature: MA Experiment 108547 PARAMETER Experiment Name: Zm_Imbibed_Seeds_P Parameter: Plant Line Value: 35A19
  misc_feature: MA Experiment 108547 PARAMETER Experiment Name: Zm_Imbibed_Seeds_P Parameter: Tissue Value: Aerial vs. Embryo
  misc_feature: MA Experiment ID: 108556 Result: Down-regulated in Transcription
  misc_feature: MA Experiment 108556 PARAMETER Experiment Name: Zm_Drought_P Parameter: Age (day) Value: 9
  misc_feature: MA Experiment 108556 PARAMETER Experiment Name: Zm_Drought_P Parameter: Organism Value: Zea mays
  misc_feature: MA Experiment 108556 PARAMETER Experiment Name: Zm_Drought_P Parameter: Plant Line Value: 35A19
  misc_feature: MA Experiment 108556 PARAMETER Experiment Name: Zm_Drought_P Parameter: Timepoint (hr) Value: 24
  misc_feature: MA Experiment 108556 PARAMETER Experiment Name: Zm_Drought_P Parameter: Tissue Value: Aerial
  misc_feature: MA Experiment 108556 PARAMETER Experiment Name: Zm_Drought_P Parameter: Treatment Value: Drought vs. No Drought
  misc_feature: MA Experiment ID: 20000535 Result: Down-regulated in Transcription
  misc_feature: MA Experiment 20000535 PARAMETER Experiment Name: Zm_Hybrid_Seed_Dev_P Parameter: DAP Value: 30 vs. 12
  misc_feature: MA Experiment 20000535 PARAMETER Experiment Name: Zm_Hybrid_Seed_Dev_P Parameter: Organism Value: Zea mays
  misc_feature: MA Experiment 20000535 PARAMETER Experiment Name: Zm_Hybrid_Seed_Dev_P Parameter: Plant Line Value: 35A19
  misc_feature: MA Experiment 20000535 PARAMETER Experiment Name: Zm_Hybrid_Seed_Dev_P Parameter: Tissue Value: Embryo vs. Unfert Floret
atgcctctcatcttcttctccgccgcagcccccctcgtcgccgtctccctgctgcccctccccacccactgctgcctccgcctcaccgccacccgcgcggccgccacgagcacaaccgccaccccgggtcccgctcccgcgagcaccttcgccgtcgaggactacctcatcgccagctgccacctcaccccaccgcaggcgctcaaggcgtccaagagcctggcgcacctcaagtccgcatccaacgcggacgcggtgctcgccttccttgcggacctcgggctctccccaaaggaggtggccgccgttgtggcgtccaatccgcgtgtcctctgcgctcgcatcgaccgttccctggctcctatctccacggagctccgcgcgctcggcctctccccgtcccagatcgcgcgcctcgcgcagatcgccggccgctacttcctctgccgcagcttcgtctccaaggtacggttctggctcccgctcttcggctcccccgagcggctcctccaggccagcgactggaactactggctcctcagctccgacctcgagaaggtggtggagcccaacgtggccttcctcaggaagtgcggcctcagcgcagtcgacatcgccaagctgctcgtggccgcgccgcggctcgtcaccatgcctccggagtatgtccaggacgcggtgcggcgtgccacgcagctcggcgtggcgccgggctcccagatgtttcgccacgcgctctccaccgcgggatgtatcgggcaggagaaggtcgactccaaggtcgccgtcctcaaggagacgctcgggtggtcgcaggaggaggtgagcctggccatcagtaaggcgccgcggatcctggttgcgtccgaggagaggctgcgccggaacgcggagttcctgctcaatgaggtcgggctgccgccgcagtacatcgcccgccgttcggtgcttctcatgtacagcctggagaggcggatagtgccccggcacctcgtgctggtggttctcaaagagaaggggttggttgagcaggaccggtgcttcttcaacgtggtggcaccaacagaagagaaattcttggagaaattcgttgctccctacgaggaatccatccctggtcttgccgatgcttacgagtctgcttgtatggggaaagtgacccggggtctatgactggaatgtcgaggagaatttcgaaggtgtgtgttccctccattgtgcatttgtgtaacctcattctactgatctcgcttcaacagaaaaattattccactgatgaactatcgaagacaaaggcagtttcgtggacattagcttaggtccacactagtaacagcataaattcatgttatagccatgaaaatgttcatttctaacttaaggatcgtttcatatgaaagtgcaagcaataaaattttttcccatgagatttt

SEQ ID NO: 10950 - protein, 390 aa, Zea mays subsp. mays
  peptide (1)..(390): Ceres Seq. ID no. 12413804
  misc_feature (87)..(361): Pfam Name: mTERF Pfam Description: mTERF
  misc_feature (54)..(378): Homolog of NCBI NO: 18415647 NR Description: expressed protein; protein id: At5g07900.1, by cDNA: 22350., supported by cDNA: gi_13878064, supported by gi_17104654 [Arabidopsis thaliana] >gi|11281400|pir||T45615
  misc_feature (1)..(364): Homolog of NCBI NO: 39545750 NR Description: OSJNBb0034I13.16 [Oryza sativa (japonica
  misc_feature (19)..(386): Homolog of NCBI NO: 34394750 NR Description: unknown protein [Oryza sativa (japonica
  misc_feature (37)..(383): Homolog of NCBI NO: 15238313 NR Description: putative protein; protein id: At5g64950.1, by cDNA: 142672. [Arabidopsis thaliana] emb|CAB62602.1~gene_id:MXK3.18~similar to unknown protein
  misc_feature (37)..(383): Homolog of NCBI NO: 21553423 NR Description: unknown [Arabidopsis thaliana]
  misc_feature (49)..(380): Homolog of NCBI NO: 15218140 NR Description: hypothetical protein; protein id: At1g21150.1
  misc_feature (49)..(380): Homolog of NCBI NO: 25511650 NR Description: T22I11.2 protein - Arabidopsis thaliana
  misc_feature (87)..(381): Homolog of NCBI NO: 18412304 NR Description: expressed protein; protein id: At1g79220.1, by cDNA: 6667. [Arabidopsis thaliana] >gi|7487897|pir||T01035
  misc_feature (28)..(301): Homolog of NCBI NO: 15220664 NR Description: hypothetical protein; protein id: At1g61980.1
  misc_feature (268)..(369): Homolog of NCBI NO: 15220664 NR Description: hypothetical protein; protein id: At1g61980.1
MPLIFFSAAAPLVAVSLLPLPTHCCLRLTATRAAATSTTATPGPAPASTFAVEDYLIASCHLTPPQALKASKSLAHLKSASNADAVLAFLADLGLSPKEVAAVVASNPRVLCARIDRSLAPISTELRALGLSPSQIARLAQIAGRYFLCRSFVSKVRFWLPLFGSPERLLQASDWNYWLLSSDLEKVVEPNVAFLRKCGLSAVDIAKLLVAAPRLVTMPPEYVQDAVRRATQLGVAPGSQMFRHALSTAGCIGQEKVDSKVAVLKETLGWSQEEVSLAISKAPRILVASEERLRRNAEFLLNEVGLPPQYIARRSVLLMYSLERRIVPRHLVLVVLKEKGLVEQDRCFFNVVAPTEEKFLEKFVAPYEESIPGLADAYESACMGKVTRGL

SEQ ID NO: 10951 - protein, 279 aa, Zea mays subsp. mays
  peptide (1)..(279): Ceres Seq. ID no. 12413805
ASHLLLRRSPPRRRLPAAPPHPLLPPPHRHPRGRHEHNRHPGSRSREHLRRRGLPHRQLPPHPTAGAQGVQEPGAPQVRIQRGRGARLPCGPRALPKGGGRRCGVQSACPLRSHRPFPGSYLHGAPRARPLPVPDRAPRADRRPLLPLPQLRLQGTVLAPALRLPRAAPPGQRLELLAPQLRPREGGGAQRGLPQEVRPQRSRHRQAARGRAAARHHASGVCPGRGAACHAARRGAGLPDVSPRALHRGMYRAGEGRLQGRRPQGDARVVAGGGEPGHQ

SEQ ID NO: 10952 - protein, 274 aa, Zea mays subsp. mays
  peptide (1)..(274): Ceres Seq. ID no. 12413806
  misc_feature (8)..(194): Pfam Name: Extensin-like region Pfam Description: Extensin-like region
  misc_feature (3)..(274): Homolog of NCBI NO: 13592175 NR Description: ppg3 [Leishmania major]
  misc_feature (3)..(266): Homolog of NCBI NO: 23017082 NR Description: hypothetical protein [Thermobifida fusca]
  misc_feature (3)..(264): Homolog of NCBI NO: 13592175 NR Description: ppg3 [Leishmania major]
  misc_feature (3)..(274): Homolog of NCBI NO: 13592175 NR Description: ppg3 [Leishmania major]
  misc_feature (3)..(268): Homolog of NCBI NO: 13592175 NR Description: ppg3 [Leishmania major]
  misc_feature (1)..(274): Homolog of NCBI NO: 3044086 NR Description: unknown [Myxococcus xanthus]
  misc_feature (3)..(264): Homolog of NCBI NO: 5420387 NR Description: proteophosphoglycan [Leishmania major]
  misc_feature (3)..(264): Homolog of NCBI NO: 5420387 NR Description: proteophosphoglycan [Leishmania major]
  misc_feature (3)..(264): Homolog of NCBI NO: 13592175 NR Description: ppg3 [Leishmania major]
  misc_feature (4)..(244): Homolog of NCBI NO: 11359723 NR Description: proteophosphoglycan, membrane-associated - Leishmania major (fragment) >gi|5420389|emb|CAB46680.1|
CLSSSSPPQPPSSPSPCCPSPPTAASASPPPARPPRAQPPPRVPLPRAPSPSRTTSSPAATSPHRRRSRRPRAWRTSSPHPTRTRCSPSLRTSGSPQRRWPPLWRPIRVSSALASTVPWLLSPRSSARSASPRPRSRASRRSPAATSSAAASSPRYGSGSRSSAPPSGSSRPATGTTGSSAPTSRRWWSPTWPSSGSAASAQSTSPSCSWPRRGSSPCLRSMSRTRCGVPRSSAWRRAPRCFATRSPPRDVSGRRRSTPRSPSSRRRSGGRRRR

SEQ ID NO: 10953 - DNA, 1360 bp, Zea mays subsp. mays
  misc_feature (1)..(1360): Ceres Seq. ID no. 12412012
  misc_feature: MA Experiment ID: 108504 Result: Down-regulated in Transcription
  misc_feature: MA Experiment 108504 PARAMETER Experiment Name: Zm_Drought_P Parameter: Age (day) Value: 8
  misc_feature: MA Experiment 108504 PARAMETER Experiment Name: Zm_Drought_P Parameter: Organism Value: Zea mays
  misc_feature: MA Experiment 108504 PARAMETER Experiment Name: Zm_Drought_P Parameter: Plant Line Value: 35A19
  misc_feature: MA Experiment 108504 PARAMETER Experiment Name: Zm_Drought_P Parameter: Timepoint (hr) Value: 12
  misc_feature: MA Experiment 108504 PARAMETER Experiment Name: Zm_Drought_P Parameter: Tissue Value: Aerial
  misc_feature: MA Experiment 108504 PARAMETER Experiment Name: Zm_Drought_P Parameter: Treatment Value: Drought vs. No Drought
  misc_feature: MA Experiment ID: 108527 Result: Down-regulated in Transcription
  misc_feature: MA Experiment 108527 PARAMETER Experiment Name: Zm_5mM_NO_P Parameter: Age (day) Value: 8
  misc_feature: MA Experiment 108527 PARAMETER Experiment Name: Zm_5mM_NO_P Parameter: Organism Value: Zea mays
  misc_feature: MA Experiment 108527 PARAMETER Experiment Name: Zm_5mM_NO_P Parameter: Plant Line Value: 35A19
  misc_feature: MA Experiment 108527 PARAMETER Experiment Name: Zm_5mM_NO_P Parameter: Timepoint (hr) Value: 6
  misc_feature: MA Experiment 108527 PARAMETER Experiment Name: Zm_5mM_NO_P Parameter: Tissue Value: Aerial
  misc_feature: MA Experiment 108527 PARAMETER Experiment Name: Zm_5mM_NO_P Parameter: Treatment Value: 5mM NO vs. No Treatment
  misc_feature: MA Experiment ID: 108536 Result: Up-regulated in Transcription
  misc_feature: MA Experiment 108536 PARAMETER Experiment Name: Zm_Meristem_P Parameter: Age (day) Value: 8
  misc_feature: MA Experiment 108536 PARAMETER Experiment Name: Zm_Meristem_P Parameter: Organism Value: Zea mays
  misc_feature: MA Experiment 108536 PARAMETER Experiment Name: Zm_Meristem_P Parameter: Plant Line Value: 35A19
  misc_feature: MA Experiment 108536 PARAMETER Experiment Name: Zm_Meristem_P Parameter: Tissue Value: Shoot Meristem vs. Above Shoot Meristem
  misc_feature: MA Experiment ID: 108540 Result: Down-regulated in Transcription
  misc_feature: MA Experiment 108540 PARAMETER Experiment Name: Zm_20percent_PEG_P Parameter: Age (day) Value: 8
  misc_feature: MA Experiment 108540 PARAMETER Experiment Name: Zm_20percent_PEG_P Parameter: Organism Value: Zea mays
  misc_feature: MA Experiment 108540 PARAMETER Experiment Name: Zm_20percent_PEG_P Parameter: Plant Line Value: 35A19
  misc_feature: MA Experiment 108540 PARAMETER Experiment Name: Zm_20percent_PEG_P Parameter: Timepoint (hr) Value: 6
  misc_feature: MA Experiment 108540 PARAMETER Experiment Name: Zm_20percent_PEG_P Parameter: Tissue Value: Aerial
  misc_feature: MA Experiment 108540 PARAMETER Experiment Name: Zm_20percent_PEG_P Parameter: Treatment Value: 20percent PEG vs. No Treatment
  misc_feature: MA Experiment ID: 108543 Result: Down-regulated in Transcription
  misc_feature: MA Experiment ID: 108544 Result: Up-regulated in Transcription
  misc_feature: MA Experiment ID: 108556 Result: Down-regulated in Transcription
  misc_feature: MA Experiment 108556 PARAMETER Experiment Name: Zm_Drought_P Parameter: Age (day) Value: 9
  misc_feature: MA Experiment 108556 PARAMETER Experiment Name: Zm_Drought_P Parameter: Organism Value: Zea mays
  misc_feature: MA Experiment 108556 PARAMETER Experiment Name: Zm_Drought_P Parameter: Plant Line Value: 35A19
  misc_feature: MA Experiment 108556 PARAMETER Experiment Name: Zm_Drought_P Parameter: Timepoint (hr) Value: 24
  misc_feature: MA Experiment 108556 PARAMETER Experiment Name: Zm_Drought_P Parameter: Tissue Value: Aerial
  misc_feature: MA Experiment 108556 PARAMETER Experiment Name: Zm_Drought_P Parameter: Treatment Value: Drought vs. No Drought
  misc_feature: MA Experiment ID: 108559 Result: Down-regulated in Transcription
  misc_feature: MA Experiment 108559 PARAMETER Experiment Name: Zm_5mM_NO_P Parameter: Age (day) Value: 8
  misc_feature: MA Experiment 108559 PARAMETER Experiment Name: Zm_5mM_NO_P Parameter: Organism Value: Zea mays
  misc_feature: MA Experiment 108559 PARAMETER Experiment Name: Zm_5mM_NO_P Parameter: Plant Line Value: 35A19
  misc_feature: MA Experiment 108559 PARAMETER Experiment Name: Zm_5mM_NO_P Parameter: Timepoint (hr) Value: 12
  misc_feature: MA Experiment 108559 PARAMETER Experiment Name: Zm_5mM_NO_P Parameter: Tissue Value: Aerial
  misc_feature: MA Experiment 108559 PARAMETER Experiment Name: Zm_5mM_NO_P Parameter: Treatment Value: 5mM NO vs. No Treatment
  misc_feature: MA Experiment ID: 108687 Result: Down-regulated in Transcription
  misc_feature: MA Experiment 108687 PARAMETER Experiment Name: Zm_Embryos-Flowers__P Parameter: Tissue Value: Embryo vs. Aerial+
  misc_feature: MA Experiment ID: 108689 Result: Down-regulated in Transcription
  misc_feature: MA Experiment 108689 PARAMETER Experiment Name: Zm_Drought_Roots_P Parameter: Age (day) Value: 9
  misc_feature: MA Experiment 108689 PARAMETER Experiment Name: Zm_Drought_Roots_P Parameter: Organism Value: Zea mays
  misc_feature: MA Experiment 108689 PARAMETER Experiment Name: Zm_Drought_Roots_P Parameter: Plant Line Value: 35A19
  misc_feature: MA Experiment 108689 PARAMETER Experiment Name: Zm_Drought_Roots_P Parameter: Timepoint (hr) Value: 24
  misc_feature: MA Experiment 108689 PARAMETER Experiment Name: Zm_Drought_Roots_P Parameter: Tissue Value: Roots
  misc_feature: MA Experiment 108689 PARAMETER Experiment Name: Zm_Drought_Roots_P Parameter: Treatment Value: Drought vs. No Drought
  misc_feature: MA Experiment ID: 20000487 Result: Up-regulated in Transcription
  misc_feature: MA Experiment 20000487 PARAMETER Experiment Name: Zm_50mM_NH4NO3_L_to_H_P Parameter: Organism Value: Zea mays
  misc_feature: MA Experiment 20000487 PARAMETER Experiment Name: Zm_50mM_NH4NO3_L_to_H_P Parameter: Timepoint (hr) Value: 4
  misc_feature: MA Experiment 20000487 PARAMETER Experiment Name: Zm_50mM_NH4NO3_L_to_H_P Parameter: Tissue Value: Leaves
  misc_feature: MA Experiment 20000487 PARAMETER Experiment Name: Zm_50mM_NH4NO3_L_to_H_P Parameter: Treatment Value: 50mM NH4NO3 vs. 100mM Mannitol
  misc_feature: MA Experiment ID: 20000488 Result: Up-regulated in Transcription
  misc_feature: MA Experiment 20000488 PARAMETER Experiment Name: Zm_50mM_NH4NO3_L_to_H_P Parameter: Organism Value: Zea mays
  misc_feature: MA Experiment 20000488 PARAMETER Experiment Name: Zm_50mM_NH4NO3_L_to_H_P Parameter: Timepoint (hr) Value: 8
  misc_feature: MA Experiment 20000488 PARAMETER Experiment Name: Zm_50mM_NH4NO3_L_to_H_P Parameter: Tissue Value: Leaves
  misc_feature: MA Experiment 20000488 PARAMETER Experiment Name: Zm_50mM_NH4NO3_L_to_H_P Parameter: Treatment Value: 50mM NH4NO3 vs. 100mM Mannitol
  misc_feature: MA Experiment ID: 20000534 Result: Down-regulated in Transcription
  misc_feature: MA Experiment 20000534 PARAMETER Experiment Name: Zm_Hybrid_Pollen_P Parameter: Age (day) Value: 8
  misc_feature: MA Experiment 20000534 PARAMETER Experiment Name: Zm_Hybrid_Pollen_P Parameter: Organism Value: Zea mays
  misc_feature: MA Experiment 20000534 PARAMETER Experiment Name: Zm_Hybrid_Pollen_P Parameter: Plant Line Value: 35A19
  misc_feature: MA Experiment 20000534 PARAMETER Experiment Name: Zm_Hybrid_Pollen_P Parameter: Tissue Value: Pollen vs. Aerial
  misc_feature: MA Experiment ID: 20000535 Result: Up-regulated in Transcription
  misc_feature: MA Experiment 20000535 PARAMETER Experiment Name: Zm_Hybrid_Seed_Dev_P Parameter: DAP Value: 30 vs. 12
  misc_feature: MA Experiment 20000535 PARAMETER Experiment Name: Zm_Hybrid_Seed_Dev_P Parameter: Organism Value: Zea mays
  misc_feature: MA Experiment 20000535 PARAMETER Experiment Name: Zm_Hybrid_Seed_Dev_P Parameter: Plant Line Value: 35A19
  misc_feature: MA Experiment 20000535 PARAMETER Experiment Name: Zm_Hybrid_Seed_Dev_P Parameter: Tissue Value: Embryo vs. Unfert Floret
atcagggccggacactacactaccatttttcctttcgcagcgtcccgtctgtctgtctgtctgcctccctccgctcacctcctctgcttcttctcgctttcttccatcttggtccagcctccactcttcctgctgagccatggcggctgccgaagaagggccagagccactcaggtatcagactctggccctgagggtgagcatccactgcgagggttgcaagaagaaggtgaagaaggtgctccacagcatagaaggggtgtacaagacggacatagacacgcagcagcagaaggtggtggtcataggcaacgtctctgcagacgcgctcgtcaagaagctcctcaagtccgggaagcacgcggagccgtggccggagcctgctccagccccaccggccgccgacagcccgcccgggcccgacggatctcccggcagcgcaggcaagaagaagaaaaagaagaagggcaacaagagccccgaggcggcgaacaacaagcccgccgatccggcgccagcgcccgcgcccgcgccggcggagggcaacggcggacccaaccccccggagcagcacgacaaggctgacggcggcgcctcgtgcgatgaggcatcggatggtgagcaggataagcctgaggctggcggtggcggcggcaacggctcccctgacgccggagaagccaacgagggcggcaaggtggccccttccgccatgacgccgcacggcccgcagcccatcgcggctgccaccaacagcaatggtggtggtggtggtggcggcggcggcggcaagaagaaaggcaagaaaggtggccacggcaatgccaacagagacggcgccgggccaatcgtcgaggtccagcccccgccggacgcacccacgaagccggccgccggcaactccggccctctcactgtcatcgacgcgggaccgtacccaccaccggcagcggcggcgatgagctacccagggtactacgccgccggggtccacccgccggcgtacgtcatgagctacagcacggcgcacccgagctctgcgctccggagcagcgcgtactaccacccgatggccggtgcgccgtacacaccagggagcggcggcgggtacttctactcgacggcgccggcgccggcgccggcggcgcccggatcgtactacatgttcagcgaggagaacgccaacgcatgcagcgtcatgtgagaagattagacggttaataatcaactcaactcaattattaactgcaagaagatgttgcagagagtggatgtgctagtcattatgctcttgttgtgcccaagaactggttgtcattgcaacgttattttgctgtatctgcaaaatacatggattttg

SEQ ID NO: 10954 - protein, 354 aa, Zea mays subsp. mays
  peptide (1)..(354): Ceres Seq. ID no. 12412013
  misc_feature (17)..(77): Pfam Name: Heavy-metal-associated domain Pfam Description: Heavy-metal-associated domain
  misc_feature (1)..(354): Homolog of NCBI NO: 12083536 NR Description: hypothetical protein [Oryza sativa]
  misc_feature (8)..(354): Homolog of NCBI NO: 27754505 NR Description: putative copper chaperone (CCH) protein
  misc_feature (8)..(354): Homolog of NCBI NO: 18405728 NR Description: copper chaperone (CCH)-related; protein id: supported by cDNA: 107869. [Arabidopsis thaliana]
  misc_feature (8)..(354): Homolog of NCBI NO: 21536659 NR Description: unknown [Arabidopsis thaliana]
  misc_feature (93)..(354): Homolog of NCBI NO: 15239643 NR Description: putative protein; protein id: At5g19090.1
  misc_feature (9)..(81): Homolog of NCBI NO: 15239643 NR Description: putative protein; protein id: At5g19090.1
  misc_feature (5)..(79): Homolog of NCBI NO: 15241025 NR Description: putative protein; protein id: At5g27690.1 thaliana] >gi|28392974|gb|AAO41922.1| unknown protein thaliana] >gi|28973191|gb|AAO63920.1| unknown protein
  misc_feature (109)..(267): Homolog of NCBI NO: 15239643 NR Description: putative protein; protein id: At5g19090.1
  misc_feature (1)..(300): Homolog of NCBI NO: 33146848 NR Description: copper chaperone (CCH)-related protein-like
  misc_feature (11)..(346): Homolog of NCBI NO: 15219992 NR Description: expressed protein; protein id: At1g23000.1
MAAAEEGPEPLRYQTLALRVSIHCEGCKKKVKKVLHSIEGVYKTDIDTQQQKVVVIGNVSADALVKKLLKSGKHAEPWPEPAPAPPAADSPPGPDGSPGSAGKKKKKKKGNKSPEAANNKPADPAPAPAPAPAEGNGGPNPPEQHDKADGGASCDEASDGEQDKPEAGGGGGNGSPDAGEANEGGKVAPSAMTPHGPQPIAAATNSNGGGGGGGGGGKKKGKKGGHGNANRDGAGPIVEVQPPPDAPTKPAAGNSGPLTVIDAGPYPPPAAAAMSYPGYYAAGVHPPAYVMSYSTAHPSSALRSSAYYHPMAGAPYTPGSGGGYFYSTAPAPAPAAPGSYYMFSEENANACSVM

SEQ ID NO: 10955 - protein, 194 aa, Zea mays subsp. mays
  peptide (1)..(194): Ceres Seq. ID no. 12412014
IRAGHYTTIFPFAASRLSVCLPPSAHLLCFFSLSSILVQPPLFLLSHGGCRRRARATQVSDSGPEGEHPLRGLQEEGEEGAPQHRRGVQDGHRHAAAEGGGHRQRLCRRARQEAPQVREARGAVAGACSSPTGRRQPARARRISRQRRQEEEKEEGQQEPRGGEQQARRSGASARARAGGGQRRTQPPGAARQG

SEQ ID NO: 10956 - DNA, 1546 bp, Zea mays subsp. mays
  misc_feature (1)..(1546): Ceres Seq. ID no. 12412008
  misc_feature: MA Experiment ID: 108528 Result: Up-regulated in Transcription
  misc_feature: MA Experiment 108528 PARAMETER Experiment Name: Zm_Imbibed_Seeds_P Parameter: Age (day) Value: 5 vs. 2
  misc_feature: MA Experiment 108528 PARAMETER Experiment Name: Zm_Imbibed_Seeds_P Parameter: Organism Value: Zea mays
  misc_feature: MA Experiment 108528 PARAMETER Experiment Name: Zm_Imbibed_Seeds_P Parameter: Plant Line Value: 35A19
  misc_feature: MA Experiment 108528 PARAMETER Experiment Name: Zm_Imbibed_Seeds_P Parameter: Tissue Value: Aerial vs. Embryo
  misc_feature: MA Experiment ID: 108529 Result: Up-regulated in Transcription
  misc_feature: MA Experiment 108529 PARAMETER Experiment Name: Zm_Imbibed_Seeds_P Parameter: Age (day) Value: 5 vs. 2
  misc_feature: MA Experiment 108529 PARAMETER Experiment Name: Zm_Imbibed_Seeds_P Parameter: Organism Value: Zea mays
  misc_feature: MA Experiment 108529 PARAMETER Experiment Name: Zm_Imbibed_Seeds_P Parameter: Plant Line Value: 35A19
  misc_feature: MA Experiment 108529 PARAMETER Experiment Name: Zm_Imbibed_Seeds_P Parameter: Tissue Value: Roots vs. Embryo
  misc_feature: MA Experiment ID: 108530 Result: Up-regulated in Transcription
  misc_feature: MA Experiment 108530 PARAMETER Experiment Name: Zm_Imbibed_Seeds_P Parameter: Age (day) Value: 6 vs. 2
  misc_feature: MA Experiment 108530 PARAMETER Experiment Name: Zm_Imbibed_Seeds_P Parameter: Organism Value: Zea mays
  misc_feature: MA Experiment 108530 PARAMETER Experiment Name: Zm_Imbibed_Seeds_P Parameter: Plant Line Value: 35A19
  misc_feature: MA Experiment 108530 PARAMETER Experiment Name: Zm_Imbibed_Seeds_P Parameter: Tissue Value: Aerial vs. Embryo
  misc_feature: MA Experiment ID: 108535 Result: Down-regulated in Transcription
  misc_feature: MA Experiment 108535 PARAMETER Experiment Name: Zm_Meristem_P Parameter: Age (day) Value: 8
  misc_feature: MA Experiment 108535 PARAMETER Experiment Name: Zm_Meristem_P Parameter: Organism Value: Zea mays
  misc_feature: MA Experiment 108535 PARAMETER Experiment Name: Zm_Meristem_P Parameter: Plant Line Value: 35A19
  misc_feature: MA Experiment 108535 PARAMETER Experiment Name: Zm_Meristem_P Parameter: Tissue Value: Root Meristem vs. Above Root Meristem
  misc_feature: MA Experiment ID: 108545 Result: Up-regulated in Transcription
  misc_feature: MA Experiment 108545 PARAMETER Experiment Name: Zm_Imbibed_Seeds_P Parameter: Age (day) Value: 3 vs. 2
  misc_feature: MA Experiment 108545 PARAMETER Experiment Name: Zm_Imbibed_Seeds_P Parameter: Organism Value: Zea mays
  misc_feature: MA Experiment 108545 PARAMETER Experiment Name: Zm_Imbibed_Seeds_P Parameter: Plant Line Value: 35A19
  misc_feature: MA Experiment 108545 PARAMETER Experiment Name: Zm_Imbibed_Seeds_P Parameter: Tissue Value: Aerial vs. Embryo
  misc_feature: MA Experiment ID: 108547 Result: Up-regulated in Transcription
  misc_feature: MA Experiment 108547 PARAMETER Experiment Name: Zm_Imbibed_Seeds_P Parameter: Age (day) Value: 4 vs. 2
  misc_feature: MA Experiment 108547 PARAMETER Experiment Name: Zm_Imbibed_Seeds_P Parameter: Organism Value: Zea mays
  misc_feature: MA Experiment 108547 PARAMETER Experiment Name: Zm_Imbibed_Seeds_P Parameter: Plant Line Value: 35A19
  misc_feature: MA Experiment 108547 PARAMETER Experiment Name: Zm_Imbibed_Seeds_P Parameter: Tissue Value: Aerial vs. Embryo
  misc_feature: MA Experiment ID: 108559 Result: Down-regulated in Transcription
  misc_feature: MA Experiment 108559 PARAMETER Experiment Name: Zm_5mM_NO_P Parameter: Age (day) Value: 8
  misc_feature: MA Experiment 108559 PARAMETER Experiment Name: Zm_5mM_NO_P Parameter: Organism Value: Zea mays
  misc_feature: MA Experiment 108559 PARAMETER Experiment Name: Zm_5mM_NO_P Parameter: Plant Line Value: 35A19
  misc_feature: MA Experiment 108559 PARAMETER Experiment Name: Zm_5mM_NO_P Parameter: Timepoint (hr) Value: 12
  misc_feature: MA Experiment 108559 PARAMETER Experiment Name: Zm_5mM_NO_P Parameter: Tissue Value: Aerial
  misc_feature: MA Experiment 108559 PARAMETER Experiment Name: Zm_5mM_NO_P Parameter: Treatment Value: 5mM NO vs. No Treatment
  misc_feature: MA Experiment ID: 108687 Result: Down-regulated in Transcription
  misc_feature: MA Experiment 108687 PARAMETER Experiment Name: Zm_Embryos-Flowers__P Parameter: Tissue Value: Embryo vs. Aerial+
  misc_feature: MA Experiment ID: 108689 Result: Up-regulated in Transcription
  misc_feature: MA Experiment 108689 PARAMETER Experiment Name: Zm_Drought_Roots_P Parameter: Age (day) Value: 9
  misc_feature: MA Experiment 108689 PARAMETER Experiment Name: Zm_Drought_Roots_P Parameter: Organism Value: Zea mays
  misc_feature: MA Experiment 108689 PARAMETER Experiment Name: Zm_Drought_Roots_P Parameter: Plant Line Value: 35A19
  misc_feature: MA Experiment 108689 PARAMETER Experiment Name: Zm_Drought_Roots_P Parameter: Timepoint (hr) Value: 24
  misc_feature: MA Experiment 108689 PARAMETER Experiment Name: Zm_Drought_Roots_P Parameter: Tissue Value: Roots
  misc_feature: MA Experiment 108689 PARAMETER Experiment Name: Zm_Drought_Roots_P Parameter: Treatment Value: Drought vs. No Drought
  misc_feature: MA Experiment ID: 20000108 Result: Down-regulated in Transcription
  misc_feature: MA Experiment 20000108 PARAMETER Experiment Name: Zm_Root-Tips_P Parameter: Age (day) Value: 12
  misc_feature: MA Experiment 20000108 PARAMETER Experiment Name: Zm_Root-Tips_P Parameter: Organism Value: Zea mays
  misc_feature: MA Experiment 20000108 PARAMETER Experiment Name: Zm_Root-Tips_P Parameter: Tissue Value: Root tips vs. Root mid region    35
  misc_feature: MA Experiment 20000108 PARAMETER Experiment Name: Zm_Root-Tips_P Parameter: Tissue Value: Root tips vs. Root mid region   Sequence Listing-Misc Features (4)
atactgcatcataccgcaccggcagtggcggagaaaagagatgagccagccggggccgggagccatcgccgcctcatgcctcccgactccgtgacggcccgcagccacaggccaccggataacgcacacagcggaaccatccaaaaacgcgggagctttcccccgtcaaagcccccaccctaatcccccgtctcgcgcgccaatcaaccagcaccgggagcaggagcaagagcaactcaccctcccctccggcttccgcggaactaggagctgccatgcagcccgacgccaacgctccctcgcaccgcctcgcccgcgtcgccgcgcacctaaacccccagcggccgcagatggaggaaggcgcgtccgcactgaggctcgtggtgtgccgcgccaagggcggcgcgccggggttcaaggtcgcgatcctgggcgccgcgggcgggatcggacagccgctgtcactgctcatgaagatgaatcctctcgtgtccgtgctgcacctctacgatgtcgtcaacacgccccggggtcacggccgatgtcagccacatggacaccagcgctgtggtccgcggcttccttggggcacagcagcttgatgccgcacttacaggaatggaccttgtaatcatacccgctggactccctaggaaaccaggaatgacaagagatgatttattcaacaaaaatgctgggattgttcgtacactatgtgaaggcgttgcaagatgctgtcctaatgcaattgtgaatctgatcagcaacccagtgaactcaactgtccccattgctgctgaggttttcaagaaagctggaacttatgatcccaagcggcttcttggagtgacaacactcgatgttgcgagggctaacacctttgtggccgaagtgcttggagttgatccaagagatgtcagtgttcctgttgttggagggcatgctgggataactatattgcccctcctctcccaggttacacctccgagctcattcactcaggatgaaaccagatatttgacagaccgcatacagaatggtggcacagaagttgtggaggcaaaggctggatcaggctccgcgactctgtcaatggcttttgctgcttctaaattcgctgacgcatgcttgcaagctatgcggggcgaagctggaatcgtggaatgctcatatgttgcatccgaggtgacagaactgccgttctttgcaacgaaagtgaggcttggccgtggtggagccgaggagatcctcccgcttggccctttgaatgatttcgagagagctggtctggaagcggcaaagaaggaactgggcgagagcattcagaagggcatcgctttcatgagcaagtgaagtggtacggagggagatcgtccctgagtcagatccggaccatacgtagtaacgtagatgtagggtgttgtgatatagtgctcctacctatacttgtaaggccacggtaaaaagaaggctaattaccctttagcaactgtgaccatctacttggcataatggcatggaataaatctttcgtcttcggtggcgg

SEQ ID NO: 10957 - protein, 280 aa, Zea mays subsp. mays
  peptide (1)..(280): Ceres Seq. ID no. 12412009
  misc_feature (114)..(278): Pfam Name: lactate/malate dehydrogenase, alpha/beta Pfam Description: lactate/malate dehydrogenase, alpha/beta
  misc_feature (6)..(280): Homolog of NCBI NO: 34915204 NR Description: putative glyoxysomal malate dehydrogenase [Oryza
  misc_feature (6)..(280): Homolog of NCBI NO: 3183079 NR Description: MALATE DEHYDROGENASE, GLYOXYSOMAL PRECURSOR
  misc_feature (6)..(278): Homolog of NCBI NO: 126894 NR Description: MALATE DEHYDROGENASE, GLYOXYSOMAL PRECURSOR
  misc_feature (6)..(278): Homolog of NCBI NO: 1170897 NR Description: MALATE DEHYDROGENASE, GLYOXYSOMAL PRECURSOR
  misc_feature (6)..(280): Homolog of NCBI NO: 7431179 NR Description: malate dehydrogenase (EC 1.1.1.37) precursor, - alfalfa >gi|2827078|gb|AAB99754.1| malate dehydrogenase
  misc_feature (6)..(280): Homolog of NCBI NO: 12644436 NR Description: Malate dehydrogenase 1, glyoxysomal precursor
  misc_feature (6)..(280): Homolog of NCBI NO: 15242466 NR Description: microbody NAD-dependent malate dehydrogenase; id: At5g09660.1, supported by cDNA: gi_14335145, supported by gi_16226936, supported by cDNA: gi_16323156, supported by cDNA:
  misc_feature (6)..(280): Homolog of NCBI NO: 16323157 NR Description: AT5g09660/F17I14_150 [Arabidopsis thaliana]
  misc_feature (6)..(280): Homolog of NCBI NO: 11133654 NR Description: Malate dehydrogenase 2, glyoxysomal precursor
  misc_feature (6)..(280): Homolog of NCBI NO: 1346501 NR Description: MALATE DEHYDROGENASE, GLYOXYSOMAL PRECURSOR
MSSTRPGVTADVSHMDTSAVVRGFLGAQQLDAALTGMDLVIIPAGLPRKPGMTRDDLFNKNAGIVRTLCEGVARCCPNAIVNLISNPVNSTVPIAAEVFKKAGTYDPKRLLGVTTLDVARANTFVAEVLGVDPRDVSVPVVGGHAGITILPLLSQVTPPSSFTQDETRYLTDRIQNGGTEVVEAKAGSGSATLSMAFAASKFADACLQAMRGEAGIVECSYVASEVTELPFFATKVRLGRGGAEEILPLGPLNDFERAGLEAAKKELGESIQKGIAFMSK

SEQ ID NO: 10958 - protein, 266 aa, Zea mays subsp. mays
  peptide (1)..(266): Ceres Seq. ID no. 12412010
  misc_feature (100)..(264): Pfam Name: lactate/malate dehydrogenase, alpha/beta Pfam Description: lactate/malate dehydrogenase, alpha/beta
  misc_feature (1)..(266): Homolog of NCBI NO: 34915204 NR Description: putative glyoxysomal malate dehydrogenase [Oryza
  misc_feature (1)..(266): Homolog of NCBI NO: 3183079 NR Description: MALATE DEHYDROGENASE, GLYOXYSOMAL PRECURSOR
  misc_feature (1)..(264): Homolog of NCBI NO: 126894 NR Description: MALATE DEHYDROGENASE, GLYOXYSOMAL PRECURSOR
  misc_feature (1)..(264): Homolog of NCBI NO: 1170897 NR Description: MALATE DEHYDROGENASE, GLYOXYSOMAL PRECURSOR
  misc_feature (1)..(266): Homolog of NCBI NO: 7431179 NR Description: malate dehydrogenase (EC 1.1.1.37) precursor, - alfalfa >gi|2827078|gb|AAB99754.1| malate dehydrogenase
  misc_feature (1)..(266): Homolog of NCBI NO: 12644436 NR Description: Malate dehydrogenase 1, glyoxysomal precursor
  misc_feature (1)..(266): Homolog of NCBI NO: 15242466 NR Description: microbody NAD-dependent malate dehydrogenase; id: At5g09660.1, supported by cDNA: gi_14335145, supported by gi_16226936, supported by cDNA: gi_16323156, supported by cDNA:
  misc_feature (1)..(266): Homolog of NCBI NO: 16323157 NR Description: AT5g09660/F17I14_150 [Arabidopsis thaliana]
  misc_feature (1)..(266): Homolog of NCBI NO: 11133654 NR Description: Malate dehydrogenase 2, glyoxysomal precursor
  misc_feature (1)..(266): Homolog of NCBI NO: 1346501 NR Description: MALATE DEHYDROGENASE, GLYOXYSOMAL PRECURSOR
MDTSAVVRGFLGAQQLDAALTGMDLVIIPAGLPRKPGMTRDDLFNKNAGIVRTLCEGVARCCPNAIVNLISNPVNSTVPIAAEVFKKAGTYDPKRLLGVTTLDVARANTFVAEVLGVDPRDVSVPVVGGHAGITILPLLSQVTPPSSFTQDETRYLTDRIQNGGTEVVEAKAGSGSATLSMAFAASKFADACLQAMRGEAGIVECSYVASEVTELPFFATKVRLGRGGAEEILPLGPLNDFERAGLEAAKKELGESIQKGIAFMSK

SEQ ID NO: 10959 - protein, 244 aa, Zea mays subsp. mays
  peptide (1)..(244): Ceres Seq. ID no. 12412011
  misc_feature (78)..(242): Pfam Name: lactate/malate dehydrogenase, alpha/beta Pfam Description: lactate/malate dehydrogenase, alpha/beta
  misc_feature (1)..(244): Homolog of NCBI NO: 34915204 NR Description: putative glyoxysomal malate dehydrogenase [Oryza
  misc_feature (1)..(244): Homolog of NCBI NO: 3183079 NR Description: MALATE DEHYDROGENASE, GLYOXYSOMAL PRECURSOR
  misc_feature (1)..(242): Homolog of NCBI NO: 126894 NR Description: MALATE DEHYDROGENASE, GLYOXYSOMAL PRECURSOR
  misc_feature (1)..(242): Homolog of NCBI NO: 1170897 NR Description: MALATE DEHYDROGENASE, GLYOXYSOMAL PRECURSOR
  misc_feature (1)..(244): Homolog of NCBI NO: 7431179 NR Description: malate dehydrogenase (EC 1.1.1.37) precursor, - alfalfa >gi|2827078|gb|AAB99754.1| malate dehydrogenase
  misc_feature (1)..(244): Homolog of NCBI NO: 12644436 NR Description: Malate dehydrogenase 1, glyoxysomal precursor
  misc_feature (1)..(244): Homolog of NCBI NO: 15242466 NR Description: microbody NAD-dependent malate dehydrogenase; id: At5g09660.1, supported by cDNA: gi_14335145, supported by gi_16226936, supported by cDNA: gi_16323156, supported by cDNA:
  misc_feature (1)..(244): Homolog of NCBI NO: 16323157 NR Description: AT5g09660/F17I14_150 [Arabidopsis thaliana]
  misc_feature (1)..(244): Homolog of NCBI NO: 11133654 NR Description: Malate dehydrogenase 2, glyoxysomal precursor
  misc_feature (1)..(244): Homolog of NCBI NO: 1346501 NR Description: MALATE DEHYDROGENASE, GLYOXYSOMAL PRECURSOR
MDLVIIPAGLPRKPGMTRDDLFNKNAGIVRTLCEGVARCCPNAIVNLISNPVNSTVPIAAEVFKKAGTYDPKRLLGVTTLDVARANTFVAEVLGVDPRDVSVPVVGGHAGITILPLLSQVTPPSSFTQDETRYLTDRIQNGGTEVVEAKAGSGSATLSMAFAASKFADACLQAMRGEAGIVECSYVASEVTELPFFATKVRLGRGGAEEILPLGPLNDFERAGLEAAKKELGESIQKGIAFMSK

SEQ ID NO: 10960 - DNA, 1709 bp, Zea mays subsp. mays
  misc_feature (1)..(1709): Ceres Seq. ID no. 12360736
  misc_feature: MA Experiment ID: 108527 Result: Up-regulated in Transcription
  misc_feature: MA Experiment 108527 PARAMETER Experiment Name: Zm_5mM_NO_P Parameter: Age (day) Value: 8
  misc_feature: MA Experiment 108527 PARAMETER Experiment Name: Zm_5mM_NO_P Parameter: Organism Value: Zea mays
  misc_feature: MA Experiment 108527 PARAMETER Experiment Name: Zm_5mM_NO_P Parameter: Plant Line Value: 35A19
  misc_feature: MA Experiment 108527 PARAMETER Experiment Name: Zm_5mM_NO_P Parameter: Timepoint (hr) Value: 6
  misc_feature: MA Experiment 108527 PARAMETER Experiment Name: Zm_5mM_NO_P Parameter: Tissue Value: Aerial
  misc_feature: MA Experiment 108527 PARAMETER Experiment Name: Zm_5mM_NO_P Parameter: Treatment Value: 5mM NO vs. No Treatment
  misc_feature: MA Experiment ID: 108559 Result: Up-regulated in Transcription
  misc_feature: MA Experiment 108559 PARAMETER Experiment Name: Zm_5mM_NO_P Parameter: Age (day) Value: 8
  misc_feature: MA Experiment 108559 PARAMETER Experiment Name: Zm_5mM_NO_P Parameter: Organism Value: Zea mays
  misc_feature: MA Experiment 108559 PARAMETER Experiment Name: Zm_5mM_NO_P Parameter: Plant Line Value: 35A19
  misc_feature: MA Experiment 108559 PARAMETER Experiment Name: Zm_5mM_NO_P Parameter: Timepoint (hr) Value: 12
  misc_feature: MA Experiment 108559 PARAMETER Experiment Name: Zm_5mM_NO_P Parameter: Tissue Value: Aerial
  misc_feature: MA Experiment 108559 PARAMETER Experiment Name: Zm_5mM_NO_P Parameter: Treatment Value: 5mM NO vs. No Treatment
gcacgagaccattacctagaacatcctaatcgaaaaaacccccagcagccgcgtgacacggtcactcgcgccacccgttctgcacctcggcccttctcatggcgacgcccgcctccgcgccggccacaccaaaccctaaccccgtctccggcgacccgccgtcgctgctgctacagcagcagcaggaggaagaggtgccagcgccggtcccggagacggcgccgacgcccctcaccacctcgatcgaccccaccccctccggcggcgaggagggcgaaagcgatgactcctcgtccgtctggtcggcgccctcctccgcgcccacccccgtcctcgcccccgcccccgcccccgcggcgccctcccccgcggccaaggacatcctccacatctccttcaaccaggactacggctgcttcgcagcgggcaccaagtcgggcttccgcatctacaactgcgaccccttccgagagatcttccgccgggacctcgccgccgagggcggagtcggcgccgggggagggggtatcggcgtcgtcgagatgctgttccgctgcaacatactcgcgctcgtcggcggcggagataacccccactacccgcccaacaaggtcatgatctgggacgatcaccagagccgctgcatcggggagctctccttccgctcccccgtccggggcgttcgtctccggcgcgagcgcatcatcgtggtgctcgagaacaaaatcttcgtctacaacttcgcggaccttaagctgttgcaccagatcgacactttgagcaaccccaagggcctctgcgccgtgtcacagcagcccgggtccattgtgcttgtttgccctggtgcccagaaggggcaggttagggtggaacactataagacaaggaagaccaagtttatcaatgcacacacttcccgcgtcgcgtgctttgcgttgtcgcaggatgggaggctcattgcgactgctagcaccaaggggactcttgttagaatctacaatgcagctgaaggcaatctcttgcaggaagtaaggagaggtgctgatagagcagaaatatatagcttggctttctcgaatgatttgcagtatttggctgtctccagtgataaaggaacaatacatgtcttcaacttaaagataaatgtgggatcaactgcaaatgacaagcctatgccttctccggatcctgaagttcctcacataaggccctctctttcattcattaagggtgtgctgccaaaatattttcactctgaatggtcagtagcccaattcaggctgcaggagggtgaacactatattgttgcatttggacatgagaagaatactgtggcagtcgttggcatggatggaagcttctacagatgccggtttgatccagtcaacggaggagaaatgctgcagctggattgctacagtttcctgaaaccgtcggatcaaccgtagtcactagtccgtagcaacgcaacatactgtcagcatcaccctcaatctattcatgcccactaccgcggtaccaggattgtacattatctttgtgtgccttcgttgactcgtgggtttagcaaaaataataatagtttatttgtaaatatatatttcttgttggctctgctgtttgttctgcggaagggctaaatcacccgtctgcagacgaacgtagtagaatgcatcgttatttatttcatgaataaaataaagtagccg

SEQ ID NO: 10961 - protein, 449 aa, Zea mays subsp. mays
  peptide (1)..(449): Ceres Seq. ID no. 12360737
  misc_feature (263)..(300): Pfam Name: WD domain, G-beta repeat Pfam Description: WD domain, G-beta repeat
  misc_feature (1)..(449): Homolog of NCBI NO: 34907164 NR Description: P0423A12.19 [Oryza sativa (japonica
  misc_feature (34)..(445): Homolog of NCBI NO: 14517420 NR Description: AT3g62770/F26K9_200 [Arabidopsis thaliana]
  misc_feature (34)..(445): Homolog of NCBI NO: 11288364 NR Description: hypothetical protein F26K9.200 - Arabidopsis >gi|7362757|emb|CAB83127.1| putative protein [Arabidopsis
  misc_feature (52)..(374): Homolog of NCBI NO: 34896164 NR Description: hypothetical protein~similar to Arabidopsis
  misc_feature (369)..(449): Homolog of NCBI NO: 34896164 NR Description: hypothetical protein~similar to Arabidopsis
  misc_feature (94)..(449): Homolog of NCBI NO: 30694449 NR Description: WD-40 repeat protein family [Arabidopsis thaliana]
  misc_feature (69)..(449): Homolog of NCBI NO: 30688413 NR Description: WD-40 repeat protein family [Arabidopsis >gi|26450478|dbj|BAC42353.1| unknown protein [Arabidopsis
  misc_feature (94)..(449): Homolog of NCBI NO: 7487233 NR Description: hypothetical protein At2g40810 [imported] - thaliana >gi|2623295|gb|AAB86441.1| hypothetical protein
  misc_feature (34)..(313): Homolog of NCBI NO: 18412493 NR Description: putative protein; protein id: At3g62770.1, by cDNA: gi_14517419, supported by cDNA: gi_16323361 [Arabidopsis
  misc_feature (87)..(438): Homolog of NCBI NO: 15238452 NR Description: putative protein; protein id: At5g05150.1 thaliana] >gi|9759256|dbj|BAB09691.1| contains similarity to
MATPASAPATPNPNPVSGDPPSLLLQQQQEEEVPAPVPETAPTPLTTSIDPTPSGGEEGESDDSSSVWSAPSSAPTPVLAPAPAPAAPSPAAKDILHISFNQDYGCFAAGTKSGFRIYNCDPFREIFRRDLAAEGGVGAGGGGIGVVEMLFRCNILALVGGGDNPHYPPNKVMIWDDHQSRCIGELSFRSPVRGVRLRRERIIVVLENKIFVYNFADLKLLHQIDTLSNPKGLCAVSQQPGSIVLVCPGAQKGQVRVEHYKTRKTKFINAHTSRVACFALSQDGRLIATASTKGTLVRIYNAAEGNLLQEVRRGADRAEIYSLAFSNDLQYLAVSSDKGTIHVFNLKINVGSTANDKPMPSPDPEVPHIRPSLSFIKGVLPKYFHSEWSVAQFRLQEGEHYIVAFGHEKNTVAVVGMDGSFYRCRFDPVNGGEMLQLDCYSFLKPSDQP

SEQ ID NO: 10962 - protein, 301 aa, Zea mays subsp. mays
  peptide (1)..(301): Ceres Seq. ID no. 12360738
  misc_feature (115)..(152): Pfam Name: WD domain, G-beta repeat Pfam Description: WD domain, G-beta repeat
  misc_feature (1)..(301): Homolog of NCBI NO: 34907164 NR Description: P0423A12.19 [Oryza sativa (japonica
  misc_feature (1)..(297): Homolog of NCBI NO: 14517420 NR Description: AT3g62770/F26K9_200 [Arabidopsis thaliana]
  misc_feature (1)..(297): Homolog of NCBI NO: 11288364 NR Description: hypothetical protein F26K9.200 - Arabidopsis >gi|7362757|emb|CAB83127.1| putative protein [Arabidopsis
  misc_feature (1)..(226): Homolog of NCBI NO: 34896164 NR Description: hypothetical protein~similar to Arabidopsis
  misc_feature (221)..(301): Homolog of NCBI NO: 34896164 NR Description: hypothetical protein~similar to Arabidopsis
  misc_feature (1)..(301): Homolog of NCBI NO: 30694449 NR Description: WD-40 repeat protein family [Arabidopsis thaliana]
  misc_feature (1)..(301): Homolog of NCBI NO: 30688413 NR Description: WD-40 repeat protein family [Arabidopsis >gi|26450478|dbj|BAC42353.1| unknown protein [Arabidopsis
  misc_feature (1)..(301): Homolog of NCBI NO: 7487233 NR Description: hypothetical protein At2g40810 [imported] - thaliana >gi|2623295|gb|AAB86441.1| hypothetical protein
  misc_feature (1)..(165): Homolog of NCBI NO: 18412493 NR Description: putative protein; protein id: At3g62770.1, by cDNA: gi_14517419, supported by cDNA: gi_16323361 [Arabidopsis
  misc_feature (1)..(290): Homolog of NCBI NO: 15238452 NR Description: putative protein; protein id: At5g05150.1 thaliana] >gi|9759256|dbj|BAB09691.1| contains similarity to
MLFRCNILALVGGGDNPHYPPNKVMIWDDHQSRCIGELSFRSPVRGVRLRRERIIVVLENKIFVYNFADLKLLHQIDTLSNPKGLCAVSQQPGSIVLVCPGAQKGQVRVEHYKTRKTKFINAHTSRVACFALSQDGRLIATASTKGTLVRIYNAAEGNLLQEVRRGADRAEIYSLAFSNDLQYLAVSSDKGTIHVFNLKINVGSTANDKPMPSPDPEVPHIRPSLSFIKGVLPKYFHSEWSVAQFRLQEGEHYIVAFGHEKNTVAVVGMDGSFYRCRFDPVNGGEMLQLDCYSFLKPSDQP

SEQ ID NO: 10963 - protein, 277 aa, Zea mays subsp. mays
  peptide (1)..(277): Ceres Seq. ID no. 12360739
  misc_feature (91)..(128): Pfam Name: WD domain, G-beta repeat Pfam Description: WD domain, G-beta repeat
  misc_feature (1)..(277): Homolog of NCBI NO: 34907164 NR Description: P0423A12.19 [Oryza sativa (japonica
  misc_feature (1)..(273): Homolog of NCBI NO: 14517420 NR Description: AT3g62770/F26K9_200 [Arabidopsis thaliana]
  misc_feature (1)..(273): Homolog of NCBI NO: 11288364 NR Description: hypothetical protein F26K9.200 - Arabidopsis >gi|7362757|emb|CAB83127.1| putative protein [Arabidopsis
  misc_feature (1)..(202): Homolog of NCBI NO: 34896164 NR Description: hypothetical protein~similar to Arabidopsis
  misc_feature (197)..(277): Homolog of NCBI NO: 34896164 NR Description: hypothetical protein~similar to Arabidopsis
  misc_feature (1)..(277): Homolog of NCBI NO: 30694449 NR Description: WD-40 repeat protein family [Arabidopsis thaliana]
  misc_feature (1)..(277): Homolog of NCBI NO: 30688413 NR Description: WD-40 repeat protein family [Arabidopsis >gi|26450478|dbj|BAC42353.1| unknown protein [Arabidopsis
  misc_feature (1)..(277): Homolog of NCBI NO: 7487233 NR Description: hypothetical protein At2g40810 [imported] - thaliana >gi|2623295|gb|AAB86441.1| hypothetical protein
  misc_feature (1)..(141): Homolog of NCBI NO: 18412493 NR Description: putative protein; protein id: At3g62770.1, by cDNA: gi_14517419, supported by cDNA: gi_16323361 [Arabidopsis
  misc_feature (1)..(266): Homolog of NCBI NO: 15238452 NR Description: putative protein; protein id: At5g05150.1 thaliana] >gi|9759256|dbj|BAB09691.1| contains similarity to
MIWDDHQSRCIGELSFRSPVRGVRLRRERIIVVLENKIFVYNFADLKLLHQIDTLSNPKGLCAVSQQPGSIVLVCPGAQKGQVRVEHYKTRKTKFINAHTSRVACFALSQDGRLIATASTKGTLVRIYNAAEGNLLQEVRRGADRAEIYSLAFSNDLQYLAVSSDKGTIHVFNLKINVGSTANDKPMPSPDPEVPHIRPSLSFIKGVLPKYFHSEWSVAQFRLQEGEHYIVAFGHEKNTVAVVGMDGSFYRCRFDPVNGGEMLQLDCYSFLKPSDQP

SEQ ID NO: 10964 - DNA, 1594 bp, Zea mays subsp. mays
  misc_feature (1)..(1594): Ceres Seq. ID no. 12408178
  misc_feature: MA Experiment ID: 108529 Result: Down-regulated in Transcription
  misc_feature: MA Experiment 108529 PARAMETER Experiment Name: Zm_Imbibed_Seeds_P Parameter: Age (day) Value: 5 vs. 2
  misc_feature: MA Experiment 108529 PARAMETER Experiment Name: Zm_Imbibed_Seeds_P Parameter: Organism Value: Zea mays
  misc_feature: MA Experiment 108529 PARAMETER Experiment Name: Zm_Imbibed_Seeds_P Parameter: Plant Line Value: 35A19
  misc_feature: MA Experiment 108529 PARAMETER Experiment Name: Zm_Imbibed_Seeds_P Parameter: Tissue Value: Roots vs. Embryo
  misc_feature: MA Experiment ID: 108543 Result: Down-regulated in Transcription
  misc_feature: MA Experiment ID: 108544 Result: Down-regulated in Transcription
  misc_feature: MA Experiment ID: 20000487 Result: Up-regulated in Transcription
  misc_feature: MA Experiment 20000487 PARAMETER Experiment Name: Zm_50mM_NH4NO3_L_to_H_P Parameter: Organism Value: Zea mays
  misc_feature: MA Experiment 20000487 PARAMETER Experiment Name: Zm_50mM_NH4NO3_L_to_H_P Parameter: Timepoint (hr) Value: 4
  misc_feature: MA Experiment 20000487 PARAMETER Experiment Name: Zm_50mM_NH4NO3_L_to_H_P Parameter: Tissue Value: Leaves
  misc_feature: MA Experiment 20000487 PARAMETER Experiment Name: Zm_50mM_NH4NO3_L_to_H_P Parameter: Treatment Value: 50mM NH4NO3 vs. 100mM Mannitol
attttttccgcgccgccggttcgtgccaaaaccctactccctagaaaatgcagcggcgcctaagctgaaatcagtgaatcgtgcgccgcggcgaagagagaactcgaactcggcaggacttgtgcgggaggaggaggggagcgggggtcagagagggagatagagatcatcaggtttgccatgtcctccagggctggcggcggcaagccgttgtggtctgcctccaccatcgtcgccaaagtcgcgagtgggtaccacatcctcaggatcgatggctactccaggaccatggagacccccacaggagagtccatcgcgtccctcccgttctcggtgggcggccgttgctggcgcattcgctactaccccaacggcgacaagttggagaataaagaatacatctcgctttatctttatctccacgacagaagcgtcgaggcagagaaggcgcagttaatgttccgtttcgtcggtgacgtagcggagcagccgttgattctgggaagactgcataccttcgaaaagcaaggttgggggtacgccaagttcatcaaaaggaaagatttggaagagtcgaagcatctcgtggacgattctttttccatcaggtgcgatgtggccgtgcgcttcaacgatgtccgcgtggagaaggcgccggaagccgctgctgcagcatctatgatttccgtgcaaccatctgacctgcaccagcacctcggcagtctcctgctgacccagaagggcgccgatgtggtgttcgacgtcgccggtgagacgttcgccgcgcaccggtgcgtgctcgcagcccgctctcctgtcttcactgcagagctctttggtgcgatgaaagagggccacaccggaggcgtggtgcgcatagaggacatggaacctcgggcgttcaaggcattgctctacttcctttacaccgatttactattcccaaagacaatggcaacgacgatgaatcaagctgaagacggagacgtaggcgacgacgatgaagacgttctgtgtcagcacctactggtcgctgcagacaaatacaacttggagaggctgaaatcgctatgtgaaaagaagctgtctgagtgcatccatgtgggcacggtagcaatcatcctgacgctagctgagcaacaccgctgccctggactgaagaaggtgtgcctccattttctcagatctcctgcaaatttgagggcagtcgcctccagcgacgcctttaagcatctgagcagcagctgcccctctgttatggtggagttggttgccatgcttggcaactcagcgtagaccttcatctaagcaggaaactgcacttggtgtttttttctggatcgacttgtattatcaagcggtcttggaaaaaatgctactagttcatagtgtccacttccagtagctatgcatcctaagtttcaagtagattctgaagtagttgaatccgttggcgcttttggtacaccatttcgcagcggatgattttggtatctggtagctagctttgaatgtctgccagaagtccgtctatgatgtccttaacatacaattctcagacgttggaaacttggaatgcaatgcagttcttgtt

SEQ ID NO: 10965 - protein, 371 aa, Zea mays subsp. mays
  peptide (1)..(371): Ceres Seq. ID no. 12408179
  misc_feature (179)..(303): Pfam Name: BTB/POZ domain Pfam Description: BTB/POZ domain
  misc_feature (1)..(367): Homolog of NCBI NO: 37534558 NR Description: putative speckle-type protein [Oryza sativa
  misc_feature (8)..(367): Homolog of NCBI NO: 37534570 NR Description: putative speckle-type protein [Oryza sativa
  misc_feature (13)..(370): Homolog of NCBI NO: 37534532 NR Description: putative speckle-type protein [Oryza sativa
  misc_feature (122)..(369): Homolog of NCBI NO: 37534590 NR Description: putative speckle-type protein [Oryza sativa
  misc_feature (1)..(85): Homolog of NCBI NO: 37534590 NR Description: putative speckle-type protein [Oryza sativa
  misc_feature (1)..(367): Homolog of NCBI NO: 37534574 NR Description: putative speckle-type protein [Oryza sativa
  misc_feature (13)..(369): Homolog of NCBI NO: 37534534 NR Description: putative speckle-type protein [Oryza sativa
  misc_feature (1)..(367): Homolog of NCBI NO: 37534548 NR Description: putative speckle-type protein [Oryza sativa
  misc_feature (2)..(356): Homolog of NCBI NO: 37534556 NR Description: putative speckle-type protein [Oryza sativa
  misc_feature (9)..(365): Homolog of NCBI NO: 37534480 NR Description: hypothetical protein [Oryza sativa (japonica group)] >gi|31432167|gb|AAP53829.1| hypothetical protein [Oryza
MSSRAGGGKPLWSASTIVAKVASGYHILRIDGYSRTMETPTGESIASLPFSVGGRCWRIRYYPNGDKLENKEYISLYLYLHDRSVEAEKAQLMFRFVGDVAEQPLILGRLHTFEKQGWGYAKFIKRKDLEESKHLVDDSFSIRCDVAVRFNDVRVEKAPEAAAAASMISVQPSDLHQHLGSLLLTQKGADVVFDVAGETFAAHRCVLAARSPVFTAELFGAMKEGHTGGVVRIEDMEPRAFKALLYFLYTDLLFPKTMATTMNQAEDGDVGDDDEDVLCQHLLVAADKYNLERLKSLCEKKLSECIHVGTVAIILTLAEQHRCPGLKKVCLHFLRSPANLRAVASSDAFKHLSSSCPSVMVELVAMLGNSA

SEQ ID NO: 10966 - protein, 335 aa, Zea mays subsp. mays
  peptide (1)..(335): Ceres Seq. ID no. 12408180
  misc_feature (143)..(267): Pfam Name: BTB/POZ domain Pfam Description: BTB/POZ domain
  misc_feature (1)..(331): Homolog of NCBI NO: 37534574 NR Description: putative speckle-type protein [Oryza sativa
  misc_feature (1)..(331): Homolog of NCBI NO: 37534558 NR Description: putative speckle-type protein [Oryza sativa
  misc_feature (1)..(331): Homolog of NCBI NO: 37534570 NR Description: putative speckle-type protein [Oryza sativa
  misc_feature (1)..(334): Homolog of NCBI NO: 37534532 NR Description: putative speckle-type protein [Oryza sativa
  misc_feature (86)..(333): Homolog of NCBI NO: 37534590 NR Description: putative speckle-type protein [Oryza sativa
  misc_feature (1)..(49): Homolog of NCBI NO: 37534590 NR Description: putative speckle-type protein [Oryza sativa
  misc_feature (1)..(333): Homolog of NCBI NO: 37534534 NR Description: putative speckle-type protein [Oryza sativa
  misc_feature (1)..(331): Homolog of NCBI NO: 37534548 NR Description: putative speckle-type protein [Oryza sativa
  misc_feature (1)..(320): Homolog of NCBI NO: 37534556 NR Description: putative speckle-type protein [Oryza sativa
  misc_feature (1)..(329): Homolog of NCBI NO: 37534480 NR Description: hypothetical protein [Oryza sativa (japonica group)] >gi|31432167|gb|AAP53829.1| hypothetical protein [Oryza
METPTGESIASLPFSVGGRCWRIRYYPNGDKLENKEYISLYLYLHDRSVEAEKAQLMFRFVGDVAEQPLILGRLHTFEKQGWGYAKFIKRKDLEESKHLVDDSFSIRCDVAVRFNDVRVEKAPEAAAAASMISVQPSDLHQHLGSLLLTQKGADVVFDVAGETFAAHRCVLAARSPVFTAELFGAMKEGHTGGVVRIEDMEPRAFKALLYFLYTDLLFPKTMATTMNQAEDGDVGDDDEDVLCQHLLVAADKYNLERLKSLCEKKLSECIHVGTVAIILTLAEQHRCPGLKKVCLHFLRSPANLRAVASSDAFKHLSSSCPSVMVELVAMLGNSA

SEQ ID NO: 10967 - protein, 279 aa, Zea mays subsp. mays
  peptide (1)..(279): Ceres Seq. ID no. 12408181
  misc_feature (87)..(211): Pfam Name: BTB/POZ domain Pfam Description: BTB/POZ domain
  misc_feature (1)..(275): Homolog of NCBI NO: 37534574 NR Description: putative speckle-type protein [Oryza sativa
  misc_feature (1)..(275): Homolog of NCBI NO: 37534558 NR Description: putative speckle-type protein [Oryza sativa
  misc_feature (1)..(275): Homolog of NCBI NO: 37534570 NR Description: putative speckle-type protein [Oryza sativa
  misc_feature (1)..(278): Homolog of NCBI NO: 37534532 NR Description: putative speckle-type protein [Oryza sativa
  misc_feature (30)..(277): Homolog of NCBI NO: 37534590 NR Description: putative speckle-type protein [Oryza sativa
  misc_feature (1)..(277): Homolog of NCBI NO: 37534534 NR Description: putative speckle-type protein [Oryza sativa
  misc_feature (1)..(275): Homolog of NCBI NO: 37534548 NR Description: putative speckle-type protein [Oryza sativa
  misc_feature (1)..(264): Homolog of NCBI NO: 37534556 NR Description: putative speckle-type protein [Oryza sativa
  misc_feature (1)..(273): Homolog of NCBI NO: 37534480 NR Description: hypothetical protein [Oryza sativa (japonica group)] >gi|31432167|gb|AAP53829.1| hypothetical protein [Oryza
  misc_feature (85)..(275): Homolog of NCBI NO: 37534536 NR Description: putative speckle-type protein [Oryza sativa
MFRFVGDVAEQPLILGRLHTFEKQGWGYAKFIKRKDLEESKHLVDDSFSIRCDVAVRFNDVRVEKAPEAAAAASMISVQPSDLHQHLGSLLLTQKGADVVFDVAGETFAAHRCVLAARSPVFTAELFGAMKEGHTGGVVRIEDMEPRAFKALLYFLYTDLLFPKTMATTMNQAEDGDVGDDDEDVLCQHLLVAADKYNLERLKSLCEKKLSECIHVGTVAIILTLAEQHRCPGLKKVCLHFLRSPANLRAVASSDAFKHLSSSCPSVMVELVAMLGNSA

SEQ ID NO: 10968 - DNA, 1233 bp, Zea mays subsp. mays
  misc_feature (1)..(1233): Ceres Seq. ID no. 12423932
  misc_feature: MA Experiment ID: 108535 Result: Up-regulated in Transcription
  misc_feature: MA Experiment 108535 PARAMETER Experiment Name: Zm_Meristem_P Parameter: Age (day) Value: 8
  misc_feature: MA Experiment 108535 PARAMETER Experiment Name: Zm_Meristem_P Parameter: Organism Value: Zea mays
  misc_feature: MA Experiment 108535 PARAMETER Experiment Name: Zm_Meristem_P Parameter: Plant Line Value: 35A19
  misc_feature: MA Experiment 108535 PARAMETER Experiment Name: Zm_Meristem_P Parameter: Tissue Value: Root Meristem vs. Above Root Meristem
  misc_feature: MA Experiment ID: 108544 Result: Down-regulated in Transcription
  misc_feature: MA Experiment ID: 108556 Result: Down-regulated in Transcription
  misc_feature: MA Experiment 108556 PARAMETER Experiment Name: Zm_Drought_P Parameter: Age (day) Value: 9
  misc_feature: MA Experiment 108556 PARAMETER Experiment Name: Zm_Drought_P Parameter: Organism Value: Zea mays
  misc_feature: MA Experiment 108556 PARAMETER Experiment Name: Zm_Drought_P Parameter: Plant Line Value: 35A19
  misc_feature: MA Experiment 108556 PARAMETER Experiment Name: Zm_Drought_P Parameter: Timepoint (hr) Value: 24
  misc_feature: MA Experiment 108556 PARAMETER Experiment Name: Zm_Drought_P Parameter: Tissue Value: Aerial
  misc_feature: MA Experiment 108556 PARAMETER Experiment Name: Zm_Drought_P Parameter: Treatment Value: Drought vs. No Drought
  misc_feature: MA Experiment ID: 20000488 Result: Up-regulated in Transcription
  misc_feature: MA Experiment 20000488 PARAMETER Experiment Name: Zm_50mM_NH4NO3_L_to_H_P Parameter: Organism Value: Zea mays
  misc_feature: MA Experiment 20000488 PARAMETER Experiment Name: Zm_50mM_NH4NO3_L_to_H_P Parameter: Timepoint (hr) Value: 8
  misc_feature: MA Experiment 20000488 PARAMETER Experiment Name: Zm_50mM_NH4NO3_L_to_H_P Parameter: Tissue Value: Leaves
  misc_feature: MA Experiment 20000488 PARAMETER Experiment Name: Zm_50mM_NH4NO3_L_to_H_P Parameter: Treatment Value: 50mM NH4NO3 vs. 100mM Mannitol
  misc_feature: MA Experiment ID: 20000492 Result: Up-regulated in Transcription
  misc_feature: MA Experiment 20000492 PARAMETER Experiment Name: Zm_Hybrid_Seed_Dev_P Parameter: DAP Value: 12
  misc_feature: MA Experiment 20000492 PARAMETER Experiment Name: Zm_Hybrid_Seed_Dev_P Parameter: Organism Value: Zea mays
  misc_feature: MA Experiment 20000492 PARAMETER Experiment Name: Zm_Hybrid_Seed_Dev_P Parameter: Plant Line Value: 35A19
  misc_feature: MA Experiment 20000492 PARAMETER Experiment Name: Zm_Hybrid_Seed_Dev_P Parameter: Tissue Value: Fert Kernel vs. Unfert Floret
ctctctcaaattcacaaggccccgccgccgccgcctcgtcccccattcatcttcgccgaaaccctaaccctagtcgccgcggccacccttcccggcgacgccatgtcgaacccgaagggctccaagatgctccagttcatcaactaccgcatgcgggtgacgatccaggacgggcgccaacttgtgggcaagttcatggcgttcgaccgccacatgaacctcgtcctcggcgattgcgaggagtttcgccgcctcccgccctccaagtcctccaagactaccggtgaacgcgaagagcgccgcacgctcggcctcctcctcctccgcggcgaggaggtagtatccatgaccgtcgagggcccaccaccgcccgacgagtcccgcgccaaggccgcggcggcgggcggagccctcgccggccctggcatcggccgcgccgctgggcgcggtgtgcccaccggcccgctgctccaggcagctcctgggctcgctggtcctgtacgtggggttggtggacccgcccccggcatgatgcagccccagatctngcggccgccgatgcccaacctgtcggcccagccggtgtngtatccgcaggtcgtgcgcccgccgcaggggatgcctcccccaatgcgtcctggaatgccgccgcagatgcagatgccgttccgcccgcctggagcgccgcctgctccgttccctggggcaccgccacaacagttcatgaggggaccaccgccgatggggccgccacaagtgaggcccgggatgccggggccaccacctcctggaatgaggcctggaatgcctccgccaccattcggacagccgaggccagggatgccacctccgccacctggcccgcagcagcctggacagaacccgcctcagtagttccttacctggataagcttcttgcagatacacctatgggagatttttttgtatcgcgagaaaggatcataaatcacacctatggaagacgaagacctgtgaattgcaccaatgctttcaccattctgtctcatatcagggtatctagtgtgtaccactcatcctttgatgtgagaggggactttgtatgtaaagaggccaggactttaactgttggtattggttaagttaggaaatatggataacttatttcatcgttgtcttaattctggacccacccttttccgtgtgtgtcgatgaagcgaggtaattgacttgtagaaattactttctggtttc

SEQ ID NO: 10969 - protein, 297 aa, Zea mays subsp. mays
  peptide (1)..(297): Ceres Seq. ID no. 12423933
  misc_feature (41)..(118): Pfam Name: LSM domain Pfam Description: LSM domain
  misc_feature (31)..(297): Homolog of NCBI NO: 34900024 NR Description: putative snRNP protein [Oryza sativa (japonica
  misc_feature (35)..(297): Homolog of NCBI NO: 33146808 NR Description: putative snRNP(small nuclear ribonucleoprotein
  misc_feature (35)..(283): Homolog of NCBI NO: 15237095 NR Description: putative snRNP protein; protein id: At4g20440.1, by cDNA: 36005. [Arabidopsis thaliana] >gi|7488342|pir||T10586
  misc_feature (35)..(286): Homolog of NCBI NO: 15241519 NR Description: putative protein; protein id: At5g44500.1, by cDNA: 10879., supported by cDNA: gi_14596136, supported by gi_18377437 [Arabidopsis thaliana] >gi|9758703|dbj|BAB09157.1|
  misc_feature (35)..(286): Homolog of NCBI NO: 21536707 NR Description: putative snRNP protein [Arabidopsis thaliana]
  misc_feature (35)..(286): Homolog of NCBI NO: 38150007 NR Description: small nuclear ribonucleoprotein polypeptide B/B' B'; Sm protein B/B'; small nuclear ribonucleoprotein polypeptides and B' [Homo sapiens] >gi|134037|sp|P14678|RSMB_HUMAN Small
  misc_feature (35)..(286): Homolog of NCBI NO: 12643865 NR Description: Small nuclear ribonucleoprotein associated
  misc_feature (35)..(286): Homolog of NCBI NO: 10720263 NR Description: Small nuclear ribonucleoprotein associated
  misc_feature (35)..(273): Homolog of NCBI NO: 8099650 NR Description: snRNP-associated protein; SmB [Danio rerio]
  misc_feature (35)..(286): Homolog of NCBI NO: 7208221 NR Description: small nuclear ribonucleoprotein B' [Macropus
  misc_feature (183)..(183): Xaa is any aa, unknown or other
  misc_feature (196)..(196): Xaa is any aa, unknown or other
LSQIHKAPPPPPRPPFIFAETLTLVAAATLPGDAMSNPKGSKMLQFINYRMRVTIQDGRQLVGKFMAFDRHMNLVLGDCEEFRRLPPSKSSKTTGEREERRTLGLLLLRGEEVVSMTVEGPPPPDESRAKAAAAGGALAGPGIGRAAGRGVPTGPLLQAAPGLAGPVRGVGGPAPGMMQPQIXRPPMPNLSAQPVXYPQVVRPPQGMPPPMRPGMPPQMQMPFRPPGAPPAPFPGAPPQQFMRGPPPMGPPQVRPGMPGPPPPGMRPGMPPPPFGQPRPGMPPPPPGPQQPGQNPPQ

SEQ ID NO: 10970 - protein, 263 aa, Zea mays subsp. mays
  peptide (1)..(263): Ceres Seq. ID no. 12423934
  misc_feature (7)..(84): Pfam Name: LSM domain Pfam Description: LSM domain
  misc_feature (1)..(263): Homolog of NCBI NO: 34900024 NR Description: putative snRNP protein [Oryza sativa (japonica
  misc_feature (1)..(263): Homolog of NCBI NO: 33146808 NR Description: putative snRNP(small nuclear ribonucleoprotein
  misc_feature (1)..(249): Homolog of NCBI NO: 15237095 NR Description: putative snRNP protein; protein id: At4g20440.1, by cDNA: 36005. [Arabidopsis thaliana] >gi|7488342|pir||T10586
  misc_feature (1)..(252): Homolog of NCBI NO: 15241519 NR Description: putative protein; protein id: At5g44500.1, by cDNA: 10879., supported by cDNA: gi_14596136, supported by gi_18377437 [Arabidopsis thaliana] >gi|9758703|dbj|BAB09157.1|
  misc_feature (1)..(252): Homolog of NCBI NO: 21536707 NR Description: putative snRNP protein [Arabidopsis thaliana]
  misc_feature (1)..(252): Homolog of NCBI NO: 38150007 NR Description: small nuclear ribonucleoprotein polypeptide B/B' B'; Sm protein B/B'; small nuclear ribonucleoprotein polypeptides and B' [Homo sapiens] >gi|134037|sp|P14678|RSMB_HUMAN Small
  misc_feature (1)..(252): Homolog of NCBI NO: 12643865 NR Description: Small nuclear ribonucleoprotein associated
  misc_feature (1)..(252): Homolog of NCBI NO: 10720263 NR Description: Small nuclear ribonucleoprotein associated
  misc_feature (1)..(239): Homolog of NCBI NO: 8099650 NR Description: snRNP-associated protein; SmB [Danio rerio]
  misc_feature (1)..(252): Homolog of NCBI NO: 7208221 NR Description: small nuclear ribonucleoprotein B' [Macropus
  misc_feature (149)..(149): Xaa is any aa, unknown or other
  misc_feature (162)..(162): Xaa is any aa, unknown or other
MSNPKGSKMLQFINYRMRVTIQDGRQLVGKFMAFDRHMNLVLGDCEEFRRLPPSKSSKTTGEREERRTLGLLLLRGEEVVSMTVEGPPPPDESRAKAAAAGGALAGPGIGRAAGRGVPTGPLLQAAPGLAGPVRGVGGPAPGMMQPQIXRPPMPNLSAQPVXYPQVVRPPQGMPPPMRPGMPPQMQMPFRPPGAPPAPFPGAPPQQFMRGPPPMGPPQVRPGMPGPPPPGMRPGMPPPPFGQPRPGMPPPPPGPQQPGQNPPQ

SEQ ID NO: 10971 - protein, 255 aa, Zea mays subsp. mays
  peptide (1)..(255): Ceres Seq. ID no. 12423935
  misc_feature (1)..(76): Pfam Name: LSM domain Pfam Description: LSM domain
  misc_feature (1)..(255): Homolog of NCBI NO: 34900024 NR Description: putative snRNP protein [Oryza sativa (japonica
  misc_feature (1)..(255): Homolog of NCBI NO: 33146808 NR Description: putative snRNP(small nuclear ribonucleoprotein
  misc_feature (1)..(241): Homolog of NCBI NO: 15237095 NR Description: putative snRNP protein; protein id: At4g20440.1, by cDNA: 36005. [Arabidopsis thaliana] >gi|7488342|pir||T10586
  misc_feature (1)..(244): Homolog of NCBI NO: 15241519 NR Description: putative protein; protein id: At5g44500.1, by cDNA: 10879., supported by cDNA: gi_14596136, supported by gi_18377437 [Arabidopsis thaliana] >gi|9758703|dbj|BAB09157.1|
  misc_feature (1)..(244): Homolog of NCBI NO: 21536707 NR Description: putative snRNP protein [Arabidopsis thaliana]
  misc_feature (1)..(244): Homolog of NCBI NO: 38150007 NR Description: small nuclear ribonucleoprotein polypeptide B/B' B'; Sm protein B/B'; small nuclear ribonucleoprotein polypeptides and B' [Homo sapiens] >gi|134037|sp|P14678|RSMB_HUMAN Small
  misc_feature (1)..(244): Homolog of NCBI NO: 12643865 NR Description: Small nuclear ribonucleoprotein associated
  misc_feature (1)..(244): Homolog of NCBI NO: 10720263 NR Description: Small nuclear ribonucleoprotein associated
  misc_feature (1)..(231): Homolog of NCBI NO: 8099650 NR Description: snRNP-associated protein; SmB [Danio rerio]
  misc_feature (1)..(244): Homolog of NCBI NO: 7208221 NR Description: small nuclear ribonucleoprotein B' [Macropus
  misc_feature (141)..(141): Xaa is any aa, unknown or other
  misc_feature (154)..(154): Xaa is any aa, unknown or other
MLQFINYRMRVTIQDGRQLVGKFMAFDRHMNLVLGDCEEFRRLPPSKSSKTTGEREERRTLGLLLLRGEEVVSMTVEGPPPPDESRAKAAAAGGALAGPGIGRAAGRGVPTGPLLQAAPGLAGPVRGVGGPAPGMMQPQIXRPPMPNLSAQPVXYPQVVRPPQGMPPPMRPGMPPQMQMPFRPPGAPPAPFPGAPPQQFMRGPPPMGPPQVRPGMPGPPPPGMRPGMPPPPFGQPRPGMPPPPPGPQQPGQNPPQ

SEQ ID NO: 10972 - DNA, 554 bp, Zea mays subsp. mays
  misc_feature (1)..(554): Ceres Seq. ID no. 12414961
  misc_feature: MA Experiment ID: 20000535 Result: Up-regulated in Transcription
  misc_feature: MA Experiment 20000535 PARAMETER Experiment Name: Zm_Hybrid_Seed_Dev_P Parameter: DAP Value: 30 vs. 12
  misc_feature: MA Experiment 20000535 PARAMETER Experiment Name: Zm_Hybrid_Seed_Dev_P Parameter: Organism Value: Zea mays
  misc_feature: MA Experiment 20000535 PARAMETER Experiment Name: Zm_Hybrid_Seed_Dev_P Parameter: Plant Line Value: 35A19
  misc_feature: MA Experiment 20000535 PARAMETER Experiment Name: Zm_Hybrid_Seed_Dev_P Parameter: Tissue Value: Embryo vs. Unfert Floret
gttgctttcgttgagatcttaattaccagcccccaacttcgcgtgcagaccgcgagagaatacaagctcgcggacctcactcccatggagtcgggttgctgccgcccgccagcagagtgcgggttcccagctctgaacgcgtcctatttcgatctgagctatcacccggcgagcgccaacgccgactgcaaactgtacaggaacgcgcgctctgtccggtgctacgactgcagctcttgcaaagctggtgtcgcgcagtacatgaagacggagtggcgagtggtggctatcttcaacgtgatattgttcgtcatcctgtcgttcgtgtacttcgttggctgctgcgcgcggcgaaacgctggaggaggcgacgcgaaaggccgtggcaggtgacgggatcacttcttcgaggtgaagtgaagcgcttggccatcctatgtggagttagttaagcttagtatcaacaccccccctgtaaaattgttccatcaaaatattcaaagttcctttgatgaagtaccaggacctgtcgctgcctagtaatactctgttgc

SEQ ID NO: 10973 - protein, 130 aa, Zea mays subsp. mays
  peptide (1)..(130): Ceres Seq. ID no. 12414962
  misc_feature (14)..(106): Pfam Name: Tetraspanin family Pfam Description: Tetraspanin family
  misc_feature (14)..(126): Homolog of NCBI NO: 37535820 NR Description: putative senescence-associated protein [Oryza
  misc_feature (14)..(126): Homolog of NCBI NO: 30696823 NR Description: senescence-associated protein family [Arabidopsis
  misc_feature (14)..(106): Homolog of NCBI NO: 25404415 NR Description: hypothetical protein F9N12.12 [imported] -
  misc_feature (21)..(128): Homolog of NCBI NO: 20197174 NR Description: hypothetical protein [Arabidopsis thaliana]
  misc_feature (21)..(128): Homolog of NCBI NO: 30682205 NR Description: senescence-associated protein family [Arabidopsis
  misc_feature (16)..(119): Homolog of NCBI NO: 3551954 NR Description: senescence-associated protein 5 [Hemerocallis
  misc_feature (16)..(119): Homolog of NCBI NO: 15231187 NR Description: putative protein; protein id: At3g45600.1, by cDNA: 11427., supported by cDNA: gi_14423445 [Arabidopsis
  misc_feature (16)..(119): Homolog of NCBI NO: 15238641 NR Description: senescence-associated protein - like; protein id:
  misc_feature (11)..(120): Homolog of NCBI NO: 15237490 NR Description: senescence-associated protein 5-like protein; id: At5g46700.1, supported by cDNA: gi_17979385 [Arabidopsis
  misc_feature (11)..(120): Homolog of NCBI NO: 17979386 NR Description: putative senescence-associated protein 5
VAFVEILITSPQLRVQTAREYKLADLTPMESGCCRPPAECGFPALNASYFDLSYHPASANADCKLYRNARSVRCYDCSSCKAGVAQYMKTEWRVVAIFNVILFVILSFVYFVGCCARRNAGGGDAKGRGR

SEQ ID NO: 10974 - protein, 102 aa, Zea mays subsp. mays
  peptide (1)..(102): Ceres Seq. ID no. 12414963
  misc_feature (1)..(78): Pfam Name: Tetraspanin family Pfam Description: Tetraspanin family
  misc_feature (1)..(98): Homolog of NCBI NO: 37535820 NR Description: putative senescence-associated protein [Oryza
  misc_feature (1)..(98): Homolog of NCBI NO: 30696823 NR Description: senescence-associated protein family [Arabidopsis
  misc_feature (1)..(78): Homolog of NCBI NO: 25404415 NR Description: hypothetical protein F9N12.12 [imported] -
  misc_feature (1)..(100): Homolog of NCBI NO: 20197174 NR Description: hypothetical protein [Arabidopsis thaliana]
  misc_feature (1)..(100): Homolog of NCBI NO: 30682205 NR Description: senescence-associated protein family [Arabidopsis
  misc_feature (1)..(91): Homolog of NCBI NO: 3551954 NR Description: senescence-associated protein 5 [Hemerocallis
  misc_feature (1)..(91): Homolog of NCBI NO: 15231187 NR Description: putative protein; protein id: At3g45600.1, by cDNA: 11427., supported by cDNA: gi_14423445 [Arabidopsis
  misc_feature (1)..(91): Homolog of NCBI NO: 15238641 NR Description: senescence-associated protein - like; protein id:
  misc_feature (1)..(92): Homolog of NCBI NO: 15237490 NR Description: senescence-associated protein 5-like protein; id: At5g46700.1, supported by cDNA: gi_17979385 [Arabidopsis
  misc_feature (1)..(92): Homolog of NCBI NO: 17979386 NR Description: putative senescence-associated protein 5
MESGCCRPPAECGFPALNASYFDLSYHPASANADCKLYRNARSVRCYDCSSCKAGVAQYMKTEWRVVAIFNVILFVILSFVYFVGCCARRNAGGGDAKGRGR

SEQ ID NO: 10975 - DNA, 1368 bp, Zea mays subsp. mays
  misc_feature (1)..(1368): Ceres Seq. ID no. 12343891
  misc_feature: MA Experiment ID: 108527 Result: Down-regulated in Transcription
  misc_feature: MA Experiment 108527 PARAMETER Experiment Name: Zm_5mM_NO_P Parameter: Age (day) Value: 8
  misc_feature: MA Experiment 108527 PARAMETER Experiment Name: Zm_5mM_NO_P Parameter: Organism Value: Zea mays
  misc_feature: MA Experiment 108527 PARAMETER Experiment Name: Zm_5mM_NO_P Parameter: Plant Line Value: 35A19
  misc_feature: MA Experiment 108527 PARAMETER Experiment Name: Zm_5mM_NO_P Parameter: Timepoint (hr) Value: 6
  misc_feature: MA Experiment 108527 PARAMETER Experiment Name: Zm_5mM_NO_P Parameter: Tissue Value: Aerial
  misc_feature: MA Experiment 108527 PARAMETER Experiment Name: Zm_5mM_NO_P Parameter: Treatment Value: 5mM NO vs. No Treatment
  misc_feature: MA Experiment ID: 108528 Result: Up-regulated in Transcription
  misc_feature: MA Experiment 108528 PARAMETER Experiment Name: Zm_Imbibed_Seeds_P Parameter: Age (day) Value: 5 vs. 2
  misc_feature: MA Experiment 108528 PARAMETER Experiment Name: Zm_Imbibed_Seeds_P Parameter: Organism Value: Zea mays
  misc_feature: MA Experiment 108528 PARAMETER Experiment Name: Zm_Imbibed_Seeds_P Parameter: Plant Line Value: 35A19
  misc_feature: MA Experiment 108528 PARAMETER Experiment Name: Zm_Imbibed_Seeds_P Parameter: Tissue Value: Aerial vs. Embryo
  misc_feature: MA Experiment ID: 108530 Result: Up-regulated in Transcription
  misc_feature: MA Experiment 108530 PARAMETER Experiment Name: Zm_Imbibed_Seeds_P Parameter: Age (day) Value: 6 vs. 2
  misc_feature: MA Experiment 108530 PARAMETER Experiment Name: Zm_Imbibed_Seeds_P Parameter: Organism Value: Zea mays
  misc_feature: MA Experiment 108530 PARAMETER Experiment Name: Zm_Imbibed_Seeds_P Parameter: Plant Line Value: 35A19
  misc_feature: MA Experiment 108530 PARAMETER Experiment Name: Zm_Imbibed_Seeds_P Parameter: Tissue Value: Aerial vs. Embryo
  misc_feature: MA Experiment ID: 108536 Result: Down-regulated in Transcription
  misc_feature: MA Experiment 108536 PARAMETER Experiment Name: Zm_Meristem_P Parameter: Age (day) Value: 8
  misc_feature: MA Experiment 108536 PARAMETER Experiment Name: Zm_Meristem_P Parameter: Organism Value: Zea mays
  misc_feature: MA Experiment 108536 PARAMETER Experiment Name: Zm_Meristem_P Parameter: Plant Line Value: 35A19
  misc_feature: MA Experiment 108536 PARAMETER Experiment Name: Zm_Meristem_P Parameter: Tissue Value: Shoot Meristem vs. Above Shoot Meristem
  misc_feature: MA Experiment ID: 108545 Result: Up-regulated in Transcription
  misc_feature: MA Experiment 108545 PARAMETER Experiment Name: Zm_Imbibed_Seeds_P Parameter: Age (day) Value: 3 vs. 2
  misc_feature: MA Experiment 108545 PARAMETER Experiment Name: Zm_Imbibed_Seeds_P Parameter: Organism Value: Zea mays
  misc_feature: MA Experiment 108545 PARAMETER Experiment Name: Zm_Imbibed_Seeds_P Parameter: Plant Line Value: 35A19
  misc_feature: MA Experiment 108545 PARAMETER Experiment Name: Zm_Imbibed_Seeds_P Parameter: Tissue Value: Aerial vs. Embryo
  misc_feature: MA Experiment ID: 108546 Result: Down-regulated in Transcription
  misc_feature: MA Experiment 108546 PARAMETER Experiment Name: Zm_Imbibed_Seeds_P Parameter: Age (day) Value: 3 vs. 2
  misc_feature: MA Experiment 108546 PARAMETER Experiment Name: Zm_Imbibed_Seeds_P Parameter: Organism Value: Zea mays
  misc_feature: MA Experiment 108546 PARAMETER Experiment Name: Zm_Imbibed_Seeds_P Parameter: Plant Line Value: 35A19
  misc_feature: MA Experiment 108546 PARAMETER Experiment Name: Zm_Imbibed_Seeds_P Parameter: Tissue Value: Roots vs. Embryo
  misc_feature: MA Experiment ID: 108547 Result: Up-regulated in Transcription
  misc_feature: MA Experiment 108547 PARAMETER Experiment Name: Zm_Imbibed_Seeds_P Parameter: Age (day) Value: 4 vs. 2
  misc_feature: MA Experiment 108547 PARAMETER Experiment Name: Zm_Imbibed_Seeds_P Parameter: Organism Value: Zea mays
  misc_feature: MA Experiment 108547 PARAMETER Experiment Name: Zm_Imbibed_Seeds_P Parameter: Plant Line Value: 35A19
  misc_feature: MA Experiment 108547 PARAMETER Experiment Name: Zm_Imbibed_Seeds_P Parameter: Tissue Value: Aerial vs. Embryo
  misc_feature: MA Experiment ID: 108556 Result: Down-regulated in Transcription
  misc_feature: MA Experiment 108556 PARAMETER Experiment Name: Zm_Drought_P Parameter: Age (day) Value: 9
  misc_feature: MA Experiment 108556 PARAMETER Experiment Name: Zm_Drought_P Parameter: Organism Value: Zea mays
  misc_feature: MA Experiment 108556 PARAMETER Experiment Name: Zm_Drought_P Parameter: Plant Line Value: 35A19
  misc_feature: MA Experiment 108556 PARAMETER Experiment Name: Zm_Drought_P Parameter: Timepoint (hr) Value: 24
  misc_feature: MA Experiment 108556 PARAMETER Experiment Name: Zm_Drought_P Parameter: Tissue Value: Aerial
  misc_feature: MA Experiment 108556 PARAMETER Experiment Name: Zm_Drought_P Parameter: Treatment Value: Drought vs. No Drought
  misc_feature: MA Experiment ID: 108559 Result: Down-regulated in Transcription
  misc_feature: MA Experiment 108559 PARAMETER Experiment Name: Zm_5mM_NO_P Parameter: Age (day) Value: 8
  misc_feature: MA Experiment 108559 PARAMETER Experiment Name: Zm_5mM_NO_P Parameter: Organism Value: Zea mays
  misc_feature: MA Experiment 108559 PARAMETER Experiment Name: Zm_5mM_NO_P Parameter: Plant Line Value: 35A19
  misc_feature: MA Experiment 108559 PARAMETER Experiment Name: Zm_5mM_NO_P Parameter: Timepoint (hr) Value: 12
  misc_feature: MA Experiment 108559 PARAMETER Experiment Name: Zm_5mM_NO_P Parameter: Tissue Value: Aerial
  misc_feature: MA Experiment 108559 PARAMETER Experiment Name: Zm_5mM_NO_P Parameter: Treatment Value: 5mM NO vs. No Treatment
  misc_feature: MA Experiment ID: 108687 Result: Down-regulated in Transcription
  misc_feature: MA Experiment 108687 PARAMETER Experiment Name: Zm_Embryos-Flowers__P Parameter: Tissue Value: Embryo vs. Aerial+
  misc_feature: MA Experiment ID: 20000479 Result: Down-regulated in Transcription
  misc_feature: MA Experiment 20000479 PARAMETER Experiment Name: Zm_Drought_P Parameter: Age (day) Value: 10
  misc_feature: MA Experiment 20000479 PARAMETER Experiment Name: Zm_Drought_P Parameter: Organism Value: Zea mays
  misc_feature: MA Experiment 20000479 PARAMETER Experiment Name: Zm_Drought_P Parameter: Plant Line Value: 35A19
  misc_feature: MA Experiment 20000479 PARAMETER Experiment Name: Zm_Drought_P Parameter: Timepoint (hr) Value: 48
  misc_feature: MA Experiment 20000479 PARAMETER Experiment Name: Zm_Drought_P Parameter: Tissue Value: Aerial
  misc_feature: MA Experiment 20000479 PARAMETER Experiment Name: Zm_Drought_P Parameter: Treatment Value: Drought vs. No Drought
  misc_feature: MA Experiment ID: 20000480 Result: Down-regulated in Transcription
  misc_feature: MA Experiment 20000480 PARAMETER Experiment Name: Zm_Drought_P Parameter: Age (day) Value: 11
  misc_feature: MA Experiment 20000480 PARAMETER Experiment Name: Zm_Drought_P Parameter: Organism Value: Zea mays
  misc_feature: MA Experiment 20000480 PARAMETER Experiment Name: Zm_Drought_P Parameter: Plant Line Value: 35A19
  misc_feature: MA Experiment 20000480 PARAMETER Experiment Name: Zm_Drought_P Parameter: Timepoint (hr) Value: 72
  misc_feature: MA Experiment 20000480 PARAMETER Experiment Name: Zm_Drought_P Parameter: Tissue Value: Aerial
  misc_feature: MA Experiment 20000480 PARAMETER Experiment Name: Zm_Drought_P Parameter: Treatment Value: Drought vs. No Drought
  misc_feature: MA Experiment ID: 20000626 Result: Down-regulated in Transcription
  misc_feature: MA Experiment 20000626 PARAMETER Experiment Name: Zm_Herbicide-Treatments_P Parameter: Timepoint (hr) Value: 12
  misc_feature: MA Experiment 20000626 PARAMETER Experiment Name: Zm_Herbicide-Treatments_P Parameter: Tissue Value: Aerial
  misc_feature: MA Experiment 20000626 PARAMETER Experiment Name: Zm_Herbicide-Treatments_P Parameter: Treatment Value: Roundup vs. No Treatment
  misc_feature: MA Experiment ID: 20000630 Result: Down-regulated in Transcription
  misc_feature: MA Experiment 20000630 PARAMETER Experiment Name: Zm_Herbicide-Treatments_P Parameter: Timepoint (hr) Value: 4
  misc_feature: MA Experiment 20000630 PARAMETER Experiment Name: Zm_Herbicide-Treatments_P Parameter: Tissue Value: Aerial
  misc_feature: MA Experiment 20000630 PARAMETER Experiment Name: Zm_Herbicide-Treatments_P Parameter: Treatment Value: Roundup vs. No Treatment
agagggggcagtgcagaaggcatgtttccgatggcgtcttcctcactgtcgtcgccgccgctatcacttatcctcctccggccgctcccgtgcatacccgtcctcctcttgagacaaaggaagccattcccagctgtccgcgtagaagcaaggtctcagcagcggttgcagcggaggccggtgactggccagtggaggaggagctgcagaaggggcggaggctacgcgtgtttctcctacaatgccaagaacaagacgcccccgccttcagataagagttcagacgagtgggcgatcgttcgccgatgggatgtgccatgggaatggcaaactgttgtgctcagcatggtaggctgtggagtaagctttgttctgacaggattggttgagcaattggctttgcaagaactgggatttaaagctgtggaggcaactatagatgagaaggcagaaatactcttctttgggcagctgagtgtgacagtagtagtgcttggtgttatatttggcatcaccaacacttttcgaccattcccagatgatgtgtttcgttatcatattaaagaaccgttcaagctgcaaaatggatggcttttgtgggctggaattggtctctttggagcagtaatttctattgccttagccggagctgctatgacttatctgaatggtgaaactccagcgagagagactgattcactagtccttttgttgccgctgattggctcatccactaccagtactgcctttttggtgggaatcactggagttctagcaccacttctcgaggagacactgtttcgaggatttctaatggtgtccttgactaagtggtttcctactccagcttgtgtacttgtcagtgctgctgtatttgcccttgctcatctgactcctggacaatttccgcagctgtttatacttggtgttgcattgggattttcatatgctcagacccgcaatcttctaactccgatcacaattcatgcattttggaactcaggagtaatacttctgctaacctttcttcagctgcaaggatatgatctcaaggagctcttgggagcatcgtgaaggtttgaacgaaccaggcacatataatttgtgcataatatatatggtatcaaggagatccgttgggtatgtgctcttgtacacctgatgccaacaaaactacgtgaaaggaaatatgagtcttcaagttagctgatggttgcgtttccagaagtgttacgaggcatcactagtctgtaaagctgtttatacagtataagatggcagattgaacttaacgtaagaacagctgcccttttgagagtgtttcttacaactggagtactcgattaaattgtgctgatattgtttgtt

SEQ ID NO: 10976 - protein, 357 aa, Zea mays subsp. mays
  peptide (1)..(357): Ceres Seq. ID no. 12343892
  misc_feature (251)..(340): Pfam Name: CAAX amino terminal protease family Pfam Description: CAAX amino terminal protease family
  misc_feature (76)..(357): Homolog of NCBI NO: 21593106 NR Description: unknown [Arabidopsis thaliana]
  misc_feature (76)..(357): Homolog of NCBI NO: 30683693 NR Description: CAAX amino terminal protease family [Arabidopsis
  misc_feature (94)..(357): Homolog of NCBI NO: 25518680 NR Description: hypothetical protein F14L17.3 - Arabidopsis >gi|7262668|gb|AAF43926.1|AC012188_3 Contains similarity to a protein from Synechocystis sp. gb|D90914.1. [Arabidopsis
  misc_feature (137)..(357): Homolog of NCBI NO: 20259411 NR Description: unknown protein [Arabidopsis thaliana]
  misc_feature (102)..(343): Homolog of NCBI NO: 16331018 NR Description: unknown protein [Synechocystis sp. PCC 6803]
  misc_feature (103)..(343): Homolog of NCBI NO: 17231277 NR Description: hypothetical protein [Nostoc sp. PCC 7120]
  misc_feature (103)..(343): Homolog of NCBI NO: 23130090 NR Description: hypothetical protein [Nostoc punctiforme]
  misc_feature (98)..(340): Homolog of NCBI NO: 9759339 NR Description: gene_id:MUP24.17~pir||S76167~similar to unknown
  misc_feature (98)..(340): Homolog of NCBI NO: 18424393 NR Description: putative protein; protein id: At5g60750.1, by cDNA: 25855., supported by cDNA: gi_17528993, supported by gi_20465442 [Arabidopsis thaliana] >gi|17528994|gb|AAL38707.1|
  misc_feature (103)..(343): Homolog of NCBI NO: 37522744 NR Description: hypothetical protein gll3175 [Gloeobacter
RGGSAEGMFPMASSSLSSPPLSLILLRPLPCIPVLLLRQRKPFPAVRVEARSQQRLQRRPVTGQWRRSCRRGGGYACFSYNAKNKTPPPSDKSSDEWAIVRRWDVPWEWQTVVLSMVGCGVSFVLTGLVEQLALQELGFKAVEATIDEKAEILFFGQLSVTVVVLGVIFGITNTFRPFPDDVFRYHIKEPFKLQNGWLLWAGIGLFGAVISIALAGAAMTYLNGETPARETDSLVLLLPLIGSSTTSTAFLVGITGVLAPLLEETLFRGFLMVSLTKWFPTPACVLVSAAVFALAHLTPGQFPQLFILGVALGFSYAQTRNLLTPITIHAFWNSGVILLLTFLQLQGYDLKELLGAS

SEQ ID NO: 10977 - protein, 350 aa, Zea mays subsp. mays
  peptide (1)..(350): Ceres Seq. ID no. 12343893
  misc_feature (244)..(333): Pfam Name: CAAX amino terminal protease family Pfam Description: CAAX amino terminal protease family
  misc_feature (69)..(350): Homolog of NCBI NO: 21593106 NR Description: unknown [Arabidopsis thaliana]
  misc_feature (69)..(350): Homolog of NCBI NO: 30683693 NR Description: CAAX amino terminal protease family [Arabidopsis
  misc_feature (87)..(350): Homolog of NCBI NO: 25518680 NR Description: hypothetical protein F14L17.3 - Arabidopsis >gi|7262668|gb|AAF43926.1|AC012188_3 Contains similarity to a protein from Synechocystis sp. gb|D90914.1. [Arabidopsis
  misc_feature (130)..(350): Homolog of NCBI NO: 20259411 NR Description: unknown protein [Arabidopsis thaliana]
  misc_feature (95)..(336): Homolog of NCBI NO: 16331018 NR Description: unknown protein [Synechocystis sp. PCC 6803]
  misc_feature (96)..(336): Homolog of NCBI NO: 17231277 NR Description: hypothetical protein [Nostoc sp. PCC 7120]
  misc_feature (96)..(336): Homolog of NCBI NO: 23130090 NR Description: hypothetical protein [Nostoc punctiforme]
  misc_feature (91)..(333): Homolog of NCBI NO: 9759339 NR Description: gene_id:MUP24.17~pir||S76167~similar to unknown
  misc_feature (91)..(333): Homolog of NCBI NO: 18424393 NR Description: putative protein; protein id: At5g60750.1, by cDNA: 25855., supported by cDNA: gi_17528993, supported by gi_20465442 [Arabidopsis thaliana] >gi|17528994|gb|AAL38707.1|
  misc_feature (96)..(336): Homolog of NCBI NO: 37522744 NR Description: hypothetical protein gll3175 [Gloeobacter
MFPMASSSLSSPPLSLILLRPLPCIPVLLLRQRKPFPAVRVEARSQQRLQRRPVTGQWRRSCRRGGGYACFSYNAKNKTPPPSDKSSDEWAIVRRWDVPWEWQTVVLSMVGCGVSFVLTGLVEQLALQELGFKAVEATIDEKAEILFFGQLSVTVVVLGVIFGITNTFRPFPDDVFRYHIKEPFKLQNGWLLWAGIGLFGAVISIALAGAAMTYLNGETPARETDSLVLLLPLIGSSTTSTAFLVGITGVLAPLLEETLFRGFLMVSLTKWFPTPACVLVSAAVFALAHLTPGQFPQLFILGVALGFSYAQTRNLLTPITIHAFWNSGVILLLTFLQLQGYDLKELLGAS

SEQ ID NO: 10978 - protein, 347 aa, Zea mays subsp. mays
  peptide (1)..(347): Ceres Seq. ID no. 12343894
  misc_feature (241)..(330): Pfam Name: CAAX amino terminal protease family Pfam Description: CAAX amino terminal protease family
  misc_feature (66)..(347): Homolog of NCBI NO: 21593106 NR Description: unknown [Arabidopsis thaliana]
  misc_feature (66)..(347): Homolog of NCBI NO: 30683693 NR Description: CAAX amino terminal protease family [Arabidopsis
  misc_feature (84)..(347): Homolog of NCBI NO: 25518680 NR Description: hypothetical protein F14L17.3 - Arabidopsis >gi|7262668|gb|AAF43926.1|AC012188_3 Contains similarity to a protein from Synechocystis sp. gb|D90914.1. [Arabidopsis
  misc_feature (127)..(347): Homolog of NCBI NO: 20259411 NR Description: unknown protein [Arabidopsis thaliana]
  misc_feature (92)..(333): Homolog of NCBI NO: 16331018 NR Description: unknown protein [Synechocystis sp. PCC 6803]
  misc_feature (93)..(333): Homolog of NCBI NO: 17231277 NR Description: hypothetical protein [Nostoc sp. PCC 7120]
  misc_feature (93)..(333): Homolog of NCBI NO: 23130090 NR Description: hypothetical protein [Nostoc punctiforme]
  misc_feature (88)..(330): Homolog of NCBI NO: 9759339 NR Description: gene_id:MUP24.17~pir||S76167~similar to unknown
  misc_feature (88)..(330): Homolog of NCBI NO: 18424393 NR Description: putative protein; protein id: At5g60750.1, by cDNA: 25855., supported by cDNA: gi_17528993, supported by gi_20465442 [Arabidopsis thaliana] >gi|17528994|gb|AAL38707.1|
  misc_feature (93)..(333): Homolog of NCBI NO: 37522744 NR Description: hypothetical protein gll3175 [Gloeobacter
MASSSLSSPPLSLILLRPLPCIPVLLLRQRKPFPAVRVEARSQQRLQRRPVTGQWRRSCRRGGGYACFSYNAKNKTPPPSDKSSDEWAIVRRWDVPWEWQTVVLSMVGCGVSFVLTGLVEQLALQELGFKAVEATIDEKAEILFFGQLSVTVVVLGVIFGITNTFRPFPDDVFRYHIKEPFKLQNGWLLWAGIGLFGAVISIALAGAAMTYLNGETPARETDSLVLLLPLIGSSTTSTAFLVGITGVLAPLLEETLFRGFLMVSLTKWFPTPACVLVSAAVFALAHLTPGQFPQLFILGVALGFSYAQTRNLLTPITIHAFWNSGVILLLTFLQLQGYDLKELLGAS

SEQ ID NO: 10979 - DNA, 875 bp, Zea mays subsp. mays
  misc_feature (1)..(875): Ceres Seq. ID no. 12404015
  misc_feature: MA Experiment ID: 108515 Result: Down-regulated in Transcription
  misc_feature: MA Experiment 108515 PARAMETER Experiment Name: Zm_2mM_SA_P Parameter: Age (day) Value: 8
  misc_feature: MA Experiment 108515 PARAMETER Experiment Name: Zm_2mM_SA_P Parameter: Organism Value: Zea mays
  misc_feature: MA Experiment 108515 PARAMETER Experiment Name: Zm_2mM_SA_P Parameter: Plant Line Value: 35A19
  misc_feature: MA Experiment 108515 PARAMETER Experiment Name: Zm_2mM_SA_P Parameter: Timepoint (hr) Value: 12
  misc_feature: MA Experiment 108515 PARAMETER Experiment Name: Zm_2mM_SA_P Parameter: Tissue Value: Aerial
  misc_feature: MA Experiment 108515 PARAMETER Experiment Name: Zm_2mM_SA_P Parameter: Treatment Value: 2mM SA vs. No Treatment
  misc_feature: MA Experiment ID: 108522 Result: Down-regulated in Transcription
  misc_feature: MA Experiment 108522 PARAMETER Experiment Name: Zm_42deg_Heat_P Parameter: Age (day) Value: 8
  misc_feature: MA Experiment 108522 PARAMETER Experiment Name: Zm_42deg_Heat_P Parameter: Organism Value: Zea mays
  misc_feature: MA Experiment 108522 PARAMETER Experiment Name: Zm_42deg_Heat_P Parameter: Plant Line Value: 35A19
  misc_feature: MA Experiment 108522 PARAMETER Experiment Name: Zm_42deg_Heat_P Parameter: Temperature (deg C) Value: 42 vs. 22
  misc_feature: MA Experiment 108522 PARAMETER Experiment Name: Zm_42deg_Heat_P Parameter: Timepoint (hr) Value: 1
  misc_feature: MA Experiment 108522 PARAMETER Experiment Name: Zm_42deg_Heat_P Parameter: Tissue Value: Aerial
  misc_feature: MA Experiment ID: 108523 Result: Down-regulated in Transcription
  misc_feature: MA Experiment 108523 PARAMETER Experiment Name: Zm_42deg_Heat_P Parameter: Age (day) Value: 8
  misc_feature: MA Experiment 108523 PARAMETER Experiment Name: Zm_42deg_Heat_P Parameter: Organism Value: Zea mays
  misc_feature: MA Experiment 108523 PARAMETER Experiment Name: Zm_42deg_Heat_P Parameter: Plant Line Value: 35A19
  misc_feature: MA Experiment 108523 PARAMETER Experiment Name: Zm_42deg_Heat_P Parameter: Temperature (deg C) Value: 42 vs. 22
  misc_feature: MA Experiment 108523 PARAMETER Experiment Name: Zm_42deg_Heat_P Parameter: Timepoint (hr) Value: 6
  misc_feature: MA Experiment 108523 PARAMETER Experiment Name: Zm_42deg_Heat_P Parameter: Tissue Value: Aerial
  misc_feature: MA Experiment ID: 108528 Result: Up-regulated in Transcription
  misc_feature: MA Experiment 108528 PARAMETER Experiment Name: Zm_Imbibed_Seeds_P Parameter: Age (day) Value: 5 vs. 2
  misc_feature: MA Experiment 108528 PARAMETER Experiment Name: Zm_Imbibed_Seeds_P Parameter: Organism Value: Zea mays
  misc_feature: MA Experiment 108528 PARAMETER Experiment Name: Zm_Imbibed_Seeds_P Parameter: Plant Line Value: 35A19
  misc_feature: MA Experiment 108528 PARAMETER Experiment Name: Zm_Imbibed_Seeds_P Parameter: Tissue Value: Aerial vs. Embryo
  misc_feature: MA Experiment ID: 108529 Result: Up-regulated in Transcription
  misc_feature: MA Experiment 108529 PARAMETER Experiment Name: Zm_Imbibed_Seeds_P Parameter: Age (day) Value: 5 vs. 2
  misc_feature: MA Experiment 108529 PARAMETER Experiment Name: Zm_Imbibed_Seeds_P Parameter: Organism Value: Zea mays
  misc_feature: MA Experiment 108529 PARAMETER Experiment Name: Zm_Imbibed_Seeds_P Parameter: Plant Line Value: 35A19
  misc_feature: MA Experiment 108529 PARAMETER Experiment Name: Zm_Imbibed_Seeds_P Parameter: Tissue Value: Roots vs. Embryo
  misc_feature: MA Experiment ID: 108530 Result: Up-regulated in Transcription
  misc_feature: MA Experiment 108530 PARAMETER Experiment Name: Zm_Imbibed_Seeds_P Parameter: Age (day) Value: 6 vs. 2
  misc_feature: MA Experiment 108530 PARAMETER Experiment Name: Zm_Imbibed_Seeds_P Parameter: Organism Value: Zea mays
  misc_feature: MA Experiment 108530 PARAMETER Experiment Name: Zm_Imbibed_Seeds_P Parameter: Plant Line Value: 35A19
  misc_feature: MA Experiment 108530 PARAMETER Experiment Name: Zm_Imbibed_Seeds_P Parameter: Tissue Value: Aerial vs. Embryo
  misc_feature: MA Experiment ID: 108535 Result: Down-regulated in Transcription
  misc_feature: MA Experiment 108535 PARAMETER Experiment Name: Zm_Meristem_P Parameter: Age (day) Value: 8
  misc_feature: MA Experiment 108535 PARAMETER Experiment Name: Zm_Meristem_P Parameter: Organism Value: Zea mays
  misc_feature: MA Experiment 108535 PARAMETER Experiment Name: Zm_Meristem_P Parameter: Plant Line Value: 35A19
  misc_feature: MA Experiment 108535 PARAMETER Experiment Name: Zm_Meristem_P Parameter: Tissue Value: Root Meristem vs. Above Root Meristem
  misc_feature: MA Experiment ID: 108543 Result: Up-regulated in Transcription
  misc_feature: MA Experiment ID: 108547 Result: Up-regulated in Transcription
  misc_feature: MA Experiment 108547 PARAMETER Experiment Name: Zm_Imbibed_Seeds_P Parameter: Age (day) Value: 4 vs. 2
  misc_feature: MA Experiment 108547 PARAMETER Experiment Name: Zm_Imbibed_Seeds_P Parameter: Organism Value: Zea mays
  misc_feature: MA Experiment 108547 PARAMETER Experiment Name: Zm_Imbibed_Seeds_P Parameter: Plant Line Value: 35A19
  misc_feature: MA Experiment 108547 PARAMETER Experiment Name: Zm_Imbibed_Seeds_P Parameter: Tissue Value: Aerial vs. Embryo
  misc_feature: MA Experiment ID: 108556 Result: Down-regulated in Transcription
  misc_feature: MA Experiment 108556 PARAMETER Experiment Name: Zm_Drought_P Parameter: Age (day) Value: 9
  misc_feature: MA Experiment 108556 PARAMETER Experiment Name: Zm_Drought_P Parameter: Organism Value: Zea mays
  misc_feature: MA Experiment 108556 PARAMETER Experiment Name: Zm_Drought_P Parameter: Plant Line Value: 35A19
  misc_feature: MA Experiment 108556 PARAMETER Experiment Name: Zm_Drought_P Parameter: Timepoint (hr) Value: 24
  misc_feature: MA Experiment 108556 PARAMETER Experiment Name: Zm_Drought_P Parameter: Tissue Value: Aerial
  misc_feature: MA Experiment 108556 PARAMETER Experiment Name: Zm_Drought_P Parameter: Treatment Value: Drought vs. No Drought
  misc_feature: MA Experiment ID: 108559 Result: Down-regulated in Transcription
  misc_feature: MA Experiment 108559 PARAMETER Experiment Name: Zm_5mM_NO_P Parameter: Age (day) Value: 8
  misc_feature: MA Experiment 108559 PARAMETER Experiment Name: Zm_5mM_NO_P Parameter: Organism Value: Zea mays
  misc_feature: MA Experiment 108559 PARAMETER Experiment Name: Zm_5mM_NO_P Parameter: Plant Line Value: 35A19
  misc_feature: MA Experiment 108559 PARAMETER Experiment Name: Zm_5mM_NO_P Parameter: Timepoint (hr) Value: 12
  misc_feature: MA Experiment 108559 PARAMETER Experiment Name: Zm_5mM_NO_P Parameter: Tissue Value: Aerial
  misc_feature: MA Experiment 108559 PARAMETER Experiment Name: Zm_5mM_NO_P Parameter: Treatment Value: 5mM NO vs. No Treatment
  misc_feature: MA Experiment ID: 108597 Result: Down-regulated in Transcription
  misc_feature: MA Experiment 108597 PARAMETER Experiment Name: Zm_100uM_ABA_P Parameter: Age (day) Value: 9
  misc_feature: MA Experiment 108597 PARAMETER Experiment Name: Zm_100uM_ABA_P Parameter: Organism Value: Zea mays
  misc_feature: MA Experiment 108597 PARAMETER Experiment Name: Zm_100uM_ABA_P Parameter: Plant Line Value: 35A19
  misc_feature: MA Experiment 108597 PARAMETER Experiment Name: Zm_100uM_ABA_P Parameter: Timepoint (hr) Value: 24
  misc_feature: MA Experiment 108597 PARAMETER Experiment Name: Zm_100uM_ABA_P Parameter: Tissue Value: Aerial
  misc_feature: MA Experiment 108597 PARAMETER Experiment Name: Zm_100uM_ABA_P Parameter: Treatment Value: 100uM ABA vs. No Treatment
  misc_feature: MA Experiment ID: 108687 Result: Down-regulated in Transcription
  misc_feature: MA Experiment 108687 PARAMETER Experiment Name: Zm_Embryos-Flowers__P Parameter: Tissue Value: Embryo vs. Aerial+
  misc_feature: MA Experiment ID: 108689 Result: Up-regulated in Transcription
  misc_feature: MA Experiment 108689 PARAMETER Experiment Name: Zm_Drought_Roots_P Parameter: Age (day) Value: 9
  misc_feature: MA Experiment 108689 PARAMETER Experiment Name: Zm_Drought_Roots_P Parameter: Organism Value: Zea mays
  misc_feature: MA Experiment 108689 PARAMETER Experiment Name: Zm_Drought_Roots_P Parameter: Plant Line Value: 35A19
  misc_feature: MA Experiment 108689 PARAMETER Experiment Name: Zm_Drought_Roots_P Parameter: Timepoint (hr) Value: 24
  misc_feature: MA Experiment 108689 PARAMETER Experiment Name: Zm_Drought_Roots_P Parameter: Tissue Value: Roots
  misc_feature: MA Experiment 108689 PARAMETER Experiment Name: Zm_Drought_Roots_P Parameter: Treatment Value: Drought vs. No Drought
  misc_feature: MA Experiment ID: 20000108 Result: Down-regulated in Transcription
  misc_feature: MA Experiment 20000108 PARAMETER Experiment Name: Zm_Root-Tips_P Parameter: Age (day) Value: 12
  misc_feature: MA Experiment 20000108 PARAMETER Experiment Name: Zm_Root-Tips_P Parameter: Organism Value: Zea mays
  misc_feature: MA Experiment 20000108 PARAMETER Experiment Name: Zm_Root-Tips_P Parameter: Tissue Value: Root tips vs. Root mid region    35
  misc_feature: MA Experiment 20000108 PARAMETER Experiment Name: Zm_Root-Tips_P Parameter: Tissue Value: Root tips vs. Root mid region   Sequence Listing-Misc Features (4)
  misc_feature: MA Experiment ID: 20000492 Result: Down-regulated in Transcription
  misc_feature: MA Experiment 20000492 PARAMETER Experiment Name: Zm_Hybrid_Seed_Dev_P Parameter: DAP Value: 12
  misc_feature: MA Experiment 20000492 PARAMETER Experiment Name: Zm_Hybrid_Seed_Dev_P Parameter: Organism Value: Zea mays
  misc_feature: MA Experiment 20000492 PARAMETER Experiment Name: Zm_Hybrid_Seed_Dev_P Parameter: Plant Line Value: 35A19
  misc_feature: MA Experiment 20000492 PARAMETER Experiment Name: Zm_Hybrid_Seed_Dev_P Parameter: Tissue Value: Fert Kernel vs. Unfert Floret
  misc_feature: MA Experiment ID: 20000535 Result: Down-regulated in Transcription
  misc_feature: MA Experiment 20000535 PARAMETER Experiment Name: Zm_Hybrid_Seed_Dev_P Parameter: DAP Value: 30 vs. 12
  misc_feature: MA Experiment 20000535 PARAMETER Experiment Name: Zm_Hybrid_Seed_Dev_P Parameter: Organism Value: Zea mays
  misc_feature: MA Experiment 20000535 PARAMETER Experiment Name: Zm_Hybrid_Seed_Dev_P Parameter: Plant Line Value: 35A19
  misc_feature: MA Experiment 20000535 PARAMETER Experiment Name: Zm_Hybrid_Seed_Dev_P Parameter: Tissue Value: Embryo vs. Unfert Floret
  misc_feature: MA Experiment ID: 20000626 Result: Down-regulated in Transcription
  misc_feature: MA Experiment 20000626 PARAMETER Experiment Name: Zm_Herbicide-Treatments_P Parameter: Timepoint (hr) Value: 12
  misc_feature: MA Experiment 20000626 PARAMETER Experiment Name: Zm_Herbicide-Treatments_P Parameter: Tissue Value: Aerial
  misc_feature: MA Experiment 20000626 PARAMETER Experiment Name: Zm_Herbicide-Treatments_P Parameter: Treatment Value: Roundup vs. No Treatment
accacgcaaaaaacaaacacactcgaaggcagcgaagcccgagccttcccttccctccaatcgatcacccgcttcgatccgctagctagctagcagcgcgatggcttccctcaccgtgtccacgaagaccgcggcggccggcggcaacaagcagcgcgagggcgcggaggtcatcacgggcgcggaggcctgcttcgcgcactccaagcagatgctccaggcgctgggcttcccgggcggcgtgatgccgctgcgggggctggaggagtgcggctgggtgcgcgagaccgggttcgtgtggatgcggcagaaggccccctacgagcactacttccgcggcacgggcacgcgggtgcgctacgacgccgaggtcaccgcgtacgtggaggacggccggatgaagcgcatgaccggggtgcgcagcaagccaggtcatgctctgggtgcccatcgtcgagatgagcctcgacggagagaagcgcgacaagatctacttcaagtccaacgtcgggatcggccgctcgttccccgcctccgccttcgctgacgaggacgagcaagcggaggaggaggagaagaagaagaatgagaacaaggaggagaacggcgacaagccagccgccgccgccgccgatgccgccggcaagtgagacggagacccgagcgcgcgcgtgttgtcgtcgtgccgggtactgtgcgcggttgcagggcaccgttgcgcgacgcatctcgcgcgtaaccacgcgtgaagatgcacgtatctatcgtctttctttgctactttgtattgcttgtcctttttcctccttttttttctttcaaaaaatgtattattgcctgtatctatcgatcgttgcatgtttaccgcgtttgat

SEQ ID NO: 10980 - protein, 148 aa, Zea mays subsp. mays
  peptide (1)..(148): Ceres Seq. ID no. 12404016
  misc_feature (48)..(107): Pfam Name: Protein of unknown function, DUF538 Pfam Description: Protein of unknown function, DUF538
  misc_feature (18)..(109): Homolog of NCBI NO: 18422648 NR Description: expressed protein; protein id: At5g46230.1, by cDNA: 15495. [Arabidopsis thaliana] gene_id:MPL12.1~unknown protein [Arabidopsis thaliana]
  misc_feature (19)..(109): Homolog of NCBI NO: 34915376 NR Description: hypothetical protein~similar to Oryza sativa
  misc_feature (48)..(107): Homolog of NCBI NO: 37536100 NR Description: hypothetical protein [Oryza sativa (japonica group)] >gi|13786458|gb|AAK39583.1| hypothetical protein [Oryza >gi|31433079|gb|AAP54639.1| hypothetical protein [Oryza sativa
  misc_feature (19)..(109): Homolog of NCBI NO: 34903866 NR Description: unnamed protein product [Oryza sativa (japonica group)] >gi|8096574|dbj|BAA96147.1| unnamed protein product
  misc_feature (19)..(109): Homolog of NCBI NO: 34915378 NR Description: hypothetical protein~similar to Oryza sativa
  misc_feature (19)..(109): Homolog of NCBI NO: 34915416 NR Description: hypothetical protein~similar to Arabidopsis
  misc_feature (19)..(109): Homolog of NCBI NO: 18391006 NR Description: expressed protein; protein id: At1g09310.1, by cDNA: 11073., supported by cDNA: gi_13194795, supported by gi_15028182, supported by cDNA: gi_19310812 [Arabidopsis
  misc_feature (7)..(109): Homolog of NCBI NO: 15233705 NR Description: putative protein; protein id: At4g24130.1
  misc_feature (19)..(109): Homolog of NCBI NO: 34915410 NR Description: hypothetical protein~similar to Arabidopsis
  misc_feature (19)..(109): Homolog of NCBI NO: 33146557 NR Description: unknown protein [Oryza sativa (japonica
MASLTVSTKTAAAGGNKQREGAEVITGAEACFAHSKQMLQALGFPGGVMPLRGLEECGWVRETGFVWMRQKAPYEHYFRGTGTRVRYDAEVTAYVEDGRMKRMTGVRSKPGHALGAHRRDEPRRREARQDLLQVQRRDRPLVPRLRLR

SEQ ID NO: 10981 - protein, 111 aa, Zea mays subsp. mays
  peptide (1)..(111): Ceres Seq. ID no. 12404017
  misc_feature (11)..(70): Pfam Name: Protein of unknown function, DUF538 Pfam Description: Protein of unknown function, DUF538
  misc_feature (11)..(70): Homolog of NCBI NO: 37536100 NR Description: hypothetical protein [Oryza sativa (japonica group)] >gi|13786458|gb|AAK39583.1| hypothetical protein [Oryza >gi|31433079|gb|AAP54639.1| hypothetical protein [Oryza sativa
  misc_feature (1)..(72): Homolog of NCBI NO: 15233705 NR Description: putative protein; protein id: At4g24130.1
  misc_feature (1)..(72): Homolog of NCBI NO: 34903866 NR Description: unnamed protein product [Oryza sativa (japonica group)] >gi|8096574|dbj|BAA96147.1| unnamed protein product
  misc_feature (1)..(72): Homolog of NCBI NO: 18391006 NR Description: expressed protein; protein id: At1g09310.1, by cDNA: 11073., supported by cDNA: gi_13194795, supported by gi_15028182, supported by cDNA: gi_19310812 [Arabidopsis
  misc_feature (1)..(72): Homolog of NCBI NO: 34915378 NR Description: hypothetical protein~similar to Oryza sativa
  misc_feature (1)..(72): Homolog of NCBI NO: 34915416 NR Description: hypothetical protein~similar to Arabidopsis
  misc_feature (1)..(72): Homolog of NCBI NO: 18422648 NR Description: expressed protein; protein id: At5g46230.1, by cDNA: 15495. [Arabidopsis thaliana] gene_id:MPL12.1~unknown protein [Arabidopsis thaliana]
  misc_feature (1)..(72): Homolog of NCBI NO: 34915376 NR Description: hypothetical protein~similar to Oryza sativa
  misc_feature (1)..(72): Homolog of NCBI NO: 34915410 NR Description: hypothetical protein~similar to Arabidopsis
  misc_feature (1)..(72): Homolog of NCBI NO: 33146557 NR Description: unknown protein [Oryza sativa (japonica
MLQALGFPGGVMPLRGLEECGWVRETGFVWMRQKAPYEHYFRGTGTRVRYDAEVTAYVEDGRMKRMTGVRSKPGHALGAHRRDEPRRREARQDLLQVQRRDRPLVPRLRLR

SEQ ID NO: 10982 - protein, 100 aa, Zea mays subsp. mays
  peptide (1)..(100): Ceres Seq. ID no. 12404018
  misc_feature (1)..(59): Pfam Name: Protein of unknown function, DUF538 Pfam Description: Protein of unknown function, DUF538
  misc_feature (1)..(59): Homolog of NCBI NO: 37536100 NR Description: hypothetical protein [Oryza sativa (japonica group)] >gi|13786458|gb|AAK39583.1| hypothetical protein [Oryza >gi|31433079|gb|AAP54639.1| hypothetical protein [Oryza sativa
  misc_feature (1)..(61): Homolog of NCBI NO: 15233705 NR Description: putative protein; protein id: At4g24130.1
  misc_feature (1)..(61): Homolog of NCBI NO: 34903866 NR Description: unnamed protein product [Oryza sativa (japonica group)] >gi|8096574|dbj|BAA96147.1| unnamed protein product
  misc_feature (1)..(61): Homolog of NCBI NO: 18391006 NR Description: expressed protein; protein id: At1g09310.1, by cDNA: 11073., supported by cDNA: gi_13194795, supported by gi_15028182, supported by cDNA: gi_19310812 [Arabidopsis
  misc_feature (1)..(61): Homolog of NCBI NO: 34915378 NR Description: hypothetical protein~similar to Oryza sativa
  misc_feature (1)..(61): Homolog of NCBI NO: 34915416 NR Description: hypothetical protein~similar to Arabidopsis
  misc_feature (1)..(61): Homolog of NCBI NO: 18422648 NR Description: expressed protein; protein id: At5g46230.1, by cDNA: 15495. [Arabidopsis thaliana] gene_id:MPL12.1~unknown protein [Arabidopsis thaliana]
  misc_feature (1)..(61): Homolog of NCBI NO: 34915376 NR Description: hypothetical protein~similar to Oryza sativa
  misc_feature (1)..(61): Homolog of NCBI NO: 34915410 NR Description: hypothetical protein~similar to Arabidopsis
  misc_feature (1)..(61): Homolog of NCBI NO: 33146557 NR Description: unknown protein [Oryza sativa (japonica
MPLRGLEECGWVRETGFVWMRQKAPYEHYFRGTGTRVRYDAEVTAYVEDGRMKRMTGVRSKPGHALGAHRRDEPRRREARQDLLQVQRRDRPLVPRLRLR

SEQ ID NO: 10983 - DNA, 798 bp, Zea mays subsp. mays
  misc_feature (1)..(798): Ceres Seq. ID no. 12579040
  misc_feature: MA Experiment ID: 108528 Result: Down-regulated in Transcription
  misc_feature: MA Experiment 108528 PARAMETER Experiment Name: Zm_Imbibed_Seeds_P Parameter: Age (day) Value: 5 vs. 2
  misc_feature: MA Experiment 108528 PARAMETER Experiment Name: Zm_Imbibed_Seeds_P Parameter: Organism Value: Zea mays
  misc_feature: MA Experiment 108528 PARAMETER Experiment Name: Zm_Imbibed_Seeds_P Parameter: Plant Line Value: 35A19
  misc_feature: MA Experiment 108528 PARAMETER Experiment Name: Zm_Imbibed_Seeds_P Parameter: Tissue Value: Aerial vs. Embryo
  misc_feature: MA Experiment ID: 108530 Result: Down-regulated in Transcription
  misc_feature: MA Experiment 108530 PARAMETER Experiment Name: Zm_Imbibed_Seeds_P Parameter: Age (day) Value: 6 vs. 2
  misc_feature: MA Experiment 108530 PARAMETER Experiment Name: Zm_Imbibed_Seeds_P Parameter: Organism Value: Zea mays
  misc_feature: MA Experiment 108530 PARAMETER Experiment Name: Zm_Imbibed_Seeds_P Parameter: Plant Line Value: 35A19
  misc_feature: MA Experiment 108530 PARAMETER Experiment Name: Zm_Imbibed_Seeds_P Parameter: Tissue Value: Aerial vs. Embryo
  misc_feature: MA Experiment ID: 108535 Result: Up-regulated in Transcription
  misc_feature: MA Experiment 108535 PARAMETER Experiment Name: Zm_Meristem_P Parameter: Age (day) Value: 8
  misc_feature: MA Experiment 108535 PARAMETER Experiment Name: Zm_Meristem_P Parameter: Organism Value: Zea mays
  misc_feature: MA Experiment 108535 PARAMETER Experiment Name: Zm_Meristem_P Parameter: Plant Line Value: 35A19
  misc_feature: MA Experiment 108535 PARAMETER Experiment Name: Zm_Meristem_P Parameter: Tissue Value: Root Meristem vs. Above Root Meristem
  misc_feature: MA Experiment ID: 108544 Result: Down-regulated in Transcription
  misc_feature: MA Experiment ID: 108556 Result: Down-regulated in Transcription
  misc_feature: MA Experiment 108556 PARAMETER Experiment Name: Zm_Drought_P Parameter: Age (day) Value: 9
  misc_feature: MA Experiment 108556 PARAMETER Experiment Name: Zm_Drought_P Parameter: Organism Value: Zea mays
  misc_feature: MA Experiment 108556 PARAMETER Experiment Name: Zm_Drought_P Parameter: Plant Line Value: 35A19
  misc_feature: MA Experiment 108556 PARAMETER Experiment Name: Zm_Drought_P Parameter: Timepoint (hr) Value: 24
  misc_feature: MA Experiment 108556 PARAMETER Experiment Name: Zm_Drought_P Parameter: Tissue Value: Aerial
  misc_feature: MA Experiment 108556 PARAMETER Experiment Name: Zm_Drought_P Parameter: Treatment Value: Drought vs. No Drought
  misc_feature: MA Experiment ID: 20000492 Result: Up-regulated in Transcription
  misc_feature: MA Experiment 20000492 PARAMETER Experiment Name: Zm_Hybrid_Seed_Dev_P Parameter: DAP Value: 12
  misc_feature: MA Experiment 20000492 PARAMETER Experiment Name: Zm_Hybrid_Seed_Dev_P Parameter: Organism Value: Zea mays
  misc_feature: MA Experiment 20000492 PARAMETER Experiment Name: Zm_Hybrid_Seed_Dev_P Parameter: Plant Line Value: 35A19
  misc_feature: MA Experiment 20000492 PARAMETER Experiment Name: Zm_Hybrid_Seed_Dev_P Parameter: Tissue Value: Fert Kernel vs. Unfert Floret
  misc_feature: MA Experiment ID: 20000535 Result: Up-regulated in Transcription
  misc_feature: MA Experiment 20000535 PARAMETER Experiment Name: Zm_Hybrid_Seed_Dev_P Parameter: DAP Value: 30 vs. 12
  misc_feature: MA Experiment 20000535 PARAMETER Experiment Name: Zm_Hybrid_Seed_Dev_P Parameter: Organism Value: Zea mays
  misc_feature: MA Experiment 20000535 PARAMETER Experiment Name: Zm_Hybrid_Seed_Dev_P Parameter: Plant Line Value: 35A19
  misc_feature: MA Experiment 20000535 PARAMETER Experiment Name: Zm_Hybrid_Seed_Dev_P Parameter: Tissue Value: Embryo vs. Unfert Floret
  misc_feature: MA Experiment ID: 20001612 Result: Up-regulated in Transcription
  misc_feature: MA Experiment 20001612 PARAMETER Experiment Name: Zm_50ppm_KNO3_L-to-H_P Parameter: Age (day) Value: 19
  misc_feature: MA Experiment 20001612 PARAMETER Experiment Name: Zm_50ppm_KNO3_L-to-H_P Parameter: Organism Value: Zea mays
  misc_feature: MA Experiment 20001612 PARAMETER Experiment Name: Zm_50ppm_KNO3_L-to-H_P Parameter: Plant Line Value: 35A19
  misc_feature: MA Experiment 20001612 PARAMETER Experiment Name: Zm_50ppm_KNO3_L-to-H_P Parameter: Timepoint (hr) Value: 8
  misc_feature: MA Experiment 20001612 PARAMETER Experiment Name: Zm_50ppm_KNO3_L-to-H_P Parameter: Tissue Value: Roots
  misc_feature: MA Experiment 20001612 PARAMETER Experiment Name: Zm_50ppm_KNO3_L-to-H_P Parameter: Treatment Value: 50ppm KNO3 vs. 50ppm KCl
atttttcgaccgccgccgcccccagtccccgatccgaagctgtgcctcgtaccatttcgatccaatggcgccgacgtcgaagctgtcgacgggcatcaagcgcgcttcgcggtcgcacacgtaccatcgccgtgggctgtgggccatcaaggccaagaacggcggcgccttccccaaggccgacaaggccgccgccgccgtggaacccaatttctaccctgccgacgacgtcaagccccgcgttcccagcacccgcaagcctaagcctaccaagctcaggtcgagcatcacgcctgggacggtgctgatcctcctcgcagggcgcttcatggggaagagagtggtgtttctcaagcagctcaagtctggcctgctccttatctctgggcctttcaagatcaatggagtaccgatccgccgtgtgaaccagacctatggagaagaagcagaaggtgaagaagaccgagggcgagctttttgagacagaaaaggaggcatccaagtcactgcctgacttcaagaaggatgaccagaaggctgtggattctgctctgatcaaggctatcgaggctgtcctggagctgaaaacctatcttggcgcccggttctctctcagggatggtgacaagccccatgagatggtattctaagtttctagttttggagttcgtaggaagctgttttgtctgtgttcttgtacttctgagttttgtaccagtagcgaacgtttcattgtgattgaagtcttcctgccaaatattataagatctaagaaagttctatccgtgttggtggtcc

SEQ ID NO: 10984 - protein, 159 aa, Zea mays subsp. mays
  peptide (1)..(159): Ceres Seq. ID no. 12579041
  misc_feature (22)..(145): Homolog of NCBI NO: 38344818 NR Description: OSJNBb0022F23.11 [Oryza sativa (japonica
  misc_feature (28)..(145): Homolog of NCBI NO: 15221126 NR Description: putative 60S ribosomal protein L6; protein id: supported by cDNA: 3418., supported by cDNA: gi_15450985, by cDNA: gi_19698916 [Arabidopsis thaliana]
  misc_feature (28)..(145): Homolog of NCBI NO: 15221127 NR Description: putative 60S ribosomal protein L6; protein id: supported by cDNA: gi_17065091 [Arabidopsis thaliana]
  misc_feature (28)..(145): Homolog of NCBI NO: 15221798 NR Description: 60S ribosomal protein L6, putative; protein id: supported by cDNA: 573., supported by cDNA: gi_15451189, by cDNA: gi_18377489 [Arabidopsis thaliana]
  misc_feature (27)..(145): Homolog of NCBI NO: 464621 NR Description: 60S RIBOSOMAL PROTEIN L6 (YL16-LIKE)
  misc_feature (28)..(145): Homolog of NCBI NO: 21593910 NR Description: 60S ribosomal protein L6, putative [Arabidopsis
  misc_feature (28)..(145): Homolog of NCBI NO: 7208784 NR Description: 60S ribosomal protein L6 [Cicer arietinum]
  misc_feature (69)..(145): Homolog of NCBI NO: 6012952 NR Description: 60S ribosomal protein L6 (YL 16 like) [Cyanophora
  misc_feature (67)..(145): Homolog of NCBI NO: 7271018 NR Description: ribosomal protein L16 [Candida albicans]
  misc_feature (64)..(145): Homolog of NCBI NO: 6323567 NR Description: Homology to rat L6 and human L6; Rpl6ap
FFDRRRPQSPIRSCASYHFDPMAPTSKLSTGIKRASRSHTYHRRGLWAIKAKNGGAFPKADKAAAAVEPNFYPADDVKPRVPSTRKPKPTKLRSSITPGTVLILLAGRFMGKRVVFLKQLKSGLLLISGPFKINGVPIRRVNQTYGEEAEGEEDRGRAF

SEQ ID NO: 10985 - protein, 138 aa, Zea mays subsp. mays
  peptide (1)..(138): Ceres Seq. ID no. 12579042
  misc_feature (1)..(124): Homolog of NCBI NO: 38344818 NR Description: OSJNBb0022F23.11 [Oryza sativa (japonica
  misc_feature (7)..(124): Homolog of NCBI NO: 15221126 NR Description: putative 60S ribosomal protein L6; protein id: supported by cDNA: 3418., supported by cDNA: gi_15450985, by cDNA: gi_19698916 [Arabidopsis thaliana]
  misc_feature (7)..(124): Homolog of NCBI NO: 15221127 NR Description: putative 60S ribosomal protein L6; protein id: supported by cDNA: gi_17065091 [Arabidopsis thaliana]
  misc_feature (7)..(124): Homolog of NCBI NO: 15221798 NR Description: 60S ribosomal protein L6, putative; protein id: supported by cDNA: 573., supported by cDNA: gi_15451189, by cDNA: gi_18377489 [Arabidopsis thaliana]
  misc_feature (6)..(124): Homolog of NCBI NO: 464621 NR Description: 60S RIBOSOMAL PROTEIN L6 (YL16-LIKE)
  misc_feature (7)..(124): Homolog of NCBI NO: 21593910 NR Description: 60S ribosomal protein L6, putative [Arabidopsis
  misc_feature (7)..(124): Homolog of NCBI NO: 7208784 NR Description: 60S ribosomal protein L6 [Cicer arietinum]
  misc_feature (48)..(124): Homolog of NCBI NO: 6012952 NR Description: 60S ribosomal protein L6 (YL 16 like) [Cyanophora
  misc_feature (46)..(124): Homolog of NCBI NO: 7271018 NR Description: ribosomal protein L16 [Candida albicans]
  misc_feature (43)..(124): Homolog of NCBI NO: 6323567 NR Description: Homology to rat L6 and human L6; Rpl6ap
MAPTSKLSTGIKRASRSHTYHRRGLWAIKAKNGGAFPKADKAAAAVEPNFYPADDVKPRVPSTRKPKPTKLRSSITPGTVLILLAGRFMGKRVVFLKQLKSGLLLISGPFKINGVPIRRVNQTYGEEAEGEEDRGRAF

SEQ ID NO: 10986 - protein, 101 aa, Zea mays subsp. mays
  peptide (1)..(101): Ceres Seq. ID no. 12579043
FSTAAAPSPRSEAVPRTISIQWRRRRSCRRASSALRGRTRTIAVGCGPSRPRTAAPSPRPTRPPPPWNPISTLPTTSSPAFPAPASLSLPSSGRASRLGRC

SEQ ID NO: 10987 - DNA, 1654 bp, Zea mays subsp. mays
  misc_feature (1)..(1654): Ceres Seq. ID no. 12351319
  misc_feature: MA Experiment ID: 108535 Result: Up-regulated in Transcription
  misc_feature: MA Experiment 108535 PARAMETER Experiment Name: Zm_Meristem_P Parameter: Age (day) Value: 8
  misc_feature: MA Experiment 108535 PARAMETER Experiment Name: Zm_Meristem_P Parameter: Organism Value: Zea mays
  misc_feature: MA Experiment 108535 PARAMETER Experiment Name: Zm_Meristem_P Parameter: Plant Line Value: 35A19
  misc_feature: MA Experiment 108535 PARAMETER Experiment Name: Zm_Meristem_P Parameter: Tissue Value: Root Meristem vs. Above Root Meristem
  misc_feature: MA Experiment ID: 108536 Result: Down-regulated in Transcription
  misc_feature: MA Experiment 108536 PARAMETER Experiment Name: Zm_Meristem_P Parameter: Age (day) Value: 8
  misc_feature: MA Experiment 108536 PARAMETER Experiment Name: Zm_Meristem_P Parameter: Organism Value: Zea mays
  misc_feature: MA Experiment 108536 PARAMETER Experiment Name: Zm_Meristem_P Parameter: Plant Line Value: 35A19
  misc_feature: MA Experiment 108536 PARAMETER Experiment Name: Zm_Meristem_P Parameter: Tissue Value: Shoot Meristem vs. Above Shoot Meristem
  misc_feature: MA Experiment ID: 108543 Result: Up-regulated in Transcription
  misc_feature: MA Experiment ID: 108544 Result: Down-regulated in Transcription
  misc_feature: MA Experiment ID: 108687 Result: Down-regulated in Transcription
  misc_feature: MA Experiment 108687 PARAMETER Experiment Name: Zm_Embryos-Flowers__P Parameter: Tissue Value: Embryo vs. Aerial+
gcgcctggccagtggccatccatcccttcccttcgcttcgacgcaccaatcttgtcccggcgcctgccaaatccagcaaggccacacagcccgaggcaggaagggcagcgcaggaacagggagcgagcagcgcaccggcaatggcggcttcttccgggacgcgctccgtgcgcctgctgctgctgctgctctgcctgctcgggttctgcgtcgcgctgagccaccaggagtcgtcggcggactcgtgcgccagggccaaggtcgcggtcgccagcctcgtgcccttcgactccacgtccttccgctgcaccgccgcctggaagcagcaggacttcgtcctcaggtacaagaacacggggcccagcgagtggagcttcatcctctcggcgccggacaggggctcgtacgtggcggtcggcttctcgggcaagggcgccatggtggggagcagcgccgtcgtcgggtgggtggcccaacggcaggggcaccgtcaagcagtactacctcggcgggaagagccccgaggagtgcgcccccaacaggggcctcctcaagctcgtcaggaacaggaccgccgtcgcctcgcgctccggccgcctctacctcgccttccagctcagcaccgactacccgcagccgtacctgatctacgccgtcgggccagacggcagcctgccgcagtccgactcgctgcggctgccggcgcaccagaacatggcctcccgctccttcaactacacctccgggctgtcgtacaacgtcgccgggtccggcgacgccgcgttcccgccggagaggaagcacgggctgctgggcatgatggggtggggcgtgctgatgcccatcggcatgatcaccgcgcgctacttccggcagctggacccgtgctggttctacacccacatggccatccaggtggctggctacgccgtcggcatcgcgggcatcgtcctcggcttccgcctcagcgaggacgggctcaggaacgtggacgtgcacaaggcgctcggcatcgccatcttggccatggcgtctcttcaggtgatggcgatcctggcgcggccggacaagacgtccaaggtgcggcggttctggaactggtaccaccacaacatcgggcgcgcggcgatcctgctggccatcggcaacatcttcctgggcctctccatcgcgcaggagaccagcgcctacatcgtctcctacggcgtgttcgtcgccgtctgggtgctcgccgtcgccgccttcgagatgaagcgctgctacgccgacgacgactgatgagctagcgacacgtaagagtcacagttcggtcccaacagctgacggcgaagtttggtgtcgttaaactgagcgttccacggccagctgggacgtgacagacacacgagctccgagcgcgcgcgcgcacacacacacaacattcttgttgttccgtagctcgcagctggacagtgcattattggttcggggaggtcgtgctttggttggctaatttaaaaaaaaaattgtttttttttgaggtataggatgtgaggaaggggacggtctgctgtttctaggctagctggacgctctgattcataaatttgtacattgattggtacgtggtcgtgttgtgttgtaccctttttggacgatagcatgttcttcgccc

SEQ ID NO: 10988 - protein, 427 aa, Zea mays subsp. mays
  peptide (1)..(427): Ceres Seq. ID no. 12351320
  misc_feature (109)..(214): Pfam Name: DOMON domain Pfam Description: DOMON domain
  misc_feature (48)..(181): Homolog of NCBI NO: 21740784 NR Description: OSJNBa0067K08.25 [Oryza sativa (japonica
  misc_feature (6)..(155): Homolog of NCBI NO: 34907602 NR Description: B1078G07.42 [Oryza sativa (japonica
  misc_feature (54)..(157): Homolog of NCBI NO: 34907596 NR Description: B1078G07.39 [Oryza sativa (japonica
  misc_feature (60)..(186): Homolog of NCBI NO: 34911180 NR Description: P0019E03.5 [Oryza sativa (japonica
  misc_feature (47)..(114): Homolog of NCBI NO: 34907570 NR Description: B1078G07.26 [Oryza sativa (japonica
  misc_feature (121)..(155): Homolog of NCBI NO: 34907570 NR Description: B1078G07.26 [Oryza sativa (japonica
  misc_feature (60)..(214): Homolog of NCBI NO: 30680365 NR Description: auxin-induced protein-related [Arabidopsis
  misc_feature (60)..(214): Homolog of NCBI NO: 6466940 NR Description: unknown protein [Arabidopsis thaliana]
AWPVAIHPFPSLRRTNLVPAPAKSSKATQPEAGRAAQEQGASSAPAMAASSGTRSVRLLLLLLCLLGFCVALSHQESSADSCARAKVAVASLVPFDSTSFRCTAAWKQQDFVLRYKNTGPSEWSFILSAPDRGSYVAVGFSGKGAMVGSSAVVGWVAQRQGHRQAVLPRREEPRGVRPQQGPPQARQEQDRRRLALRPPLPRLPAQHRLPAAVPDLRRRARRQPAAVRLAAAAGAPEHGLPLLQLHLRAVVQRRRVRRRRVPAGEEARAAGHDGVGRADAHRHDHRALLPAAGPVLVLHPHGHPGGWLRRRHRGHRPRLPPQRGRAQERGRAQGARHRHLGHGVSSGDGDPGAAGQDVQGAAVLELVPPQHRARGDPAGHRQHLPGPLHRAGDQRLHRLLRRVRRRLGARRRRLRDEALLRRRRLMS

SEQ ID NO: 10989 - protein, 381 aa, Zea mays subsp. mays
  peptide (1)..(381): Ceres Seq. ID no. 12351321
  misc_feature (63)..(168): Pfam Name: DOMON domain Pfam Description: DOMON domain
  misc_feature (2)..(135): Homolog of NCBI NO: 21740784 NR Description: OSJNBa0067K08.25 [Oryza sativa (japonica
  misc_feature (1)..(109): Homolog of NCBI NO: 34907602 NR Description: B1078G07.42 [Oryza sativa (japonica
  misc_feature (8)..(111): Homolog of NCBI NO: 34907596 NR Description: B1078G07.39 [Oryza sativa (japonica
  misc_feature (14)..(140): Homolog of NCBI NO: 34911180 NR Description: P0019E03.5 [Oryza sativa (japonica
  misc_feature (1)..(68): Homolog of NCBI NO: 34907570 NR Description: B1078G07.26 [Oryza sativa (japonica
  misc_feature (75)..(109): Homolog of NCBI NO: 34907570 NR Description: B1078G07.26 [Oryza sativa (japonica
  misc_feature (14)..(168): Homolog of NCBI NO: 30680365 NR Description: auxin-induced protein-related [Arabidopsis
  misc_feature (14)..(168): Homolog of NCBI NO: 6466940 NR Description: unknown protein [Arabidopsis thaliana]
MAASSGTRSVRLLLLLLCLLGFCVALSHQESSADSCARAKVAVASLVPFDSTSFRCTAAWKQQDFVLRYKNTGPSEWSFILSAPDRGSYVAVGFSGKGAMVGSSAVVGWVAQRQGHRQAVLPRREEPRGVRPQQGPPQARQEQDRRRLALRPPLPRLPAQHRLPAAVPDLRRRARRQPAAVRLAAAAGAPEHGLPLLQLHLRAVVQRRRVRRRRVPAGEEARAAGHDGVGRADAHRHDHRALLPAAGPVLVLHPHGHPGGWLRRRHRGHRPRLPPQRGRAQERGRAQGARHRHLGHGVSSGDGDPGAAGQDVQGAAVLELVPPQHRARGDPAGHRQHLPGPLHRAGDQRLHRLLRRVRRRLGARRRRLRDEALLRRRRLMS

SEQ ID NO: 10990 - protein, 282 aa, Zea mays subsp. mays
  peptide (1)..(282): Ceres Seq. ID no. 12351322
  misc_feature (1)..(69): Pfam Name: DOMON domain Pfam Description: DOMON domain
  misc_feature (1)..(36): Homolog of NCBI NO: 21740784 NR Description: OSJNBa0067K08.25 [Oryza sativa (japonica
  misc_feature (1)..(12): Homolog of NCBI NO: 34907596 NR Description: B1078G07.39 [Oryza sativa (japonica
  misc_feature (1)..(41): Homolog of NCBI NO: 34911180 NR Description: P0019E03.5 [Oryza sativa (japonica
  misc_feature (1)..(69): Homolog of NCBI NO: 30680365 NR Description: auxin-induced protein-related [Arabidopsis
  misc_feature (1)..(69): Homolog of NCBI NO: 6466940 NR Description: unknown protein [Arabidopsis thaliana]
MVGSSAVVGWVAQRQGHRQAVLPRREEPRGVRPQQGPPQARQEQDRRRLALRPPLPRLPAQHRLPAAVPDLRRRARRQPAAVRLAAAAGAPEHGLPLLQLHLRAVVQRRRVRRRRVPAGEEARAAGHDGVGRADAHRHDHRALLPAAGPVLVLHPHGHPGGWLRRRHRGHRPRLPPQRGRAQERGRAQGARHRHLGHGVSSGDGDPGAAGQDVQGAAVLELVPPQHRARGDPAGHRQHLPGPLHRAGDQRLHRLLRRVRRRLGARRRRLRDEALLRRRRLMS

SEQ ID NO: 10991 - DNA, 1507 bp, Zea mays subsp. mays
  misc_feature (1)..(1507): Ceres Seq. ID no. 12413799
  misc_feature: MA Experiment ID: 108515 Result: Down-regulated in Transcription
  misc_feature: MA Experiment 108515 PARAMETER Experiment Name: Zm_2mM_SA_P Parameter: Age (day) Value: 8
  misc_feature: MA Experiment 108515 PARAMETER Experiment Name: Zm_2mM_SA_P Parameter: Organism Value: Zea mays
  misc_feature: MA Experiment 108515 PARAMETER Experiment Name: Zm_2mM_SA_P Parameter: Plant Line Value: 35A19
  misc_feature: MA Experiment 108515 PARAMETER Experiment Name: Zm_2mM_SA_P Parameter: Timepoint (hr) Value: 12
  misc_feature: MA Experiment 108515 PARAMETER Experiment Name: Zm_2mM_SA_P Parameter: Tissue Value: Aerial
  misc_feature: MA Experiment 108515 PARAMETER Experiment Name: Zm_2mM_SA_P Parameter: Treatment Value: 2mM SA vs. No Treatment
  misc_feature: MA Experiment ID: 108528 Result: Up-regulated in Transcription
  misc_feature: MA Experiment 108528 PARAMETER Experiment Name: Zm_Imbibed_Seeds_P Parameter: Age (day) Value: 5 vs. 2
  misc_feature: MA Experiment 108528 PARAMETER Experiment Name: Zm_Imbibed_Seeds_P Parameter: Organism Value: Zea mays
  misc_feature: MA Experiment 108528 PARAMETER Experiment Name: Zm_Imbibed_Seeds_P Parameter: Plant Line Value: 35A19
  misc_feature: MA Experiment 108528 PARAMETER Experiment Name: Zm_Imbibed_Seeds_P Parameter: Tissue Value: Aerial vs. Embryo
  misc_feature: MA Experiment ID: 108529 Result: Up-regulated in Transcription
  misc_feature: MA Experiment 108529 PARAMETER Experiment Name: Zm_Imbibed_Seeds_P Parameter: Age (day) Value: 5 vs. 2
  misc_feature: MA Experiment 108529 PARAMETER Experiment Name: Zm_Imbibed_Seeds_P Parameter: Organism Value: Zea mays
  misc_feature: MA Experiment 108529 PARAMETER Experiment Name: Zm_Imbibed_Seeds_P Parameter: Plant Line Value: 35A19
  misc_feature: MA Experiment 108529 PARAMETER Experiment Name: Zm_Imbibed_Seeds_P Parameter: Tissue Value: Roots vs. Embryo
  misc_feature: MA Experiment ID: 108530 Result: Up-regulated in Transcription
  misc_feature: MA Experiment 108530 PARAMETER Experiment Name: Zm_Imbibed_Seeds_P Parameter: Age (day) Value: 6 vs. 2
  misc_feature: MA Experiment 108530 PARAMETER Experiment Name: Zm_Imbibed_Seeds_P Parameter: Organism Value: Zea mays
  misc_feature: MA Experiment 108530 PARAMETER Experiment Name: Zm_Imbibed_Seeds_P Parameter: Plant Line Value: 35A19
  misc_feature: MA Experiment 108530 PARAMETER Experiment Name: Zm_Imbibed_Seeds_P Parameter: Tissue Value: Aerial vs. Embryo
  misc_feature: MA Experiment ID: 108534 Result: Up-regulated in Transcription
  misc_feature: MA Experiment 108534 PARAMETER Experiment Name: Zm_4deg_Cold_P Parameter: Age (hr) Value: 8
  misc_feature: MA Experiment 108534 PARAMETER Experiment Name: Zm_4deg_Cold_P Parameter: Organism Value: Zea mays
  misc_feature: MA Experiment 108534 PARAMETER Experiment Name: Zm_4deg_Cold_P Parameter: Plant Line Value: 35A19
  misc_feature: MA Experiment 108534 PARAMETER Experiment Name: Zm_4deg_Cold_P Parameter: Temperature (deg C) Value: 4 vs. 22
  misc_feature: MA Experiment 108534 PARAMETER Experiment Name: Zm_4deg_Cold_P Parameter: Timepoint (hr) Value: 6
  misc_feature: MA Experiment 108534 PARAMETER Experiment Name: Zm_4deg_Cold_P Parameter: Tissue Value: Aerial
  misc_feature: MA Experiment ID: 108536 Result: Down-regulated in Transcription
  misc_feature: MA Experiment 108536 PARAMETER Experiment Name: Zm_Meristem_P Parameter: Age (day) Value: 8
  misc_feature: MA Experiment 108536 PARAMETER Experiment Name: Zm_Meristem_P Parameter: Organism Value: Zea mays
  misc_feature: MA Experiment 108536 PARAMETER Experiment Name: Zm_Meristem_P Parameter: Plant Line Value: 35A19
  misc_feature: MA Experiment 108536 PARAMETER Experiment Name: Zm_Meristem_P Parameter: Tissue Value: Shoot Meristem vs. Above Shoot Meristem
  misc_feature: MA Experiment ID: 108545 Result: Up-regulated in Transcription
  misc_feature: MA Experiment 108545 PARAMETER Experiment Name: Zm_Imbibed_Seeds_P Parameter: Age (day) Value: 3 vs. 2
  misc_feature: MA Experiment 108545 PARAMETER Experiment Name: Zm_Imbibed_Seeds_P Parameter: Organism Value: Zea mays
  misc_feature: MA Experiment 108545 PARAMETER Experiment Name: Zm_Imbibed_Seeds_P Parameter: Plant Line Value: 35A19
  misc_feature: MA Experiment 108545 PARAMETER Experiment Name: Zm_Imbibed_Seeds_P Parameter: Tissue Value: Aerial vs. Embryo
  misc_feature: MA Experiment ID: 108547 Result: Up-regulated in Transcription
  misc_feature: MA Experiment 108547 PARAMETER Experiment Name: Zm_Imbibed_Seeds_P Parameter: Age (day) Value: 4 vs. 2
  misc_feature: MA Experiment 108547 PARAMETER Experiment Name: Zm_Imbibed_Seeds_P Parameter: Organism Value: Zea mays
  misc_feature: MA Experiment 108547 PARAMETER Experiment Name: Zm_Imbibed_Seeds_P Parameter: Plant Line Value: 35A19
  misc_feature: MA Experiment 108547 PARAMETER Experiment Name: Zm_Imbibed_Seeds_P Parameter: Tissue Value: Aerial vs. Embryo
  misc_feature: MA Experiment ID: 108559 Result: Down-regulated in Transcription
  misc_feature: MA Experiment 108559 PARAMETER Experiment Name: Zm_5mM_NO_P Parameter: Age (day) Value: 8
  misc_feature: MA Experiment 108559 PARAMETER Experiment Name: Zm_5mM_NO_P Parameter: Organism Value: Zea mays
  misc_feature: MA Experiment 108559 PARAMETER Experiment Name: Zm_5mM_NO_P Parameter: Plant Line Value: 35A19
  misc_feature: MA Experiment 108559 PARAMETER Experiment Name: Zm_5mM_NO_P Parameter: Timepoint (hr) Value: 12
  misc_feature: MA Experiment 108559 PARAMETER Experiment Name: Zm_5mM_NO_P Parameter: Tissue Value: Aerial
  misc_feature: MA Experiment 108559 PARAMETER Experiment Name: Zm_5mM_NO_P Parameter: Treatment Value: 5mM NO vs. No Treatment
  misc_feature: MA Experiment ID: 108687 Result: Down-regulated in Transcription
  misc_feature: MA Experiment 108687 PARAMETER Experiment Name: Zm_Embryos-Flowers__P Parameter: Tissue Value: Embryo vs. Aerial+
  misc_feature: MA Experiment ID: 20000479 Result: Down-regulated in Transcription
  misc_feature: MA Experiment 20000479 PARAMETER Experiment Name: Zm_Drought_P Parameter: Age (day) Value: 10
  misc_feature: MA Experiment 20000479 PARAMETER Experiment Name: Zm_Drought_P Parameter: Organism Value: Zea mays
  misc_feature: MA Experiment 20000479 PARAMETER Experiment Name: Zm_Drought_P Parameter: Plant Line Value: 35A19
  misc_feature: MA Experiment 20000479 PARAMETER Experiment Name: Zm_Drought_P Parameter: Timepoint (hr) Value: 48
  misc_feature: MA Experiment 20000479 PARAMETER Experiment Name: Zm_Drought_P Parameter: Tissue Value: Aerial
  misc_feature: MA Experiment 20000479 PARAMETER Experiment Name: Zm_Drought_P Parameter: Treatment Value: Drought vs. No Drought
  misc_feature: MA Experiment ID: 20000492 Result: Down-regulated in Transcription
  misc_feature: MA Experiment 20000492 PARAMETER Experiment Name: Zm_Hybrid_Seed_Dev_P Parameter: DAP Value: 12
  misc_feature: MA Experiment 20000492 PARAMETER Experiment Name: Zm_Hybrid_Seed_Dev_P Parameter: Organism Value: Zea mays
  misc_feature: MA Experiment 20000492 PARAMETER Experiment Name: Zm_Hybrid_Seed_Dev_P Parameter: Plant Line Value: 35A19
  misc_feature: MA Experiment 20000492 PARAMETER Experiment Name: Zm_Hybrid_Seed_Dev_P Parameter: Tissue Value: Fert Kernel vs. Unfert Floret
  misc_feature: MA Experiment ID: 20000534 Result: Down-regulated in Transcription
  misc_feature: MA Experiment 20000534 PARAMETER Experiment Name: Zm_Hybrid_Pollen_P Parameter: Age (day) Value: 8
  misc_feature: MA Experiment 20000534 PARAMETER Experiment Name: Zm_Hybrid_Pollen_P Parameter: Organism Value: Zea mays
  misc_feature: MA Experiment 20000534 PARAMETER Experiment Name: Zm_Hybrid_Pollen_P Parameter: Plant Line Value: 35A19
  misc_feature: MA Experiment 20000534 PARAMETER Experiment Name: Zm_Hybrid_Pollen_P Parameter: Tissue Value: Pollen vs. Aerial
  misc_feature: MA Experiment ID: 20000535 Result: Down-regulated in Transcription
  misc_feature: MA Experiment 20000535 PARAMETER Experiment Name: Zm_Hybrid_Seed_Dev_P Parameter: DAP Value: 30 vs. 12
  misc_feature: MA Experiment 20000535 PARAMETER Experiment Name: Zm_Hybrid_Seed_Dev_P Parameter: Organism Value: Zea mays
  misc_feature: MA Experiment 20000535 PARAMETER Experiment Name: Zm_Hybrid_Seed_Dev_P Parameter: Plant Line Value: 35A19
  misc_feature: MA Experiment 20000535 PARAMETER Experiment Name: Zm_Hybrid_Seed_Dev_P Parameter: Tissue Value: Embryo vs. Unfert Floret
ctcactactttgagctgcaaggtccgaactaaaaagcacaagaaatggcggccgccttctcctccaccgtcggagctccggcctccaccccgaccaggagcagcttcctcgggaagaagctcaacaagccgcaggtgtccgcggccgtgacctaccatggcaagagctccagcagcaacagcaggttcaaggcgatggctgccaaggaggtggacgagacgaagcagaccgacgaggacaggtggaagggcctggcctacgacatctcggacgaccagcaggacatcaccaggggcaagggcctcgtcgacaacctcttccaggcgcctatgggggacggcacccacgtcgccgtgctcagctcctacgactacatcagccagggccaaaagtcttacaacttcgacaacatgatggatggcttctacatagccaagggcttcatggacaagctcgtcgtccacctctccaagaacttcatgaccctgccaaacatcaaggttcccctcatcctgggtatctggggaggcaaaggccagggaaaatcgttccaatgcgagctggtcttcgccaagatgggcatcacccccatcatgatgagcgccggcgagctggagagcggcaacgccggagagcccgccaagctcatcaggcagcgctaccgtgaggcctccgacctcatcaagaagggcaagatgtcctgcctcttcatcaacgacttggacgccggcgcgggtcgcatgggcggcaccacccagtacacggtgaacaaccagatggtcaacgccaccctgatgaacatcgccgacaaccccaccaacgtgcagctcccggggatgtacaacaaggaggacaacccccgcgtgcccatcatcgtcaccggcaacgacttctccacgctctacgcgccgctcatccgcgacggccgcatggagaagttctactgggcgcccacccgcgaggaccgcatcggcgtctgcaagggcatcttccgcaccgacggcgtcgacgaggagcacgtcgtccagctggtcgacaccttccctggccagtccatcgatttcttcggcgcgctgcgtgcccgggtctacgacgacgaggtccgacggtgggtgagcgagaccggcgtcgagaacatcgccaggaagctcgtcaactccaaggagggcccgcccacgttcgagcagcccaagataacgatcgagaagctcttggagtacggacacatgctggtggcggagcaggagaacgtcaagcgtgtgcagcttgctgacaagtacctcaacgaggctgctcttggtgaagccaacgaggacgccatgaagactggctccttcttcaagtagaaagcaactctttgctattgctagctaggcgcgaggccggcataggatcgaggaggtgaatatatatattacttggatagttttgtaatatataattgcagctgaacgaggacatgcatacatatattcgtctatataatggatcatatatatttcatttc

SEQ ID NO: 10992 - protein, 433 aa, Zea mays subsp. mays
  peptide (1)..(433): Ceres Seq. ID no. 12413800
  misc_feature (156)..(354): Pfam Name: ATPase family associated with various cellular Pfam Description: ATPase family associated with various cellular
  misc_feature (1)..(433): Homolog of NCBI NO: 29429152 NR Description: Ribulose bisphosphate carboxylase/oxygenase chloroplast precursor (RuBisCO activase) (RA)
  misc_feature (1)..(432): Homolog of NCBI NO: 8918359 NR Description: RuBisCO activase large isoform precursor [Oryza
  misc_feature (1)..(432): Homolog of NCBI NO: 8918361 NR Description: RuBisCO activase small isoform precursor [Oryza
  misc_feature (1)..(432): Homolog of NCBI NO: 3914603 NR Description: Ribulose bisphosphate carboxylase/oxygenase
  misc_feature (1)..(432): Homolog of NCBI NO: 7960277 NR Description: ribulose bisphosphate carboxylase activase B
  misc_feature (1)..(432): Homolog of NCBI NO: 167096 NR Description: ribulose 1,5-bisphosphate carboxylase activase
  misc_feature (1)..(432): Homolog of NCBI NO: 12643756 NR Description: Ribulose bisphosphate carboxylase/oxygenase A, chloroplast precursor (RuBisCO activase A) (RA A)
  misc_feature (1)..(432): Homolog of NCBI NO: 100615 NR Description: ribulose-bisphosphate carboxylase activase (EC
  misc_feature (1)..(432): Homolog of NCBI NO: 10720253 NR Description: Ribulose bisphosphate carboxylase/oxygenase B, chloroplast precursor (RuBisCO activase B) (RA B)
  misc_feature (10)..(431): Homolog of NCBI NO: 12620881 NR Description: ribulose-1,5-bisphosphate carboxylase/oxygenase
MAAAFSSTVGAPASTPTRSSFLGKKLNKPQVSAAVTYHGKSSSSNSRFKAMAAKEVDETKQTDEDRWKGLAYDISDDQQDITRGKGLVDNLFQAPMGDGTHVAVLSSYDYISQGQKSYNFDNMMDGFYIAKGFMDKLVVHLSKNFMTLPNIKVPLILGIWGGKGQGKSFQCELVFAKMGITPIMMSAGELESGNAGEPAKLIRQRYREASDLIKKGKMSCLFINDLDAGAGRMGGTTQYTVNNQMVNATLMNIADNPTNVQLPGMYNKEDNPRVPIIVTGNDFSTLYAPLIRDGRMEKFYWAPTREDRIGVCKGIFRTDGVDEEHVVQLVDTFPGQSIDFFGALRARVYDDEVRRWVSETGVENIARKLVNSKEGPPTFEQPKITIEKLLEYGHMLVAEQENVKRVQLADKYLNEAALGEANEDAMKTGSFFK

SEQ ID NO: 10993 - protein, 383 aa, Zea mays subsp. mays
  peptide (1)..(383): Ceres Seq. ID no. 12413801
  misc_feature (106)..(304): Pfam Name: ATPase family associated with various cellular Pfam Description: ATPase family associated with various cellular
  misc_feature (1)..(383): Homolog of NCBI NO: 29429152 NR Description: Ribulose bisphosphate carboxylase/oxygenase chloroplast precursor (RuBisCO activase) (RA)
  misc_feature (1)..(382): Homolog of NCBI NO: 8918359 NR Description: RuBisCO activase large isoform precursor [Oryza
  misc_feature (1)..(382): Homolog of NCBI NO: 8918361 NR Description: RuBisCO activase small isoform precursor [Oryza
  misc_feature (1)..(382): Homolog of NCBI NO: 3914603 NR Description: Ribulose bisphosphate carboxylase/oxygenase
  misc_feature (1)..(382): Homolog of NCBI NO: 7960277 NR Description: ribulose bisphosphate carboxylase activase B
  misc_feature (1)..(382): Homolog of NCBI NO: 167096 NR Description: ribulose 1,5-bisphosphate carboxylase activase
  misc_feature (1)..(382): Homolog of NCBI NO: 12643756 NR Description: Ribulose bisphosphate carboxylase/oxygenase A, chloroplast precursor (RuBisCO activase A) (RA A)
  misc_feature (1)..(382): Homolog of NCBI NO: 100615 NR Description: ribulose-bisphosphate carboxylase activase (EC
  misc_feature (1)..(382): Homolog of NCBI NO: 10720253 NR Description: Ribulose bisphosphate carboxylase/oxygenase B, chloroplast precursor (RuBisCO activase B) (RA B)
  misc_feature (1)..(381): Homolog of NCBI NO: 12620881 NR Description: ribulose-1,5-bisphosphate carboxylase/oxygenase
MAAKEVDETKQTDEDRWKGLAYDISDDQQDITRGKGLVDNLFQAPMGDGTHVAVLSSYDYISQGQKSYNFDNMMDGFYIAKGFMDKLVVHLSKNFMTLPNIKVPLILGIWGGKGQGKSFQCELVFAKMGITPIMMSAGELESGNAGEPAKLIRQRYREASDLIKKGKMSCLFINDLDAGAGRMGGTTQYTVNNQMVNATLMNIADNPTNVQLPGMYNKEDNPRVPIIVTGNDFSTLYAPLIRDGRMEKFYWAPTREDRIGVCKGIFRTDGVDEEHVVQLVDTFPGQSIDFFGALRARVYDDEVRRWVSETGVENIARKLVNSKEGPPTFEQPKITIEKLLEYGHMLVAEQENVKRVQLADKYLNEAALGEANEDAMKTGSFFK

SEQ ID NO: 10994 - protein, 338 aa, Zea mays subsp. mays
  peptide (1)..(338): Ceres Seq. ID no. 12413802
  misc_feature (61)..(259): Pfam Name: ATPase family associated with various cellular Pfam Description: ATPase family associated with various cellular
  misc_feature (1)..(338): Homolog of NCBI NO: 29429152 NR Description: Ribulose bisphosphate carboxylase/oxygenase chloroplast precursor (RuBisCO activase) (RA)
  misc_feature (1)..(337): Homolog of NCBI NO: 8918359 NR Description: RuBisCO activase large isoform precursor [Oryza
  misc_feature (1)..(337): Homolog of NCBI NO: 8918361 NR Description: RuBisCO activase small isoform precursor [Oryza
  misc_feature (1)..(337): Homolog of NCBI NO: 3914603 NR Description: Ribulose bisphosphate carboxylase/oxygenase
  misc_feature (1)..(337): Homolog of NCBI NO: 7960277 NR Description: ribulose bisphosphate carboxylase activase B
  misc_feature (1)..(337): Homolog of NCBI NO: 167096 NR Description: ribulose 1,5-bisphosphate carboxylase activase
  misc_feature (1)..(337): Homolog of NCBI NO: 12643756 NR Description: Ribulose bisphosphate carboxylase/oxygenase A, chloroplast precursor (RuBisCO activase A) (RA A)
  misc_feature (1)..(337): Homolog of NCBI NO: 100615 NR Description: ribulose-bisphosphate carboxylase activase (EC
  misc_feature (1)..(337): Homolog of NCBI NO: 10720253 NR Description: Ribulose bisphosphate carboxylase/oxygenase B, chloroplast precursor (RuBisCO activase B) (RA B)
  misc_feature (1)..(336): Homolog of NCBI NO: 12620881 NR Description: ribulose-1,5-bisphosphate carboxylase/oxygenase
MGDGTHVAVLSSYDYISQGQKSYNFDNMMDGFYIAKGFMDKLVVHLSKNFMTLPNIKVPLILGIWGGKGQGKSFQCELVFAKMGITPIMMSAGELESGNAGEPAKLIRQRYREASDLIKKGKMSCLFINDLDAGAGRMGGTTQYTVNNQMVNATLMNIADNPTNVQLPGMYNKEDNPRVPIIVTGNDFSTLYAPLIRDGRMEKFYWAPTREDRIGVCKGIFRTDGVDEEHVVQLVDTFPGQSIDFFGALRARVYDDEVRRWVSETGVENIARKLVNSKEGPPTFEQPKITIEKLLEYGHMLVAEQENVKRVQLADKYLNEAALGEANEDAMKTGSFFK

SEQ ID NO: 10995 - DNA, 1191 bp, Zea mays subsp. mays
  misc_feature (1)..(1191): Ceres Seq. ID no. 12374274
  misc_feature: MA Experiment ID: 108535 Result: Up-regulated in Transcription
  misc_feature: MA Experiment 108535 PARAMETER Experiment Name: Zm_Meristem_P Parameter: Age (day) Value: 8
  misc_feature: MA Experiment 108535 PARAMETER Experiment Name: Zm_Meristem_P Parameter: Organism Value: Zea mays
  misc_feature: MA Experiment 108535 PARAMETER Experiment Name: Zm_Meristem_P Parameter: Plant Line Value: 35A19
  misc_feature: MA Experiment 108535 PARAMETER Experiment Name: Zm_Meristem_P Parameter: Tissue Value: Root Meristem vs. Above Root Meristem
  misc_feature: MA Experiment ID: 20000108 Result: Up-regulated in Transcription
  misc_feature: MA Experiment 20000108 PARAMETER Experiment Name: Zm_Root-Tips_P Parameter: Age (day) Value: 12
  misc_feature: MA Experiment 20000108 PARAMETER Experiment Name: Zm_Root-Tips_P Parameter: Organism Value: Zea mays
  misc_feature: MA Experiment 20000108 PARAMETER Experiment Name: Zm_Root-Tips_P Parameter: Tissue Value: Root tips vs. Root mid region    35
  misc_feature: MA Experiment 20000108 PARAMETER Experiment Name: Zm_Root-Tips_P Parameter: Tissue Value: Root tips vs. Root mid region   Sequence Listing-Misc Features (4)
  misc_feature: MA Experiment ID: 20000487 Result: Up-regulated in Transcription
  misc_feature: MA Experiment 20000487 PARAMETER Experiment Name: Zm_50mM_NH4NO3_L_to_H_P Parameter: Organism Value: Zea mays
  misc_feature: MA Experiment 20000487 PARAMETER Experiment Name: Zm_50mM_NH4NO3_L_to_H_P Parameter: Timepoint (hr) Value: 4
  misc_feature: MA Experiment 20000487 PARAMETER Experiment Name: Zm_50mM_NH4NO3_L_to_H_P Parameter: Tissue Value: Leaves
  misc_feature: MA Experiment 20000487 PARAMETER Experiment Name: Zm_50mM_NH4NO3_L_to_H_P Parameter: Treatment Value: 50mM NH4NO3 vs. 100mM Mannitol
  misc_feature: MA Experiment ID: 20000488 Result: Up-regulated in Transcription
  misc_feature: MA Experiment 20000488 PARAMETER Experiment Name: Zm_50mM_NH4NO3_L_to_H_P Parameter: Organism Value: Zea mays
  misc_feature: MA Experiment 20000488 PARAMETER Experiment Name: Zm_50mM_NH4NO3_L_to_H_P Parameter: Timepoint (hr) Value: 8
  misc_feature: MA Experiment 20000488 PARAMETER Experiment Name: Zm_50mM_NH4NO3_L_to_H_P Parameter: Tissue Value: Leaves
  misc_feature: MA Experiment 20000488 PARAMETER Experiment Name: Zm_50mM_NH4NO3_L_to_H_P Parameter: Treatment Value: 50mM NH4NO3 vs. 100mM Mannitol
  misc_feature: MA Experiment ID: 20000492 Result: Up-regulated in Transcription
  misc_feature: MA Experiment 20000492 PARAMETER Experiment Name: Zm_Hybrid_Seed_Dev_P Parameter: DAP Value: 12
  misc_feature: MA Experiment 20000492 PARAMETER Experiment Name: Zm_Hybrid_Seed_Dev_P Parameter: Organism Value: Zea mays
  misc_feature: MA Experiment 20000492 PARAMETER Experiment Name: Zm_Hybrid_Seed_Dev_P Parameter: Plant Line Value: 35A19
  misc_feature: MA Experiment 20000492 PARAMETER Experiment Name: Zm_Hybrid_Seed_Dev_P Parameter: Tissue Value: Fert Kernel vs. Unfert Floret
  misc_feature: MA Experiment ID: 20000534 Result: Down-regulated in Transcription
  misc_feature: MA Experiment 20000534 PARAMETER Experiment Name: Zm_Hybrid_Pollen_P Parameter: Age (day) Value: 8
  misc_feature: MA Experiment 20000534 PARAMETER Experiment Name: Zm_Hybrid_Pollen_P Parameter: Organism Value: Zea mays
  misc_feature: MA Experiment 20000534 PARAMETER Experiment Name: Zm_Hybrid_Pollen_P Parameter: Plant Line Value: 35A19
  misc_feature: MA Experiment 20000534 PARAMETER Experiment Name: Zm_Hybrid_Pollen_P Parameter: Tissue Value: Pollen vs. Aerial
  misc_feature: MA Experiment ID: 20001612 Result: Up-regulated in Transcription
  misc_feature: MA Experiment 20001612 PARAMETER Experiment Name: Zm_50ppm_KNO3_L-to-H_P Parameter: Age (day) Value: 19
  misc_feature: MA Experiment 20001612 PARAMETER Experiment Name: Zm_50ppm_KNO3_L-to-H_P Parameter: Organism Value: Zea mays
  misc_feature: MA Experiment 20001612 PARAMETER Experiment Name: Zm_50ppm_KNO3_L-to-H_P Parameter: Plant Line Value: 35A19
  misc_feature: MA Experiment 20001612 PARAMETER Experiment Name: Zm_50ppm_KNO3_L-to-H_P Parameter: Timepoint (hr) Value: 8
  misc_feature: MA Experiment 20001612 PARAMETER Experiment Name: Zm_50ppm_KNO3_L-to-H_P Parameter: Tissue Value: Roots
  misc_feature: MA Experiment 20001612 PARAMETER Experiment Name: Zm_50ppm_KNO3_L-to-H_P Parameter: Treatment Value: 50ppm KNO3 vs. 50ppm KCl
aatatctcaaaaagcccatcttctcttcctctctcgcagcaccgcctctcaacctccgccgccgctcgcccggggcgtcacccacccgcgcagaaggcccccgccgctcaaactaccggtgccctaaaccccgatattcttcttcgcctccctttcctcctcagcacccaaaccccgaccttcagggttccgccgccatgccgcagggagaccacatcgagcttcaccagaagcgccatggcaagcgcctggaccacgaggagcgcaagcgcaagcgcgaggcgcgcgaggtgcacaggcgctcgaaggacgcccgcaatttgattggtgctaagggcaagaggttcgccaagaaacgctatgctgagaaggcgcagatgaagaagaccctgaaaatgcacgatgaatcaaataagcgacagaaggttgatgatgatgtccaagagggtgctcttcctccgtatctactggatcgtgatcagacacagcgtgctaaggtactcagcaacacaatcaagcaaaagaggaaggaaaaggctggcaaatgggatgttccgctgccaaaggtcagacctgttgctgaagaagaaatgttcaaggtgctacgaactggcaagcgaaaaaccaagcagtggaagagaatggttaccaaagccacttttgttggagctggatttacaaggaaaccaccaaagtatgagcggttcattcgaccaactggtctgcgtttcaccaaagctcatgtgactcacccagaactgaagtgcactttcaaccttgacataatttctgtgaagaaaaacccaaatggtccgatgtacacttctcttggtgttatgacaaggggaacaatcattgaggtaaatgtcagtgagcttggtctggtaactcccgctggaaaagttgtttgggggaaatatgctcaagttacaaacaacccggagaatgatgggtgtatcaatgctgttttgctagtgtagaaccatagtgagattttgtttatggtgatgaatcgtcccatttgtatctgctcttgataagatgctcccttttgaccgatctcatggctattcccaggagtttgttttgcaccgtggtccatgggcgagcattctatatccttgctatgtgcgacaagccgacaaatgacttggctattatagcctgctataaagttgactaatacaaatt

SEQ ID NO: 10996 - protein, 325 aa, Zea mays subsp. mays
  peptide (1)..(325): Ceres Seq. ID no. 12374275
  misc_feature (66)..(302): Pfam Name: Ribosomal protein S8e Pfam Description: Ribosomal protein S8e
  misc_feature (66)..(325): Homolog of NCBI NO: 33146852 NR Description: putative TGF(transfoming growth factor) beta
  misc_feature (66)..(325): Homolog of NCBI NO: 15240023 NR Description: putative protein; protein id: At5g06360.1, by cDNA: 15229., supported by cDNA: gi_16604560, supported by gi_21280888 [Arabidopsis thaliana] >gi|9758416|dbj|BAB08958.1|
  misc_feature (66)..(325): Homolog of NCBI NO: 21553587 NR Description: unknown [Arabidopsis thaliana]
  misc_feature (66)..(325): Homolog of NCBI NO: 28278483 NR Description: Similar to RIKEN cDNA 5730427N09 gene [Danio
  misc_feature (66)..(325): Homolog of NCBI NO: 7662677 NR Description: hypothetical protein YR-29; TGF beta inducible protein 1; hairy cell leukemia protein 1 [Homo sapiens] hypothetical protein [Homo sapiens]
  misc_feature (66)..(325): Homolog of NCBI NO: 34925411 NR Description: TGF beta-inducible nuclear protein 1 (L-name LNR42) >gi|12849836|dbj|BAB28500.1| unnamed protein product [Mus >gi|12852013|dbj|BAB29237.1| unnamed protein product [Mus
  misc_feature (66)..(325): Homolog of NCBI NO: 34924868 NR Description: TGF beta-inducible nuclear protein 1 (CDK105
  misc_feature (66)..(325): Homolog of NCBI NO: 12856931 NR Description: unnamed protein product [Mus musculus]
  misc_feature (66)..(325): Homolog of NCBI NO: 9438133 NR Description: unknown [Ochlerotatus triseriatus]
  misc_feature (66)..(325): Homolog of NCBI NO: 29248956 NR Description: GLP_159_37795_38577 [Giardia lamblia ATCC 50803]
YLKKPIFSSSLAAPPLNLRRRSPGASPTRAEGPRRSNYRCPKPRYSSSPPFPPQHPNPDLQGSAAMPQGDHIELHQKRHGKRLDHEERKRKREAREVHRRSKDARNLIGAKGKRFAKKRYAEKAQMKKTLKMHDESNKRQKVDDDVQEGALPPYLLDRDQTQRAKVLSNTIKQKRKEKAGKWDVPLPKVRPVAEEEMFKVLRTGKRKTKQWKRMVTKATFVGAGFTRKPPKYERFIRPTGLRFTKAHVTHPELKCTFNLDIISVKKNPNGPMYTSLGVMTRGTIIEVNVSELGLVTPAGKVVWGKYAQVTNNPENDGCINAVLLV

SEQ ID NO: 10997 - protein, 260 aa, Zea mays subsp. mays; identical to SEQ ID NO: 7113
  peptide (1)..(260): Ceres Seq. ID no. 12374276
  misc_feature (1)..(237): Pfam Name: Ribosomal protein S8e Pfam Description: Ribosomal protein S8e
  misc_feature (1)..(260): Homolog of NCBI NO: 7662677 NR Description: hypothetical protein YR-29; TGF beta inducible protein 1; hairy cell leukemia protein 1 [Homo sapiens] hypothetical protein [Homo sapiens]
  misc_feature (1)..(260): Homolog of NCBI NO: 34925411 NR Description: TGF beta-inducible nuclear protein 1 (L-name LNR42) >gi|12849836|dbj|BAB28500.1| unnamed protein product [Mus >gi|12852013|dbj|BAB29237.1| unnamed protein product [Mus
  misc_feature (1)..(260): Homolog of NCBI NO: 34924868 NR Description: TGF beta-inducible nuclear protein 1 (CDK105
  misc_feature (1)..(260): Homolog of NCBI NO: 33146852 NR Description: putative TGF(transfoming growth factor) beta
  misc_feature (1)..(260): Homolog of NCBI NO: 21553587 NR Description: unknown [Arabidopsis thaliana]
  misc_feature (1)..(260): Homolog of NCBI NO: 28278483 NR Description: Similar to RIKEN cDNA 5730427N09 gene [Danio
  misc_feature (1)..(260): Homolog of NCBI NO: 15240023 NR Description: putative protein; protein id: At5g06360.1, by cDNA: 15229., supported by cDNA: gi_16604560, supported by gi_21280888 [Arabidopsis thaliana] >gi|9758416|dbj|BAB08958.1|
  misc_feature (1)..(260): Homolog of NCBI NO: 12856931 NR Description: unnamed protein product [Mus musculus]
  misc_feature (1)..(260): Homolog of NCBI NO: 9438133 NR Description: unknown [Ochlerotatus triseriatus]
  misc_feature (1)..(260): Homolog of NCBI NO: 29248956 NR Description: GLP_159_37795_38577 [Giardia lamblia ATCC 50803]

SEQ ID NO: 10998 - protein, 200 aa, Zea mays subsp. mays; identical to SEQ ID NO: 7114
  peptide (1)..(200): Ceres Seq. ID no. 12374277
  misc_feature (1)..(177): Pfam Name: Ribosomal protein S8e Pfam Description: Ribosomal protein S8e
  misc_feature (1)..(200): Homolog of NCBI NO: 33146852 NR Description: putative TGF(transfoming growth factor) beta
  misc_feature (1)..(200): Homolog of NCBI NO: 15240023 NR Description: putative protein; protein id: At5g06360.1, by cDNA: 15229., supported by cDNA: gi_16604560, supported by gi_21280888 [Arabidopsis thaliana] >gi|9758416|dbj|BAB08958.1|
  misc_feature (1)..(200): Homolog of NCBI NO: 21553587 NR Description: unknown [Arabidopsis thaliana]
  misc_feature (1)..(200): Homolog of NCBI NO: 28278483 NR Description: Similar to RIKEN cDNA 5730427N09 gene [Danio
  misc_feature (1)..(200): Homolog of NCBI NO: 7662677 NR Description: hypothetical protein YR-29; TGF beta inducible protein 1; hairy cell leukemia protein 1 [Homo sapiens] hypothetical protein [Homo sapiens]
  misc_feature (1)..(200): Homolog of NCBI NO: 34925411 NR Description: TGF beta-inducible nuclear protein 1 (L-name LNR42) >gi|12849836|dbj|BAB28500.1| unnamed protein product [Mus >gi|12852013|dbj|BAB29237.1| unnamed protein product [Mus
  misc_feature (1)..(200): Homolog of NCBI NO: 34924868 NR Description: TGF beta-inducible nuclear protein 1 (CDK105
  misc_feature (1)..(200): Homolog of NCBI NO: 12856931 NR Description: unnamed protein product [Mus musculus]
  misc_feature (1)..(200): Homolog of NCBI NO: 9438133 NR Description: unknown [Ochlerotatus triseriatus]
  misc_feature (1)..(200): Homolog of NCBI NO: 29248956 NR Description: GLP_159_37795_38577 [Giardia lamblia ATCC 50803]

SEQ ID NO: 10999 - DNA, 997 bp, Zea mays subsp. mays
  misc_feature (1)..(997): Ceres Seq. ID no. 12413811
  misc_feature: MA Experiment ID: 20000479 Result: Down-regulated in Transcription
  misc_feature: MA Experiment 20000479 PARAMETER Experiment Name: Zm_Drought_P Parameter: Age (day) Value: 10
  misc_feature: MA Experiment 20000479 PARAMETER Experiment Name: Zm_Drought_P Parameter: Organism Value: Zea mays
  misc_feature: MA Experiment 20000479 PARAMETER Experiment Name: Zm_Drought_P Parameter: Plant Line Value: 35A19
  misc_feature: MA Experiment 20000479 PARAMETER Experiment Name: Zm_Drought_P Parameter: Timepoint (hr) Value: 48
  misc_feature: MA Experiment 20000479 PARAMETER Experiment Name: Zm_Drought_P Parameter: Tissue Value: Aerial
  misc_feature: MA Experiment 20000479 PARAMETER Experiment Name: Zm_Drought_P Parameter: Treatment Value: Drought vs. No Drought
  misc_feature: MA Experiment ID: 20000480 Result: Down-regulated in Transcription
  misc_feature: MA Experiment 20000480 PARAMETER Experiment Name: Zm_Drought_P Parameter: Age (day) Value: 11
  misc_feature: MA Experiment 20000480 PARAMETER Experiment Name: Zm_Drought_P Parameter: Organism Value: Zea mays
  misc_feature: MA Experiment 20000480 PARAMETER Experiment Name: Zm_Drought_P Parameter: Plant Line Value: 35A19
  misc_feature: MA Experiment 20000480 PARAMETER Experiment Name: Zm_Drought_P Parameter: Timepoint (hr) Value: 72
  misc_feature: MA Experiment 20000480 PARAMETER Experiment Name: Zm_Drought_P Parameter: Tissue Value: Aerial
  misc_feature: MA Experiment 20000480 PARAMETER Experiment Name: Zm_Drought_P Parameter: Treatment Value: Drought vs. No Drought
  misc_feature: MA Experiment ID: 20000535 Result: Down-regulated in Transcription
  misc_feature: MA Experiment 20000535 PARAMETER Experiment Name: Zm_Hybrid_Seed_Dev_P Parameter: DAP Value: 30 vs. 12
  misc_feature: MA Experiment 20000535 PARAMETER Experiment Name: Zm_Hybrid_Seed_Dev_P Parameter: Organism Value: Zea mays
  misc_feature: MA Experiment 20000535 PARAMETER Experiment Name: Zm_Hybrid_Seed_Dev_P Parameter: Plant Line Value: 35A19
  misc_feature: MA Experiment 20000535 PARAMETER Experiment Name: Zm_Hybrid_Seed_Dev_P Parameter: Tissue Value: Embryo vs. Unfert Floret
caggagggagcggatgagatagacaaacagaaagagcccgtgtgcgtgacgcacggacgccgtgactccgccgcaaagagagggagtccacggtctgaagaagcaacggcgacgcccccgacgacgagcatagctgccccgcaaactagcagcgccctcgtcagttccgtctcgttcccaacctctcccggattcgattcgattgacccgtccgctccaaatcgaatctaatcagcagttttggagttgcggaagggagaaagagagaggagagggggcatggatcaggtgctaaacaaggtggggagctactggttcagcaaaagggccagcaaggaaatcgactccatcggcgacgacatcagctcgatctcaagcagcattggagggtcagccaaatggatggtgaacaaaattaaagggaagatgcagaaagcacttccagatctcctcaaggaatatgacatgccagcagggctcttcccacgggacacgactaactatgagttcaatgaagagacaaagaagctgacagtgtacatcccgtcagcctgtgatgttggttacaaggactcgtcagtgctgcggttcttcacctgtgtgaccggctaccttgaaaaggggaagttttccgacatcgagggcatgaagaccaaagtgctggtctggaccaaggtgactgccatcaagaccgagggcccaaaggtccatttcactgcaggcgtgaagaagactcggagccgtgatgcctatgaggtcgtcagagatggtatcaccatagacaagttctagagcatatacctggcatgaaaaatgtgacgcggttattcatatatgcttctctcctctcagttggtacaccgaaattcatacaatatcgtgggctaattctgcatttgtatgaaagtttaatatgcttgacgtgttaatcacactgctagagcatgcgataaatcgcagttggttcattattaggaaattgcattgagctgtaatc

SEQ ID NO: 11000 - protein, 170 aa, Zea mays subsp. mays
  peptide (1)..(170): Ceres Seq. ID no. 12413812
  misc_feature (32)..(169): Pfam Name: Protein of unknown function, DUF538 Pfam Description: Protein of unknown function, DUF538
  misc_feature (1)..(170): Homolog of NCBI NO: 34914210 NR Description: OSJNBb0049O23.18 [Oryza sativa (japonica
  misc_feature (1)..(170): Homolog of NCBI NO: 18398279 NR Description: expressed protein; protein id: At3g08890.1, by cDNA: 20180. [Arabidopsis thaliana] unknown protein [Arabidopsis thaliana]
  misc_feature (1)..(170): Homolog of NCBI NO: 40642817 NR Description: cp protein [Celosia cristata]
  misc_feature (1)..(170): Homolog of NCBI NO: 15240103 NR Description: putative protein; protein id: At5g37070.1 thaliana] >gi|10177986|dbj|BAB11359.1|
  misc_feature (1)..(170): Homolog of NCBI NO: 15241019 NR Description: putative protein; protein id: At5g01610.1, by cDNA: 21740. [Arabidopsis thaliana] >gi|11290054|pir||T48182
  misc_feature (1)..(170): Homolog of NCBI NO: 28466909 NR Description: At5g01610 [Arabidopsis thaliana]
  misc_feature (7)..(167): Homolog of NCBI NO: 21553803 NR Description: unknown [Arabidopsis thaliana]
  misc_feature (7)..(167): Homolog of NCBI NO: 18395537 NR Description: expressed protein; protein id: At2g03350.1, by cDNA: 1697. [Arabidopsis thaliana] >gi|25364434|pir||D84447
  misc_feature (57)..(168): Homolog of NCBI NO: 18379014 NR Description: Expressed protein; protein id: At1g02816.1, by cDNA: 28445., supported by cDNA: gi_14423479, supported by
  misc_feature (56)..(167): Homolog of NCBI NO: 6041854 NR Description: unknown protein [Arabidopsis thaliana]
MDQVLNKVGSYWFSKRASKEIDSIGDDISSISSSIGGSAKWMVNKIKGKMQKALPDLLKEYDMPAGLFPRDTTNYEFNEETKKLTVYIPSACDVGYKDSSVLRFFTCVTGYLEKGKFSDIEGMKTKVLVWTKVTAIKTEGPKVHFTAGVKKTRSRDAYEVVRDGITIDKF

SEQ ID NO: 11001 - protein, 129 aa, Zea mays subsp. mays
  peptide (1)..(129): Ceres Seq. ID no. 12413813
  misc_feature (1)..(128): Pfam Name: Protein of unknown function, DUF538 Pfam Description: Protein of unknown function, DUF538
  misc_feature (1)..(129): Homolog of NCBI NO: 34914210 NR Description: OSJNBb0049O23.18 [Oryza sativa (japonica
  misc_feature (1)..(129): Homolog of NCBI NO: 18398279 NR Description: expressed protein; protein id: At3g08890.1, by cDNA: 20180. [Arabidopsis thaliana] unknown protein [Arabidopsis thaliana]
  misc_feature (1)..(129): Homolog of NCBI NO: 40642817 NR Description: cp protein [Celosia cristata]
  misc_feature (1)..(129): Homolog of NCBI NO: 15240103 NR Description: putative protein; protein id: At5g37070.1 thaliana] >gi|10177986|dbj|BAB11359.1|
  misc_feature (1)..(129): Homolog of NCBI NO: 15241019 NR Description: putative protein; protein id: At5g01610.1, by cDNA: 21740. [Arabidopsis thaliana] >gi|11290054|pir||T48182
  misc_feature (1)..(129): Homolog of NCBI NO: 28466909 NR Description: At5g01610 [Arabidopsis thaliana]
  misc_feature (1)..(126): Homolog of NCBI NO: 21553803 NR Description: unknown [Arabidopsis thaliana]
  misc_feature (1)..(126): Homolog of NCBI NO: 18395537 NR Description: expressed protein; protein id: At2g03350.1, by cDNA: 1697. [Arabidopsis thaliana] >gi|25364434|pir||D84447
  misc_feature (16)..(127): Homolog of NCBI NO: 18379014 NR Description: Expressed protein; protein id: At1g02816.1, by cDNA: 28445., supported by cDNA: gi_14423479, supported by
  misc_feature (15)..(126): Homolog of NCBI NO: 6041854 NR Description: unknown protein [Arabidopsis thaliana]
MVNKIKGKMQKALPDLLKEYDMPAGLFPRDTTNYEFNEETKKLTVYIPSACDVGYKDSSVLRFFTCVTGYLEKGKFSDIEGMKTKVLVWTKVTAIKTEGPKVHFTAGVKKTRSRDAYEVVRDGITIDKF

SEQ ID NO: 11002 - protein, 121 aa, Zea mays subsp. mays
  peptide (1)..(121): Ceres Seq. ID no. 12413814
  misc_feature (1)..(120): Pfam Name: Protein of unknown function, DUF538 Pfam Description: Protein of unknown function, DUF538
  misc_feature (1)..(121): Homolog of NCBI NO: 34914210 NR Description: OSJNBb0049O23.18 [Oryza sativa (japonica
  misc_feature (1)..(121): Homolog of NCBI NO: 18398279 NR Description: expressed protein; protein id: At3g08890.1, by cDNA: 20180. [Arabidopsis thaliana] unknown protein [Arabidopsis thaliana]
  misc_feature (1)..(121): Homolog of NCBI NO: 40642817 NR Description: cp protein [Celosia cristata]
  misc_feature (1)..(121): Homolog of NCBI NO: 15240103 NR Description: putative protein; protein id: At5g37070.1 thaliana] >gi|10177986|dbj|BAB11359.1|
  misc_feature (1)..(121): Homolog of NCBI NO: 15241019 NR Description: putative protein; protein id: At5g01610.1, by cDNA: 21740. [Arabidopsis thaliana] >gi|11290054|pir||T48182
  misc_feature (1)..(121): Homolog of NCBI NO: 28466909 NR Description: At5g01610 [Arabidopsis thaliana]
  misc_feature (1)..(118): Homolog of NCBI NO: 21553803 NR Description: unknown [Arabidopsis thaliana]
  misc_feature (1)..(118): Homolog of NCBI NO: 18395537 NR Description: expressed protein; protein id: At2g03350.1, by cDNA: 1697. [Arabidopsis thaliana] >gi|25364434|pir||D84447
  misc_feature (8)..(119): Homolog of NCBI NO: 18379014 NR Description: Expressed protein; protein id: At1g02816.1, by cDNA: 28445., supported by cDNA: gi_14423479, supported by
  misc_feature (7)..(118): Homolog of NCBI NO: 6041854 NR Description: unknown protein [Arabidopsis thaliana]
MQKALPDLLKEYDMPAGLFPRDTTNYEFNEETKKLTVYIPSACDVGYKDSSVLRFFTCVTGYLEKGKFSDIEGMKTKVLVWTKVTAIKTEGPKVHFTAGVKKTRSRDAYEVVRDGITIDKF

SEQ ID NO: 11003 - DNA, 1253 bp, Zea mays subsp. mays
  misc_feature (1)..(1253): Ceres Seq. ID no. 12374278
  misc_feature: MA Experiment ID: 108528 Result: Up-regulated in Transcription
  misc_feature: MA Experiment 108528 PARAMETER Experiment Name: Zm_Imbibed_Seeds_P Parameter: Age (day) Value: 5 vs. 2
  misc_feature: MA Experiment 108528 PARAMETER Experiment Name: Zm_Imbibed_Seeds_P Parameter: Organism Value: Zea mays
  misc_feature: MA Experiment 108528 PARAMETER Experiment Name: Zm_Imbibed_Seeds_P Parameter: Plant Line Value: 35A19
  misc_feature: MA Experiment 108528 PARAMETER Experiment Name: Zm_Imbibed_Seeds_P Parameter: Tissue Value: Aerial vs. Embryo
  misc_feature: MA Experiment ID: 108530 Result: Up-regulated in Transcription
  misc_feature: MA Experiment 108530 PARAMETER Experiment Name: Zm_Imbibed_Seeds_P Parameter: Age (day) Value: 6 vs. 2
  misc_feature: MA Experiment 108530 PARAMETER Experiment Name: Zm_Imbibed_Seeds_P Parameter: Organism Value: Zea mays
  misc_feature: MA Experiment 108530 PARAMETER Experiment Name: Zm_Imbibed_Seeds_P Parameter: Plant Line Value: 35A19
  misc_feature: MA Experiment 108530 PARAMETER Experiment Name: Zm_Imbibed_Seeds_P Parameter: Tissue Value: Aerial vs. Embryo
  misc_feature: MA Experiment ID: 108547 Result: Up-regulated in Transcription
  misc_feature: MA Experiment 108547 PARAMETER Experiment Name: Zm_Imbibed_Seeds_P Parameter: Age (day) Value: 4 vs. 2
  misc_feature: MA Experiment 108547 PARAMETER Experiment Name: Zm_Imbibed_Seeds_P Parameter: Organism Value: Zea mays
  misc_feature: MA Experiment 108547 PARAMETER Experiment Name: Zm_Imbibed_Seeds_P Parameter: Plant Line Value: 35A19
  misc_feature: MA Experiment 108547 PARAMETER Experiment Name: Zm_Imbibed_Seeds_P Parameter: Tissue Value: Aerial vs. Embryo
  misc_feature: MA Experiment ID: 108556 Result: Down-regulated in Transcription
  misc_feature: MA Experiment 108556 PARAMETER Experiment Name: Zm_Drought_P Parameter: Age (day) Value: 9
  misc_feature: MA Experiment 108556 PARAMETER Experiment Name: Zm_Drought_P Parameter: Organism Value: Zea mays
  misc_feature: MA Experiment 108556 PARAMETER Experiment Name: Zm_Drought_P Parameter: Plant Line Value: 35A19
  misc_feature: MA Experiment 108556 PARAMETER Experiment Name: Zm_Drought_P Parameter: Timepoint (hr) Value: 24
  misc_feature: MA Experiment 108556 PARAMETER Experiment Name: Zm_Drought_P Parameter: Tissue Value: Aerial
  misc_feature: MA Experiment 108556 PARAMETER Experiment Name: Zm_Drought_P Parameter: Treatment Value: Drought vs. No Drought
  misc_feature: MA Experiment ID: 108597 Result: Down-regulated in Transcription
  misc_feature: MA Experiment 108597 PARAMETER Experiment Name: Zm_100uM_ABA_P Parameter: Age (day) Value: 9
  misc_feature: MA Experiment 108597 PARAMETER Experiment Name: Zm_100uM_ABA_P Parameter: Organism Value: Zea mays
  misc_feature: MA Experiment 108597 PARAMETER Experiment Name: Zm_100uM_ABA_P Parameter: Plant Line Value: 35A19
  misc_feature: MA Experiment 108597 PARAMETER Experiment Name: Zm_100uM_ABA_P Parameter: Timepoint (hr) Value: 24
  misc_feature: MA Experiment 108597 PARAMETER Experiment Name: Zm_100uM_ABA_P Parameter: Tissue Value: Aerial
  misc_feature: MA Experiment 108597 PARAMETER Experiment Name: Zm_100uM_ABA_P Parameter: Treatment Value: 100uM ABA vs. No Treatment
  misc_feature: MA Experiment ID: 20000477 Result: Down-regulated in Transcription
  misc_feature: MA Experiment 20000477 PARAMETER Experiment Name: Zm_5mM_SA_P Parameter: Age (day) Value: 10
  misc_feature: MA Experiment 20000477 PARAMETER Experiment Name: Zm_5mM_SA_P Parameter: Organism Value: Zea mays
  misc_feature: MA Experiment 20000477 PARAMETER Experiment Name: Zm_5mM_SA_P Parameter: Plant Line Value: 35A19
  misc_feature: MA Experiment 20000477 PARAMETER Experiment Name: Zm_5mM_SA_P Parameter: Timepoint (hr) Value: 48
  misc_feature: MA Experiment 20000477 PARAMETER Experiment Name: Zm_5mM_SA_P Parameter: Tissue Value: Aerial
  misc_feature: MA Experiment 20000477 PARAMETER Experiment Name: Zm_5mM_SA_P Parameter: Treatment Value: 5mM SA vs. No Treatment
  misc_feature: MA Experiment ID: 20000478 Result: Down-regulated in Transcription
  misc_feature: MA Experiment 20000478 PARAMETER Experiment Name: Zm_5mM_SA_P Parameter: Age (day) Value: 11
  misc_feature: MA Experiment 20000478 PARAMETER Experiment Name: Zm_5mM_SA_P Parameter: Organism Value: Zea mays
  misc_feature: MA Experiment 20000478 PARAMETER Experiment Name: Zm_5mM_SA_P Parameter: Plant Line Value: 35A19
  misc_feature: MA Experiment 20000478 PARAMETER Experiment Name: Zm_5mM_SA_P Parameter: Timepoint (hr) Value: 72
  misc_feature: MA Experiment 20000478 PARAMETER Experiment Name: Zm_5mM_SA_P Parameter: Tissue Value: Aerial
  misc_feature: MA Experiment 20000478 PARAMETER Experiment Name: Zm_5mM_SA_P Parameter: Treatment Value: 5mM SA vs. No Treatment
  misc_feature: MA Experiment ID: 20000480 Result: Down-regulated in Transcription
  misc_feature: MA Experiment 20000480 PARAMETER Experiment Name: Zm_Drought_P Parameter: Age (day) Value: 11
  misc_feature: MA Experiment 20000480 PARAMETER Experiment Name: Zm_Drought_P Parameter: Organism Value: Zea mays
  misc_feature: MA Experiment 20000480 PARAMETER Experiment Name: Zm_Drought_P Parameter: Plant Line Value: 35A19
  misc_feature: MA Experiment 20000480 PARAMETER Experiment Name: Zm_Drought_P Parameter: Timepoint (hr) Value: 72
  misc_feature: MA Experiment 20000480 PARAMETER Experiment Name: Zm_Drought_P Parameter: Tissue Value: Aerial
  misc_feature: MA Experiment 20000480 PARAMETER Experiment Name: Zm_Drought_P Parameter: Treatment Value: Drought vs. No Drought
acgctggccccccgccccgccgcgggatcaaatacgccgcctccgcccgtccactccctcgccgcccccgtctcctctcctctcctctcccccgcatccacggccgcaggccgcagccagccactcgacgatctagtcgtctctctctccccgctctgccgcctcgctgccgcggcttcccgtcggctggaggatgaaggtcacggtcgtgtcccggagcggccgggaggtcgtcaagggcggcatcgacctcaaggactcggccaaggtcgcggacctgcaggaggccatccatgccaggactaagaagtattatccttctaggcagcggctcaccctcccccttcaacctggaaaaggcgggaagccagttgtcctcagtccgaaggccagcctgctagaatactgcgagaagggttctgggtcactgacagtggtcttcaaagatttagggccacaggtctactacagcacactgttcttcttcgagtacctgggtcctctcatcatctaccccatgttctactatctgcctgtctacaaatacttcgggtacgagggggagcgggccatgcaccctgtccagacctacgccatgtactactggtgcttccactacttcaagcggatcatggagacattcttcgtgcaccgcttcagccacgcgacgtcgccgctctcgaacgtcttcaggaactgtgcctactactggaccttcggcgcctacattgcttactactgcaaccacccgctgtacaccccagtgagtgatctgcagatgaagattgggtttggttttggggtcgtctgccaggtcgcgaacttctactgccacatcctgctgcggaacctcaggagcccaagcggcagcggcgggtaccagatcccccgcggtttcttgttcaacatcgtgacctgcgccaattacaccaccgagatctatcagtgggtcggcttcaacatcgccacgcagaccgtggcaggttacgtcttccttgtcgtggcggcaggcatcatgaccaactgggcgctcggcaagcacagccgtctgaagaagctgtttgacggcaaggatgggaggcccaagtaccctcgccggtgggtgattctccctccgttcctgtgaagaggtggtggtggtcggcctattgtgattcgatgtctacagacagttgtactgtactaatcgtgcctgtttagcggttgaacttggattccgttgtccgaaatttctaatccgaaagatggattcc

SEQ ID NO: 11004 - protein, 310 aa, Zea mays subsp. mays; identical to SEQ ID NO: 2382
  peptide (1)..(310): Ceres Seq. ID no. 12374279
  misc_feature (158)..(310): Pfam Name: 3-oxo-5-alpha-steroid 4-dehydrogenase Pfam Description: 3-oxo-5-alpha-steroid 4-dehydrogenase
  misc_feature (1)..(310): Homolog of NCBI NO: 34895848 NR Description: putative glycoprotein [Oryza sativa (japonica group)] >gi|9663963|dbj|BAB03604.1| putative glycoprotein [Oryza
  misc_feature (1)..(310): Homolog of NCBI NO: 15233250 NR Description: synaptic glycoprotein SC2-like protein; protein At3g55360.1, supported by cDNA: 6774., supported by cDNA: supported by cDNA: gi_20148508 [Arabidopsis thaliana]
  misc_feature (1)..(310): Homolog of NCBI NO: 25004880 NR Description: steroid 5-alpha reductase [Cicer arietinum]
  misc_feature (38)..(310): Homolog of NCBI NO: 39590267 NR Description: Hypothetical protein CBG11196 [Caenorhabditis
  misc_feature (38)..(310): Homolog of NCBI NO: 17531783 NR Description: Synaptic glycoprotein SC2 (35.1 kD) elegans] >gi|7206593|gb|AAF39753.1| Hypothetical protein C15F1.6
  misc_feature (24)..(291): Homolog of NCBI NO: 13111809 NR Description: Unknown (protein for IMAGE:2901253) [Homo sapiens]
  misc_feature (24)..(291): Homolog of NCBI NO: 24475816 NR Description: glycoprotein, synaptic 2; synaptic glycoprotein [Homo sapiens] >gi|20177939|sp|Q9NZ01|GSN2_HUMAN Synaptic
  misc_feature (24)..(291): Homolog of NCBI NO: 30585427 NR Description: Homo sapiens glycoprotein, synaptic 2 [synthetic
  misc_feature (24)..(310): Homolog of NCBI NO: 33585860 NR Description: Glycoprotein, synaptic 2 [Xenopus laevis]
  misc_feature (20)..(291): Homolog of NCBI NO: 19924091 NR Description: synaptic glycoprotein SC2 [Rattus norvegicus]

SEQ ID NO: 11005 - protein, 202 aa, Zea mays subsp. mays; identical to SEQ ID NO: 2383
  peptide (1)..(202): Ceres Seq. ID no. 12374280
  misc_feature (50)..(202): Pfam Name: 3-oxo-5-alpha-steroid 4-dehydrogenase Pfam Description: 3-oxo-5-alpha-steroid 4-dehydrogenase
  misc_feature (1)..(202): Homolog of NCBI NO: 34895848 NR Description: putative glycoprotein [Oryza sativa (japonica group)] >gi|9663963|dbj|BAB03604.1| putative glycoprotein [Oryza
  misc_feature (1)..(202): Homolog of NCBI NO: 15233250 NR Description: synaptic glycoprotein SC2-like protein; protein At3g55360.1, supported by cDNA: 6774., supported by cDNA: supported by cDNA: gi_20148508 [Arabidopsis thaliana]
  misc_feature (1)..(202): Homolog of NCBI NO: 25004880 NR Description: steroid 5-alpha reductase [Cicer arietinum]
  misc_feature (1)..(202): Homolog of NCBI NO: 39590267 NR Description: Hypothetical protein CBG11196 [Caenorhabditis
  misc_feature (1)..(202): Homolog of NCBI NO: 17531783 NR Description: Synaptic glycoprotein SC2 (35.1 kD) elegans] >gi|7206593|gb|AAF39753.1| Hypothetical protein C15F1.6
  misc_feature (1)..(183): Homolog of NCBI NO: 13111809 NR Description: Unknown (protein for IMAGE:2901253) [Homo sapiens]
  misc_feature (1)..(183): Homolog of NCBI NO: 24475816 NR Description: glycoprotein, synaptic 2; synaptic glycoprotein [Homo sapiens] >gi|20177939|sp|Q9NZ01|GSN2_HUMAN Synaptic
  misc_feature (1)..(183): Homolog of NCBI NO: 30585427 NR Description: Homo sapiens glycoprotein, synaptic 2 [synthetic
  misc_feature (1)..(202): Homolog of NCBI NO: 33585860 NR Description: Glycoprotein, synaptic 2 [Xenopus laevis]
  misc_feature (1)..(183): Homolog of NCBI NO: 19924091 NR Description: synaptic glycoprotein SC2 [Rattus norvegicus]

SEQ ID NO: 11006 - protein, 184 aa, Zea mays subsp. mays; identical to SEQ ID NO: 2384
  peptide (1)..(184): Ceres Seq. ID no. 12374281
  misc_feature (32)..(184): Pfam Name: 3-oxo-5-alpha-steroid 4-dehydrogenase Pfam Description: 3-oxo-5-alpha-steroid 4-dehydrogenase
  misc_feature (1)..(184): Homolog of NCBI NO: 34895848 NR Description: putative glycoprotein [Oryza sativa (japonica group)] >gi|9663963|dbj|BAB03604.1| putative glycoprotein [Oryza
  misc_feature (1)..(184): Homolog of NCBI NO: 15233250 NR Description: synaptic glycoprotein SC2-like protein; protein At3g55360.1, supported by cDNA: 6774., supported by cDNA: supported by cDNA: gi_20148508 [Arabidopsis thaliana]
  misc_feature (1)..(184): Homolog of NCBI NO: 25004880 NR Description: steroid 5-alpha reductase [Cicer arietinum]
  misc_feature (1)..(184): Homolog of NCBI NO: 39590267 NR Description: Hypothetical protein CBG11196 [Caenorhabditis
  misc_feature (1)..(184): Homolog of NCBI NO: 17531783 NR Description: Synaptic glycoprotein SC2 (35.1 kD) elegans] >gi|7206593|gb|AAF39753.1| Hypothetical protein C15F1.6
  misc_feature (1)..(165): Homolog of NCBI NO: 13111809 NR Description: Unknown (protein for IMAGE:2901253) [Homo sapiens]
  misc_feature (1)..(165): Homolog of NCBI NO: 24475816 NR Description: glycoprotein, synaptic 2; synaptic glycoprotein [Homo sapiens] >gi|20177939|sp|Q9NZ01|GSN2_HUMAN Synaptic
  misc_feature (1)..(165): Homolog of NCBI NO: 30585427 NR Description: Homo sapiens glycoprotein, synaptic 2 [synthetic
  misc_feature (1)..(184): Homolog of NCBI NO: 33585860 NR Description: Glycoprotein, synaptic 2 [Xenopus laevis]
  misc_feature (1)..(165): Homolog of NCBI NO: 19924091 NR Description: synaptic glycoprotein SC2 [Rattus norvegicus]

SEQ ID NO: 11007 - DNA, 1228 bp, Zea mays subsp. mays
  misc_feature (1)..(1228): Ceres Seq. ID no. 12353392
  misc_feature: MA Experiment ID: 108535 Result: Up-regulated in Transcription
  misc_feature: MA Experiment 108535 PARAMETER Experiment Name: Zm_Meristem_P Parameter: Age (day) Value: 8
  misc_feature: MA Experiment 108535 PARAMETER Experiment Name: Zm_Meristem_P Parameter: Organism Value: Zea mays
  misc_feature: MA Experiment 108535 PARAMETER Experiment Name: Zm_Meristem_P Parameter: Plant Line Value: 35A19
  misc_feature: MA Experiment 108535 PARAMETER Experiment Name: Zm_Meristem_P Parameter: Tissue Value: Root Meristem vs. Above Root Meristem
  misc_feature: MA Experiment ID: 108543 Result: Up-regulated in Transcription
  misc_feature: MA Experiment ID: 108687 Result: Down-regulated in Transcription
  misc_feature: MA Experiment 108687 PARAMETER Experiment Name: Zm_Embryos-Flowers__P Parameter: Tissue Value: Embryo vs. Aerial+
  misc_feature: MA Experiment ID: 20000534 Result: Up-regulated in Transcription
  misc_feature: MA Experiment 20000534 PARAMETER Experiment Name: Zm_Hybrid_Pollen_P Parameter: Age (day) Value: 8
  misc_feature: MA Experiment 20000534 PARAMETER Experiment Name: Zm_Hybrid_Pollen_P Parameter: Organism Value: Zea mays
  misc_feature: MA Experiment 20000534 PARAMETER Experiment Name: Zm_Hybrid_Pollen_P Parameter: Plant Line Value: 35A19
  misc_feature: MA Experiment 20000534 PARAMETER Experiment Name: Zm_Hybrid_Pollen_P Parameter: Tissue Value: Pollen vs. Aerial
aaacggacgcagattgccgttcatgatccggctctttaaaataacgcagtagaaacggagagcgatctgaacacggtctgcagatttcaacgaggtgtggtgtgagcgcgatgagcgttcatggcccgtaatccgacgggatatccgacatttgtgccgtatccagcgcatgccgacaatccgtccggagatccctctccctctctctcatggcattcatgttttaaaccaaccaagccgcctctgctgctccgatccgtctccctctgttccagcagtcaggatggaggccgccgcaacacttccgccgctgctgctcctcatcctccttgctgcgactgcggtgccggctccgtcgcacgcatggggagtcgacggccatctcatggtctgccagatcgcacagggccgtctgagtggcgcggcggccgcggcggtgaaggacctgctgccgtcctacgccggcaacaacctgagcagcctctgctcctgggcggacgacgtcaagttcaggtacccctggtcgtcgccgctccactacatcgacacccccgacggcctctgcacctaccgctacgacagggactgcaaggacgaggacggcgtcgagggccggtgcgtcgcgggcgccatcaacaactacacctcccagctcctcgcctaccggagatcttcacccactgagtataacctaacgcaagcgctcctcttcctctcgcacttcatcggagacatacaccagccacttcacgtggggttcacctccgacaaaggagggaacaccattgacgtccactggtacacaaggaagactgttctacaccatgtttgggacgccagcatcatccagacggccgaagatgacttctacggcgacagcgtagccgggtatatcgacaccctgaagaaaaatataacgcagggagaatggtcggagcaagtgtctagctgggaagcgtgcggtacgaaccagactgcatgtccagacatatatgcgtctgagagcgtcgctgcagcatgcgactgggcgtacaagggagtcgaggaagactcaaccctacaagatccctatttctccagcaggctgccggtagtcagcctgaggctagcgcaaggcggcgtcagattagccgccactctgaacaggatttttggataatggtggagtacatttactatacatggaactattatggaattaaatgatatatataactattggtttccc

SEQ ID NO: 11008 - protein, 329 aa, Zea mays subsp. mays
  peptide (1)..(329): Ceres Seq. ID no. 12353393
  misc_feature (174)..(328): Pfam Name: S1/P1 Nuclease Pfam Description: S1/P1 Nuclease
  misc_feature (174)..(328): Homolog of NCBI NO: 34895512 NR Description: putative bifunctional nuclease [Oryza sativa
  misc_feature (43)..(81): Homolog of NCBI NO: 34895512 NR Description: putative bifunctional nuclease [Oryza sativa
  misc_feature (48)..(329): Homolog of NCBI NO: 4099833 NR Description: bifunctional nuclease [Zinnia elegans]
  misc_feature (48)..(329): Homolog of NCBI NO: 15221343 NR Description: putative bifunctional nuclease; protein id: supported by cDNA: 256130. [Arabidopsis thaliana]
  misc_feature (48)..(329): Homolog of NCBI NO: 21554516 NR Description: putative bifunctional nuclease [Arabidopsis
  misc_feature (33)..(329): Homolog of NCBI NO: 9558456 NR Description: unnamed protein product [Oryza sativa (japonica
  misc_feature (33)..(329): Homolog of NCBI NO: 34895514 NR Description: putative bifunctional nuclease [Oryza sativa
  misc_feature (42)..(328): Homolog of NCBI NO: 38345900 NR Description: OSJNBa0060D06.10 [Oryza sativa (japonica
  misc_feature (52)..(328): Homolog of NCBI NO: 3551956 NR Description: senescence-associated protein 6 [Hemerocallis
  misc_feature (50)..(329): Homolog of NCBI NO: 7229711 NR Description: CEL I mismatch endonuclease [Apium graveolens]
MPTIRPEIPLPLSHGIHVLNQPSRLCCSDPSPSVPAVRMEAAATLPPLLLLILLAATAVPAPSHAWGVDGHLMVCQIAQGRLSGAAAAAVKDLLPSYAGNNLSSLCSWADDVKFRYPWSSPLHYIDTPDGLCTYRYDRDCKDEDGVEGRCVAGAINNYTSQLLAYRRSSPTEYNLTQALLFLSHFIGDIHQPLHVGFTSDKGGNTIDVHWYTRKTVLHHVWDASIIQTAEDDFYGDSVAGYIDTLKKNITQGEWSEQVSSWEACGTNQTACPDIYASESVAAACDWAYKGVEEDSTLQDPYFSSRLPVVSLRLAQGGVRLAATLNRIFG

SEQ ID NO: 11009 - protein, 291 aa, Zea mays subsp. mays
  peptide (1)..(291): Ceres Seq. ID no. 12353394
  misc_feature (136)..(290): Pfam Name: S1/P1 Nuclease Pfam Description: S1/P1 Nuclease
  misc_feature (136)..(290): Homolog of NCBI NO: 34895512 NR Description: putative bifunctional nuclease [Oryza sativa
  misc_feature (5)..(43): Homolog of NCBI NO: 34895512 NR Description: putative bifunctional nuclease [Oryza sativa
  misc_feature (10)..(291): Homolog of NCBI NO: 4099833 NR Description: bifunctional nuclease [Zinnia elegans]
  misc_feature (10)..(291): Homolog of NCBI NO: 15221343 NR Description: putative bifunctional nuclease; protein id: supported by cDNA: 256130. [Arabidopsis thaliana]
  misc_feature (10)..(291): Homolog of NCBI NO: 21554516 NR Description: putative bifunctional nuclease [Arabidopsis
  misc_feature (1)..(291): Homolog of NCBI NO: 9558456 NR Description: unnamed protein product [Oryza sativa (japonica
  misc_feature (1)..(291): Homolog of NCBI NO: 34895514 NR Description: putative bifunctional nuclease [Oryza sativa
  misc_feature (4)..(290): Homolog of NCBI NO: 38345900 NR Description: OSJNBa0060D06.10 [Oryza sativa (japonica
  misc_feature (14)..(290): Homolog of NCBI NO: 3551956 NR Description: senescence-associated protein 6 [Hemerocallis
  misc_feature (12)..(291): Homolog of NCBI NO: 7229711 NR Description: CEL I mismatch endonuclease [Apium graveolens]
MEAAATLPPLLLLILLAATAVPAPSHAWGVDGHLMVCQIAQGRLSGAAAAAVKDLLPSYAGNNLSSLCSWADDVKFRYPWSSPLHYIDTPDGLCTYRYDRDCKDEDGVEGRCVAGAINNYTSQLLAYRRSSPTEYNLTQALLFLSHFIGDIHQPLHVGFTSDKGGNTIDVHWYTRKTVLHHVWDASIIQTAEDDFYGDSVAGYIDTLKKNITQGEWSEQVSSWEACGTNQTACPDIYASESVAAACDWAYKGVEEDSTLQDPYFSSRLPVVSLRLAQGGVRLAATLNRIFG

SEQ ID NO: 11010 - protein, 257 aa, Zea mays subsp. mays
  peptide (1)..(257): Ceres Seq. ID no. 12353395
  misc_feature (102)..(256): Pfam Name: S1/P1 Nuclease Pfam Description: S1/P1 Nuclease
  misc_feature (102)..(256): Homolog of NCBI NO: 34895512 NR Description: putative bifunctional nuclease [Oryza sativa
  misc_feature (1)..(257): Homolog of NCBI NO: 4099833 NR Description: bifunctional nuclease [Zinnia elegans]
  misc_feature (1)..(257): Homolog of NCBI NO: 15221343 NR Description: putative bifunctional nuclease; protein id: supported by cDNA: 256130. [Arabidopsis thaliana]
  misc_feature (1)..(257): Homolog of NCBI NO: 21554516 NR Description: putative bifunctional nuclease [Arabidopsis
  misc_feature (1)..(257): Homolog of NCBI NO: 9558456 NR Description: unnamed protein product [Oryza sativa (japonica
  misc_feature (1)..(257): Homolog of NCBI NO: 34895514 NR Description: putative bifunctional nuclease [Oryza sativa
  misc_feature (1)..(256): Homolog of NCBI NO: 38345900 NR Description: OSJNBa0060D06.10 [Oryza sativa (japonica
  misc_feature (1)..(256): Homolog of NCBI NO: 3551956 NR Description: senescence-associated protein 6 [Hemerocallis
  misc_feature (1)..(257): Homolog of NCBI NO: 7229711 NR Description: CEL I mismatch endonuclease [Apium graveolens]
  misc_feature (1)..(256): Homolog of NCBI NO: 4099835 NR Description: bifunctional nuclease [Zinnia elegans]
MVCQIAQGRLSGAAAAAVKDLLPSYAGNNLSSLCSWADDVKFRYPWSSPLHYIDTPDGLCTYRYDRDCKDEDGVEGRCVAGAINNYTSQLLAYRRSSPTEYNLTQALLFLSHFIGDIHQPLHVGFTSDKGGNTIDVHWYTRKTVLHHVWDASIIQTAEDDFYGDSVAGYIDTLKKNITQGEWSEQVSSWEACGTNQTACPDIYASESVAAACDWAYKGVEEDSTLQDPYFSSRLPVVSLRLAQGGVRLAATLNRIFG

SEQ ID NO: 11011 - DNA, 541 bp, Zea mays subsp. mays
  misc_feature (1)..(541): Ceres Seq. ID no. 13564049
  misc_feature: MA Experiment ID: 108543 Result: Down-regulated in Transcription
  misc_feature: MA Experiment ID: 20000534 Result: Down-regulated in Transcription
  misc_feature: MA Experiment 20000534 PARAMETER Experiment Name: Zm_Hybrid_Pollen_P Parameter: Age (day) Value: 8
  misc_feature: MA Experiment 20000534 PARAMETER Experiment Name: Zm_Hybrid_Pollen_P Parameter: Organism Value: Zea mays
  misc_feature: MA Experiment 20000534 PARAMETER Experiment Name: Zm_Hybrid_Pollen_P Parameter: Plant Line Value: 35A19
  misc_feature: MA Experiment 20000534 PARAMETER Experiment Name: Zm_Hybrid_Pollen_P Parameter: Tissue Value: Pollen vs. Aerial
  misc_feature: MA Experiment ID: 20000626 Result: Up-regulated in Transcription
  misc_feature: MA Experiment 20000626 PARAMETER Experiment Name: Zm_Herbicide-Treatments_P Parameter: Timepoint (hr) Value: 12
  misc_feature: MA Experiment 20000626 PARAMETER Experiment Name: Zm_Herbicide-Treatments_P Parameter: Tissue Value: Aerial
  misc_feature: MA Experiment 20000626 PARAMETER Experiment Name: Zm_Herbicide-Treatments_P Parameter: Treatment Value: Roundup vs. No Treatment
aagacgatacaggaatgtgatggacatgaatgcggggataggtggctttgcagctgcattgatgaagtaccctctttgggtgatgaatgttgtgccttcaggcttggcccatgacaccctgggtgttatttacgaacgagggtttattggcacgtaccatgattggtgtgaggctttctcaacgtacccgaggacctacgacctcatccatgctgataaagttttcagcagttaccaggacaggtgtgacataacgtacatcctactggagatggaccgaattctaaggcctgaggggactgtgatcatcagggacaacgtagaggtgttggtgaaggtacaagctatcactggaggcatgaggtggaagagccaaatcatggaccatgagtccggtccattcaacaccgacaagatcctagtggctgtcaagacttactggaccgggaagctcgtgcaaaaacaataatcgtcgccttgttactgtttttcgtctgcgaaaatgtaggcatgacttgcctgtcagttctgtcttcattgc

SEQ ID NO: 11012 - protein, 155 aa, Zea mays subsp. mays
  peptide (1)..(155): Ceres Seq. ID no. 13564050
  misc_feature (2)..(144): Pfam Name: Putative methyltransferase Pfam Description: Putative methyltransferase
  misc_feature (2)..(150): Homolog of NCBI NO: 15235080 NR Description: dehydration-induced protein family [Arabidopsis
  misc_feature (7)..(149): Homolog of NCBI NO: 21617988 NR Description: unknown [Arabidopsis thaliana]
  misc_feature (2)..(148): Homolog of NCBI NO: 34898042 NR Description: OSJNBa0038F22.19 [Oryza sativa (japonica >gi|5734619|dbj|BAA83350.1| Similar to Arabidopsis thaliana BAC
  misc_feature (2)..(155): Homolog of NCBI NO: 24413975 NR Description: hypothetical protein~similar to Oryza sativa
  misc_feature (2)..(149): Homolog of NCBI NO: 9665165 NR Description: Unknown Protein [Arabidopsis thaliana]
  misc_feature (2)..(149): Homolog of NCBI NO: 18398763 NR Description: dehydration-induced protein family [Arabidopsis
  misc_feature (2)..(148): Homolog of NCBI NO: 37535962 NR Description: unknown protein [Oryza sativa (japonica
  misc_feature (2)..(148): Homolog of NCBI NO: 38567915 NR Description: OSJNBa0088I22.11 [Oryza sativa (japonica
  misc_feature (2)..(155): Homolog of NCBI NO: 6752888 NR Description: unknown [Malus x domestica]
  misc_feature (2)..(147): Homolog of NCBI NO: 18396075 NR Description: dehydration-induced protein family [Arabidopsis
RRYRNVMDMNAGIGGFAAALMKYPLWVMNVVPSGLAHDTLGVIYERGFIGTYHDWCEAFSTYPRTYDLIHADKVFSSYQDRCDITYILLEMDRILRPEGTVIIRDNVEVLVKVQAITGGMRWKSQIMDHESGPFNTDKILVAVKTYWTGKLVQKQ

SEQ ID NO: 11013 - protein, 149 aa, Zea mays subsp. mays
  peptide (1)..(149): Ceres Seq. ID no. 13564051
  misc_feature (1)..(138): Pfam Name: Putative methyltransferase Pfam Description: Putative methyltransferase
  misc_feature (1)..(149): Homolog of NCBI NO: 24413975 NR Description: hypothetical protein~similar to Oryza sativa
  misc_feature (1)..(142): Homolog of NCBI NO: 37535962 NR Description: unknown protein [Oryza sativa (japonica
  misc_feature (1)..(143): Homolog of NCBI NO: 9665165 NR Description: Unknown Protein [Arabidopsis thaliana]
  misc_feature (1)..(143): Homolog of NCBI NO: 18398763 NR Description: dehydration-induced protein family [Arabidopsis
  misc_feature (1)..(144): Homolog of NCBI NO: 15235080 NR Description: dehydration-induced protein family [Arabidopsis
  misc_feature (1)..(143): Homolog of NCBI NO: 21617988 NR Description: unknown [Arabidopsis thaliana]
  misc_feature (1)..(142): Homolog of NCBI NO: 34898042 NR Description: OSJNBa0038F22.19 [Oryza sativa (japonica >gi|5734619|dbj|BAA83350.1| Similar to Arabidopsis thaliana BAC
  misc_feature (1)..(142): Homolog of NCBI NO: 38567915 NR Description: OSJNBa0088I22.11 [Oryza sativa (japonica
  misc_feature (1)..(149): Homolog of NCBI NO: 6752888 NR Description: unknown [Malus x domestica]
  misc_feature (1)..(141): Homolog of NCBI NO: 18396075 NR Description: dehydration-induced protein family [Arabidopsis
MDMNAGIGGFAAALMKYPLWVMNVVPSGLAHDTLGVIYERGFIGTYHDWCEAFSTYPRTYDLIHADKVFSSYQDRCDITYILLEMDRILRPEGTVIIRDNVEVLVKVQAITGGMRWKSQIMDHESGPFNTDKILVAVKTYWTGKLVQKQ

SEQ ID NO: 11014 - protein, 147 aa, Zea mays subsp. mays
  peptide (1)..(147): Ceres Seq. ID no. 13564052
  misc_feature (1)..(136): Pfam Name: Putative methyltransferase Pfam Description: Putative methyltransferase
  misc_feature (1)..(147): Homolog of NCBI NO: 24413975 NR Description: hypothetical protein~similar to Oryza sativa
  misc_feature (1)..(140): Homolog of NCBI NO: 37535962 NR Description: unknown protein [Oryza sativa (japonica
  misc_feature (1)..(141): Homolog of NCBI NO: 9665165 NR Description: Unknown Protein [Arabidopsis thaliana]
  misc_feature (1)..(141): Homolog of NCBI NO: 18398763 NR Description: dehydration-induced protein family [Arabidopsis
  misc_feature (1)..(142): Homolog of NCBI NO: 15235080 NR Description: dehydration-induced protein family [Arabidopsis
  misc_feature (1)..(141): Homolog of NCBI NO: 21617988 NR Description: unknown [Arabidopsis thaliana]
  misc_feature (1)..(140): Homolog of NCBI NO: 34898042 NR Description: OSJNBa0038F22.19 [Oryza sativa (japonica >gi|5734619|dbj|BAA83350.1| Similar to Arabidopsis thaliana BAC
  misc_feature (1)..(140): Homolog of NCBI NO: 38567915 NR Description: OSJNBa0088I22.11 [Oryza sativa (japonica
  misc_feature (1)..(147): Homolog of NCBI NO: 6752888 NR Description: unknown [Malus x domestica]
  misc_feature (1)..(139): Homolog of NCBI NO: 18396075 NR Description: dehydration-induced protein family [Arabidopsis
MNAGIGGFAAALMKYPLWVMNVVPSGLAHDTLGVIYERGFIGTYHDWCEAFSTYPRTYDLIHADKVFSSYQDRCDITYILLEMDRILRPEGTVIIRDNVEVLVKVQAITGGMRWKSQIMDHESGPFNTDKILVAVKTYWTGKLVQKQ

SEQ ID NO: 11015 - DNA, 1307 bp, Zea mays subsp. mays
  misc_feature (1)..(1307): Ceres Seq. ID no. 12361396
  misc_feature: MA Experiment ID: 108513 Result: Up-regulated in Transcription
  misc_feature: MA Experiment 108513 PARAMETER Experiment Name: Zm_100uM_ABA_P Parameter: Age (day) Value: 8
  misc_feature: MA Experiment 108513 PARAMETER Experiment Name: Zm_100uM_ABA_P Parameter: Organism Value: Zea mays
  misc_feature: MA Experiment 108513 PARAMETER Experiment Name: Zm_100uM_ABA_P Parameter: Plant Line Value: 35A19
  misc_feature: MA Experiment 108513 PARAMETER Experiment Name: Zm_100uM_ABA_P Parameter: Timepoint (hr) Value: 6
  misc_feature: MA Experiment 108513 PARAMETER Experiment Name: Zm_100uM_ABA_P Parameter: Tissue Value: Aerial
  misc_feature: MA Experiment 108513 PARAMETER Experiment Name: Zm_100uM_ABA_P Parameter: Treatment Value: 100uM ABA vs. No Treatment
  misc_feature: MA Experiment ID: 108522 Result: Down-regulated in Transcription
  misc_feature: MA Experiment 108522 PARAMETER Experiment Name: Zm_42deg_Heat_P Parameter: Age (day) Value: 8
  misc_feature: MA Experiment 108522 PARAMETER Experiment Name: Zm_42deg_Heat_P Parameter: Organism Value: Zea mays
  misc_feature: MA Experiment 108522 PARAMETER Experiment Name: Zm_42deg_Heat_P Parameter: Plant Line Value: 35A19
  misc_feature: MA Experiment 108522 PARAMETER Experiment Name: Zm_42deg_Heat_P Parameter: Temperature (deg C) Value: 42 vs. 22
  misc_feature: MA Experiment 108522 PARAMETER Experiment Name: Zm_42deg_Heat_P Parameter: Timepoint (hr) Value: 1
  misc_feature: MA Experiment 108522 PARAMETER Experiment Name: Zm_42deg_Heat_P Parameter: Tissue Value: Aerial
  misc_feature: MA Experiment ID: 108523 Result: Down-regulated in Transcription
  misc_feature: MA Experiment 108523 PARAMETER Experiment Name: Zm_42deg_Heat_P Parameter: Age (day) Value: 8
  misc_feature: MA Experiment 108523 PARAMETER Experiment Name: Zm_42deg_Heat_P Parameter: Organism Value: Zea mays
  misc_feature: MA Experiment 108523 PARAMETER Experiment Name: Zm_42deg_Heat_P Parameter: Plant Line Value: 35A19
  misc_feature: MA Experiment 108523 PARAMETER Experiment Name: Zm_42deg_Heat_P Parameter: Temperature (deg C) Value: 42 vs. 22
  misc_feature: MA Experiment 108523 PARAMETER Experiment Name: Zm_42deg_Heat_P Parameter: Timepoint (hr) Value: 6
  misc_feature: MA Experiment 108523 PARAMETER Experiment Name: Zm_42deg_Heat_P Parameter: Tissue Value: Aerial
  misc_feature: MA Experiment ID: 108544 Result: Down-regulated in Transcription
  misc_feature: MA Experiment ID: 108599 Result: Up-regulated in Transcription
  misc_feature: MA Experiment 108599 PARAMETER Experiment Name: Zm_RT1_P Parameter: Age (day) Value: 11
  misc_feature: MA Experiment 108599 PARAMETER Experiment Name: Zm_RT1_P Parameter: Organism Value: Zea mays
  misc_feature: MA Experiment 108599 PARAMETER Experiment Name: Zm_RT1_P Parameter: Plant Line Value: rt1 mut vs. rt1 wt
  misc_feature: MA Experiment 108599 PARAMETER Experiment Name: Zm_RT1_P Parameter: Tissue Value: Roots
  misc_feature: MA Experiment ID: 20000479 Result: Up-regulated in Transcription
  misc_feature: MA Experiment 20000479 PARAMETER Experiment Name: Zm_Drought_P Parameter: Age (day) Value: 10
  misc_feature: MA Experiment 20000479 PARAMETER Experiment Name: Zm_Drought_P Parameter: Organism Value: Zea mays
  misc_feature: MA Experiment 20000479 PARAMETER Experiment Name: Zm_Drought_P Parameter: Plant Line Value: 35A19
  misc_feature: MA Experiment 20000479 PARAMETER Experiment Name: Zm_Drought_P Parameter: Timepoint (hr) Value: 48
  misc_feature: MA Experiment 20000479 PARAMETER Experiment Name: Zm_Drought_P Parameter: Tissue Value: Aerial
  misc_feature: MA Experiment 20000479 PARAMETER Experiment Name: Zm_Drought_P Parameter: Treatment Value: Drought vs. No Drought
  misc_feature: MA Experiment ID: 20000480 Result: Up-regulated in Transcription
  misc_feature: MA Experiment 20000480 PARAMETER Experiment Name: Zm_Drought_P Parameter: Age (day) Value: 11
  misc_feature: MA Experiment 20000480 PARAMETER Experiment Name: Zm_Drought_P Parameter: Organism Value: Zea mays
  misc_feature: MA Experiment 20000480 PARAMETER Experiment Name: Zm_Drought_P Parameter: Plant Line Value: 35A19
  misc_feature: MA Experiment 20000480 PARAMETER Experiment Name: Zm_Drought_P Parameter: Timepoint (hr) Value: 72
  misc_feature: MA Experiment 20000480 PARAMETER Experiment Name: Zm_Drought_P Parameter: Tissue Value: Aerial
  misc_feature: MA Experiment 20000480 PARAMETER Experiment Name: Zm_Drought_P Parameter: Treatment Value: Drought vs. No Drought
  misc_feature: MA Experiment ID: 20000488 Result: Down-regulated in Transcription
  misc_feature: MA Experiment 20000488 PARAMETER Experiment Name: Zm_50mM_NH4NO3_L_to_H_P Parameter: Organism Value: Zea mays
  misc_feature: MA Experiment 20000488 PARAMETER Experiment Name: Zm_50mM_NH4NO3_L_to_H_P Parameter: Timepoint (hr) Value: 8
  misc_feature: MA Experiment 20000488 PARAMETER Experiment Name: Zm_50mM_NH4NO3_L_to_H_P Parameter: Tissue Value: Leaves
  misc_feature: MA Experiment 20000488 PARAMETER Experiment Name: Zm_50mM_NH4NO3_L_to_H_P Parameter: Treatment Value: 50mM NH4NO3 vs. 100mM Mannitol
  misc_feature: MA Experiment ID: 20000534 Result: Down-regulated in Transcription
  misc_feature: MA Experiment 20000534 PARAMETER Experiment Name: Zm_Hybrid_Pollen_P Parameter: Age (day) Value: 8
  misc_feature: MA Experiment 20000534 PARAMETER Experiment Name: Zm_Hybrid_Pollen_P Parameter: Organism Value: Zea mays
  misc_feature: MA Experiment 20000534 PARAMETER Experiment Name: Zm_Hybrid_Pollen_P Parameter: Plant Line Value: 35A19
  misc_feature: MA Experiment 20000534 PARAMETER Experiment Name: Zm_Hybrid_Pollen_P Parameter: Tissue Value: Pollen vs. Aerial
  misc_feature: MA Experiment ID: 20000535 Result: Up-regulated in Transcription
  misc_feature: MA Experiment 20000535 PARAMETER Experiment Name: Zm_Hybrid_Seed_Dev_P Parameter: DAP Value: 30 vs. 12
  misc_feature: MA Experiment 20000535 PARAMETER Experiment Name: Zm_Hybrid_Seed_Dev_P Parameter: Organism Value: Zea mays
  misc_feature: MA Experiment 20000535 PARAMETER Experiment Name: Zm_Hybrid_Seed_Dev_P Parameter: Plant Line Value: 35A19
  misc_feature: MA Experiment 20000535 PARAMETER Experiment Name: Zm_Hybrid_Seed_Dev_P Parameter: Tissue Value: Embryo vs. Unfert Floret
  misc_feature: MA Experiment ID: 20000629 Result: Up-regulated in Transcription
  misc_feature: MA Experiment 20000629 PARAMETER Experiment Name: Zm_Herbicide-Treatments_P Parameter: Timepoint (hr) Value: 12
  misc_feature: MA Experiment 20000629 PARAMETER Experiment Name: Zm_Herbicide-Treatments_P Parameter: Tissue Value: Aerial
  misc_feature: MA Experiment 20000629 PARAMETER Experiment Name: Zm_Herbicide-Treatments_P Parameter: Treatment Value: Trimec vs. No Treatment
agaagccccctgtgccttgctcctcggtgtttcctccagatagtagtgtttcctcagtggactagtgtgaagctgtgcttagcgtagcggaagggaggaaggacaaggcaaggcaactgatggcggcgggcggcggaggcggctcggcggcgccgttcgtgtggaagacgtacacgatggtggaggaccccgggacggcaggggtgatcggctggggcagcggcaacaacagcttcgtcgtcgccgaccccttcgtcttctcgcagacgctgctccccgcgcacttcaagcacaacaacttctccagcttcgtccgccagctcaacacctatggcttccgcaaggttgatccggaccggtgggagttcgcccacgcgtcgttcctgcgcggccagacgcacctcctgcgcaacatcgtccgccgcggcagcagcgccgcccggtgccggaggcggaaagaggaaggacgccagccccacggagctggcctccggggacgacatgaccatggtggccacggaggtggtgcgcctcaagcaagagcagcgcgccatcgacgaccgcgtcgcctccatgtggcgccgcgtgcaggagacggagcgcaggcccaagcagatgctcgcgttcctcctcaaggtcgtcggcgaccgcgacaggctgcaccgcctcgtcggcgacgcccccgtgccagataacgggttcgcctccggcggtgccgccgagccgcccgccgcggaggtcggcgagaagcgggccaggctgctgctcgacggtgacagcatggtggcgctcggtcccgaggccgtcgacttcgccgggttctacagcggcggcggtgcgttcggcgatgttgccgtggatgctgccgctgggtcccgcggaggcgggttctcgtttgcgttcggcgtggacgcggggtactgaatgacgagcaggcgccgccattgtcagcagcttggcccgcttatgctgctgtcgagcttcctgccaatgccattgcgctgagcggcggcagccgtcacatggaagcatggcaggggatggatgataatgatgttaagttctatccctgctacatggataggatgtgtgtctgatgctgcttttcgtggatctatatgggcggggagcgactactccgtcgagatctaaaaataaggggatatactgtcatggagtgtgaccttcgaagttcccaatatgagtaggtttgatgttgtacatgaccagtgcagcagcactaatatttcaatctcctgcggatacgcagctggaaaattggcatcgctattatttagcccttttct

SEQ ID NO: 11016 - protein, 197 aa, Zea mays subsp. mays
  peptide (1)..(197): Ceres Seq. ID no. 12361397
  misc_feature (61)..(114): Pfam Name: HSF-type DNA-binding Pfam Description: HSF-type DNA-binding
  misc_feature (43)..(162): Homolog of NCBI NO: 34910182 NR Description: putative heat shock transcription factor [Oryza
  misc_feature (61)..(114): Homolog of NCBI NO: 15230127 NR Description: heat shock transcription factor HSF1, putative; id: At3g24520.1, supported by cDNA: gi_15810193, supported by gi_18252248 [Arabidopsis thaliana] >gi|9294046|dbj|BAB02003.1|
  misc_feature (57)..(104): Homolog of NCBI NO: 11386827 NR Description: Heat shock factor protein HSF8 (Heat shock factor 8) (HSTF 8) (Heat stress transcription factor)
  misc_feature (57)..(127): Homolog of NCBI NO: 729775 NR Description: HEAT SHOCK FACTOR PROTEIN HSF8 (HEAT SHOCK FACTOR 8) (HSTF 8) (HEAT STRESS TRANSCRIPTION FACTOR)
  misc_feature (57)..(113): Homolog of NCBI NO: 37534406 NR Description: putative auxin-induced protein [Oryza sativa
  misc_feature (57)..(114): Homolog of NCBI NO: 28971956 NR Description: putative heat shock transcription factor [Oryza
  misc_feature (57)..(114): Homolog of NCBI NO: 33087081 NR Description: heat stress protein [Oryza sativa (japonica
  misc_feature (57)..(114): Homolog of NCBI NO: 27261140 NR Description: HSF3 DNA-binding domain/VP16 activation domain
  misc_feature (57)..(106): Homolog of NCBI NO: 15225255 NR Description: putative heat shock transcription factor; protein At2g26150.1 [Arabidopsis thaliana] >gi|7485001|pir||T02609
  misc_feature (57)..(114): Homolog of NCBI NO: 30686034 NR Description: heat shock transcription factor 3 (HSF3) thaliana] >gi|30686038|ref|NP_850832.1| heat shock transcription
MASARLIRTGGSSPTRRSCAARRTSCATSSAAAAAPPGAGGGKRKDASPTELASGDDMTMVATEVVRLKQEQRAIDDRVASMWRRVQETERRPKQMLAFLLKVVGDRDRLHRLVGDAPVPDNGFASGGAAEPPAAEVGEKRARLLLDGDSMVALGPEAVDFAGFYSGGGAFGDVAVDAAAGSRGGGFSFAFGVDAGY

SEQ ID NO: 11017 - protein, 191 aa, Zea mays subsp. mays
  peptide (1)..(191): Ceres Seq. ID no. 12361398
  misc_feature (11)..(116): Pfam Name: HSF-type DNA-binding Pfam Description: HSF-type DNA-binding
  misc_feature (1)..(121): Homolog of NCBI NO: 34910182 NR Description: putative heat shock transcription factor [Oryza
  misc_feature (11)..(116): Homolog of NCBI NO: 15230127 NR Description: heat shock transcription factor HSF1, putative; id: At3g24520.1, supported by cDNA: gi_15810193, supported by gi_18252248 [Arabidopsis thaliana] >gi|9294046|dbj|BAB02003.1|
  misc_feature (12)..(121): Homolog of NCBI NO: 11386827 NR Description: Heat shock factor protein HSF8 (Heat shock factor 8) (HSTF 8) (Heat stress transcription factor)
  misc_feature (12)..(121): Homolog of NCBI NO: 729775 NR Description: HEAT SHOCK FACTOR PROTEIN HSF8 (HEAT SHOCK FACTOR 8) (HSTF 8) (HEAT STRESS TRANSCRIPTION FACTOR)
  misc_feature (12)..(102): Homolog of NCBI NO: 37534406 NR Description: putative auxin-induced protein [Oryza sativa
  misc_feature (12)..(102): Homolog of NCBI NO: 28971956 NR Description: putative heat shock transcription factor [Oryza
  misc_feature (12)..(102): Homolog of NCBI NO: 33087081 NR Description: heat stress protein [Oryza sativa (japonica
  misc_feature (9)..(105): Homolog of NCBI NO: 27261140 NR Description: HSF3 DNA-binding domain/VP16 activation domain
  misc_feature (12)..(102): Homolog of NCBI NO: 15225255 NR Description: putative heat shock transcription factor; protein At2g26150.1 [Arabidopsis thaliana] >gi|7485001|pir||T02609
  misc_feature (9)..(105): Homolog of NCBI NO: 30686034 NR Description: heat shock transcription factor 3 (HSF3) thaliana] >gi|30686038|ref|NP_850832.1| heat shock transcription
MAAGGGGGSAAPFVWKTYTMVEDPGTAGVIGWGSGNNSFVVADPFVFSQTLLPAHFKHNNFSSFVRQLNTYGFRKVDPDRWEFAHASFLRGQTHLLRNIVRRGSSAARCRRRKEEGRQPHGAGLRGRHDHGGHGGGAPQARAARHRRPRRLHVAPRAGDGAQAQADARVPPQGRRRPRQAAPPRRRRPRAR

SEQ ID NO: 11018 - protein, 172 aa, Zea mays subsp. mays
  peptide (1)..(172): Ceres Seq. ID no. 12361399
  misc_feature (1)..(97): Pfam Name: HSF-type DNA-binding Pfam Description: HSF-type DNA-binding
  misc_feature (1)..(102): Homolog of NCBI NO: 34910182 NR Description: putative heat shock transcription factor [Oryza
  misc_feature (1)..(97): Homolog of NCBI NO: 15230127 NR Description: heat shock transcription factor HSF1, putative; id: At3g24520.1, supported by cDNA: gi_15810193, supported by gi_18252248 [Arabidopsis thaliana] >gi|9294046|dbj|BAB02003.1|
  misc_feature (1)..(102): Homolog of NCBI NO: 11386827 NR Description: Heat shock factor protein HSF8 (Heat shock factor 8) (HSTF 8) (Heat stress transcription factor)
  misc_feature (1)..(102): Homolog of NCBI NO: 729775 NR Description: HEAT SHOCK FACTOR PROTEIN HSF8 (HEAT SHOCK FACTOR 8) (HSTF 8) (HEAT STRESS TRANSCRIPTION FACTOR)
  misc_feature (1)..(83): Homolog of NCBI NO: 37534406 NR Description: putative auxin-induced protein [Oryza sativa
  misc_feature (1)..(83): Homolog of NCBI NO: 28971956 NR Description: putative heat shock transcription factor [Oryza
  misc_feature (1)..(83): Homolog of NCBI NO: 33087081 NR Description: heat stress protein [Oryza sativa (japonica
  misc_feature (1)..(86): Homolog of NCBI NO: 27261140 NR Description: HSF3 DNA-binding domain/VP16 activation domain
  misc_feature (1)..(83): Homolog of NCBI NO: 15225255 NR Description: putative heat shock transcription factor; protein At2g26150.1 [Arabidopsis thaliana] >gi|7485001|pir||T02609
  misc_feature (1)..(86): Homolog of NCBI NO: 30686034 NR Description: heat shock transcription factor 3 (HSF3) thaliana] >gi|30686038|ref|NP_850832.1| heat shock transcription
MVEDPGTAGVIGWGSGNNSFVVADPFVFSQTLLPAHFKHNNFSSFVRQLNTYGFRKVDPDRWEFAHASFLRGQTHLLRNIVRRGSSAARCRRRKEEGRQPHGAGLRGRHDHGGHGGGAPQARAARHRRPRRLHVAPRAGDGAQAQADARVPPQGRRRPRQAAPPRRRRPRAR

SEQ ID NO: 11019 - DNA, 1367 bp, Zea mays subsp. mays
  misc_feature (1)..(1367): Ceres Seq. ID no. 12341058
  misc_feature: MA Experiment ID: 108504 Result: Down-regulated in Transcription
  misc_feature: MA Experiment 108504 PARAMETER Experiment Name: Zm_Drought_P Parameter: Age (day) Value: 8
  misc_feature: MA Experiment 108504 PARAMETER Experiment Name: Zm_Drought_P Parameter: Organism Value: Zea mays
  misc_feature: MA Experiment 108504 PARAMETER Experiment Name: Zm_Drought_P Parameter: Plant Line Value: 35A19
  misc_feature: MA Experiment 108504 PARAMETER Experiment Name: Zm_Drought_P Parameter: Timepoint (hr) Value: 12
  misc_feature: MA Experiment 108504 PARAMETER Experiment Name: Zm_Drought_P Parameter: Tissue Value: Aerial
  misc_feature: MA Experiment 108504 PARAMETER Experiment Name: Zm_Drought_P Parameter: Treatment Value: Drought vs. No Drought
  misc_feature: MA Experiment ID: 108513 Result: Down-regulated in Transcription
  misc_feature: MA Experiment 108513 PARAMETER Experiment Name: Zm_100uM_ABA_P Parameter: Age (day) Value: 8
  misc_feature: MA Experiment 108513 PARAMETER Experiment Name: Zm_100uM_ABA_P Parameter: Organism Value: Zea mays
  misc_feature: MA Experiment 108513 PARAMETER Experiment Name: Zm_100uM_ABA_P Parameter: Plant Line Value: 35A19
  misc_feature: MA Experiment 108513 PARAMETER Experiment Name: Zm_100uM_ABA_P Parameter: Timepoint (hr) Value: 6
  misc_feature: MA Experiment 108513 PARAMETER Experiment Name: Zm_100uM_ABA_P Parameter: Tissue Value: Aerial
  misc_feature: MA Experiment 108513 PARAMETER Experiment Name: Zm_100uM_ABA_P Parameter: Treatment Value: 100uM ABA vs. No Treatment
  misc_feature: MA Experiment ID: 108515 Result: Down-regulated in Transcription
  misc_feature: MA Experiment 108515 PARAMETER Experiment Name: Zm_2mM_SA_P Parameter: Age (day) Value: 8
  misc_feature: MA Experiment 108515 PARAMETER Experiment Name: Zm_2mM_SA_P Parameter: Organism Value: Zea mays
  misc_feature: MA Experiment 108515 PARAMETER Experiment Name: Zm_2mM_SA_P Parameter: Plant Line Value: 35A19
  misc_feature: MA Experiment 108515 PARAMETER Experiment Name: Zm_2mM_SA_P Parameter: Timepoint (hr) Value: 12
  misc_feature: MA Experiment 108515 PARAMETER Experiment Name: Zm_2mM_SA_P Parameter: Tissue Value: Aerial
  misc_feature: MA Experiment 108515 PARAMETER Experiment Name: Zm_2mM_SA_P Parameter: Treatment Value: 2mM SA vs. No Treatment
  misc_feature: MA Experiment ID: 108527 Result: Down-regulated in Transcription
  misc_feature: MA Experiment 108527 PARAMETER Experiment Name: Zm_5mM_NO_P Parameter: Age (day) Value: 8
  misc_feature: MA Experiment 108527 PARAMETER Experiment Name: Zm_5mM_NO_P Parameter: Organism Value: Zea mays
  misc_feature: MA Experiment 108527 PARAMETER Experiment Name: Zm_5mM_NO_P Parameter: Plant Line Value: 35A19
  misc_feature: MA Experiment 108527 PARAMETER Experiment Name: Zm_5mM_NO_P Parameter: Timepoint (hr) Value: 6
  misc_feature: MA Experiment 108527 PARAMETER Experiment Name: Zm_5mM_NO_P Parameter: Tissue Value: Aerial
  misc_feature: MA Experiment 108527 PARAMETER Experiment Name: Zm_5mM_NO_P Parameter: Treatment Value: 5mM NO vs. No Treatment
  misc_feature: MA Experiment ID: 108528 Result: Up-regulated in Transcription
  misc_feature: MA Experiment 108528 PARAMETER Experiment Name: Zm_Imbibed_Seeds_P Parameter: Age (day) Value: 5 vs. 2
  misc_feature: MA Experiment 108528 PARAMETER Experiment Name: Zm_Imbibed_Seeds_P Parameter: Organism Value: Zea mays
  misc_feature: MA Experiment 108528 PARAMETER Experiment Name: Zm_Imbibed_Seeds_P Parameter: Plant Line Value: 35A19
  misc_feature: MA Experiment 108528 PARAMETER Experiment Name: Zm_Imbibed_Seeds_P Parameter: Tissue Value: Aerial vs. Embryo
  misc_feature: MA Experiment ID: 108530 Result: Up-regulated in Transcription
  misc_feature: MA Experiment 108530 PARAMETER Experiment Name: Zm_Imbibed_Seeds_P Parameter: Age (day) Value: 6 vs. 2
  misc_feature: MA Experiment 108530 PARAMETER Experiment Name: Zm_Imbibed_Seeds_P Parameter: Organism Value: Zea mays
  misc_feature: MA Experiment 108530 PARAMETER Experiment Name: Zm_Imbibed_Seeds_P Parameter: Plant Line Value: 35A19
  misc_feature: MA Experiment 108530 PARAMETER Experiment Name: Zm_Imbibed_Seeds_P Parameter: Tissue Value: Aerial vs. Embryo
  misc_feature: MA Experiment ID: 108534 Result: Up-regulated in Transcription
  misc_feature: MA Experiment 108534 PARAMETER Experiment Name: Zm_4deg_Cold_P Parameter: Age (hr) Value: 8
  misc_feature: MA Experiment 108534 PARAMETER Experiment Name: Zm_4deg_Cold_P Parameter: Organism Value: Zea mays
  misc_feature: MA Experiment 108534 PARAMETER Experiment Name: Zm_4deg_Cold_P Parameter: Plant Line Value: 35A19
  misc_feature: MA Experiment 108534 PARAMETER Experiment Name: Zm_4deg_Cold_P Parameter: Temperature (deg C) Value: 4 vs. 22
  misc_feature: MA Experiment 108534 PARAMETER Experiment Name: Zm_4deg_Cold_P Parameter: Timepoint (hr) Value: 6
  misc_feature: MA Experiment 108534 PARAMETER Experiment Name: Zm_4deg_Cold_P Parameter: Tissue Value: Aerial
  misc_feature: MA Experiment ID: 108535 Result: Down-regulated in Transcription
  misc_feature: MA Experiment 108535 PARAMETER Experiment Name: Zm_Meristem_P Parameter: Age (day) Value: 8
  misc_feature: MA Experiment 108535 PARAMETER Experiment Name: Zm_Meristem_P Parameter: Organism Value: Zea mays
  misc_feature: MA Experiment 108535 PARAMETER Experiment Name: Zm_Meristem_P Parameter: Plant Line Value: 35A19
  misc_feature: MA Experiment 108535 PARAMETER Experiment Name: Zm_Meristem_P Parameter: Tissue Value: Root Meristem vs. Above Root Meristem
  misc_feature: MA Experiment ID: 108536 Result: Down-regulated in Transcription
  misc_feature: MA Experiment 108536 PARAMETER Experiment Name: Zm_Meristem_P Parameter: Age (day) Value: 8
  misc_feature: MA Experiment 108536 PARAMETER Experiment Name: Zm_Meristem_P Parameter: Organism Value: Zea mays
  misc_feature: MA Experiment 108536 PARAMETER Experiment Name: Zm_Meristem_P Parameter: Plant Line Value: 35A19
  misc_feature: MA Experiment 108536 PARAMETER Experiment Name: Zm_Meristem_P Parameter: Tissue Value: Shoot Meristem vs. Above Shoot Meristem
  misc_feature: MA Experiment ID: 108540 Result: Down-regulated in Transcription
  misc_feature: MA Experiment 108540 PARAMETER Experiment Name: Zm_20percent_PEG_P Parameter: Age (day) Value: 8
  misc_feature: MA Experiment 108540 PARAMETER Experiment Name: Zm_20percent_PEG_P Parameter: Organism Value: Zea mays
  misc_feature: MA Experiment 108540 PARAMETER Experiment Name: Zm_20percent_PEG_P Parameter: Plant Line Value: 35A19
  misc_feature: MA Experiment 108540 PARAMETER Experiment Name: Zm_20percent_PEG_P Parameter: Timepoint (hr) Value: 6
  misc_feature: MA Experiment 108540 PARAMETER Experiment Name: Zm_20percent_PEG_P Parameter: Tissue Value: Aerial
  misc_feature: MA Experiment 108540 PARAMETER Experiment Name: Zm_20percent_PEG_P Parameter: Treatment Value: 20percent PEG vs. No Treatment
  misc_feature: MA Experiment ID: 108542 Result: Down-regulated in Transcription
  misc_feature: MA Experiment 108542 PARAMETER Experiment Name: Zm_150mM_NaCl_P Parameter: Age (day) Value: 8
  misc_feature: MA Experiment 108542 PARAMETER Experiment Name: Zm_150mM_NaCl_P Parameter: Organism Value: Zea mays
  misc_feature: MA Experiment 108542 PARAMETER Experiment Name: Zm_150mM_NaCl_P Parameter: Plant Line Value: 35A19
  misc_feature: MA Experiment 108542 PARAMETER Experiment Name: Zm_150mM_NaCl_P Parameter: Timepoint (hr) Value: 6
  misc_feature: MA Experiment 108542 PARAMETER Experiment Name: Zm_150mM_NaCl_P Parameter: Tissue Value: Aerial
  misc_feature: MA Experiment 108542 PARAMETER Experiment Name: Zm_150mM_NaCl_P Parameter: Treatment Value: 150mM NaCl vs. No Treatment
  misc_feature: MA Experiment ID: 108543 Result: Up-regulated in Transcription
  misc_feature: MA Experiment ID: 108544 Result: Down-regulated in Transcription
  misc_feature: MA Experiment ID: 108545 Result: Up-regulated in Transcription
  misc_feature: MA Experiment 108545 PARAMETER Experiment Name: Zm_Imbibed_Seeds_P Parameter: Age (day) Value: 3 vs. 2
  misc_feature: MA Experiment 108545 PARAMETER Experiment Name: Zm_Imbibed_Seeds_P Parameter: Organism Value: Zea mays
  misc_feature: MA Experiment 108545 PARAMETER Experiment Name: Zm_Imbibed_Seeds_P Parameter: Plant Line Value: 35A19
  misc_feature: MA Experiment 108545 PARAMETER Experiment Name: Zm_Imbibed_Seeds_P Parameter: Tissue Value: Aerial vs. Embryo
  misc_feature: MA Experiment ID: 108547 Result: Up-regulated in Transcription
  misc_feature: MA Experiment 108547 PARAMETER Experiment Name: Zm_Imbibed_Seeds_P Parameter: Age (day) Value: 4 vs. 2
  misc_feature: MA Experiment 108547 PARAMETER Experiment Name: Zm_Imbibed_Seeds_P Parameter: Organism Value: Zea mays
  misc_feature: MA Experiment 108547 PARAMETER Experiment Name: Zm_Imbibed_Seeds_P Parameter: Plant Line Value: 35A19
  misc_feature: MA Experiment 108547 PARAMETER Experiment Name: Zm_Imbibed_Seeds_P Parameter: Tissue Value: Aerial vs. Embryo
  misc_feature: MA Experiment ID: 108556 Result: Down-regulated in Transcription
  misc_feature: MA Experiment 108556 PARAMETER Experiment Name: Zm_Drought_P Parameter: Age (day) Value: 9
  misc_feature: MA Experiment 108556 PARAMETER Experiment Name: Zm_Drought_P Parameter: Organism Value: Zea mays
  misc_feature: MA Experiment 108556 PARAMETER Experiment Name: Zm_Drought_P Parameter: Plant Line Value: 35A19
  misc_feature: MA Experiment 108556 PARAMETER Experiment Name: Zm_Drought_P Parameter: Timepoint (hr) Value: 24
  misc_feature: MA Experiment 108556 PARAMETER Experiment Name: Zm_Drought_P Parameter: Tissue Value: Aerial
  misc_feature: MA Experiment 108556 PARAMETER Experiment Name: Zm_Drought_P Parameter: Treatment Value: Drought vs. No Drought
  misc_feature: MA Experiment ID: 108559 Result: Down-regulated in Transcription
  misc_feature: MA Experiment 108559 PARAMETER Experiment Name: Zm_5mM_NO_P Parameter: Age (day) Value: 8
  misc_feature: MA Experiment 108559 PARAMETER Experiment Name: Zm_5mM_NO_P Parameter: Organism Value: Zea mays
  misc_feature: MA Experiment 108559 PARAMETER Experiment Name: Zm_5mM_NO_P Parameter: Plant Line Value: 35A19
  misc_feature: MA Experiment 108559 PARAMETER Experiment Name: Zm_5mM_NO_P Parameter: Timepoint (hr) Value: 12
  misc_feature: MA Experiment 108559 PARAMETER Experiment Name: Zm_5mM_NO_P Parameter: Tissue Value: Aerial
  misc_feature: MA Experiment 108559 PARAMETER Experiment Name: Zm_5mM_NO_P Parameter: Treatment Value: 5mM NO vs. No Treatment
  misc_feature: MA Experiment ID: 108597 Result: Down-regulated in Transcription
  misc_feature: MA Experiment 108597 PARAMETER Experiment Name: Zm_100uM_ABA_P Parameter: Age (day) Value: 9
  misc_feature: MA Experiment 108597 PARAMETER Experiment Name: Zm_100uM_ABA_P Parameter: Organism Value: Zea mays
  misc_feature: MA Experiment 108597 PARAMETER Experiment Name: Zm_100uM_ABA_P Parameter: Plant Line Value: 35A19
  misc_feature: MA Experiment 108597 PARAMETER Experiment Name: Zm_100uM_ABA_P Parameter: Timepoint (hr) Value: 24
  misc_feature: MA Experiment 108597 PARAMETER Experiment Name: Zm_100uM_ABA_P Parameter: Tissue Value: Aerial
  misc_feature: MA Experiment 108597 PARAMETER Experiment Name: Zm_100uM_ABA_P Parameter: Treatment Value: 100uM ABA vs. No Treatment
  misc_feature: MA Experiment ID: 108687 Result: Down-regulated in Transcription
  misc_feature: MA Experiment 108687 PARAMETER Experiment Name: Zm_Embryos-Flowers__P Parameter: Tissue Value: Embryo vs. Aerial+
  misc_feature: MA Experiment ID: 108689 Result: Down-regulated in Transcription
  misc_feature: MA Experiment 108689 PARAMETER Experiment Name: Zm_Drought_Roots_P Parameter: Age (day) Value: 9
  misc_feature: MA Experiment 108689 PARAMETER Experiment Name: Zm_Drought_Roots_P Parameter: Organism Value: Zea mays
  misc_feature: MA Experiment 108689 PARAMETER Experiment Name: Zm_Drought_Roots_P Parameter: Plant Line Value: 35A19
  misc_feature: MA Experiment 108689 PARAMETER Experiment Name: Zm_Drought_Roots_P Parameter: Timepoint (hr) Value: 24
  misc_feature: MA Experiment 108689 PARAMETER Experiment Name: Zm_Drought_Roots_P Parameter: Tissue Value: Roots
  misc_feature: MA Experiment 108689 PARAMETER Experiment Name: Zm_Drought_Roots_P Parameter: Treatment Value: Drought vs. No Drought
  misc_feature: MA Experiment ID: 20000477 Result: Down-regulated in Transcription
  misc_feature: MA Experiment 20000477 PARAMETER Experiment Name: Zm_5mM_SA_P Parameter: Age (day) Value: 10
  misc_feature: MA Experiment 20000477 PARAMETER Experiment Name: Zm_5mM_SA_P Parameter: Organism Value: Zea mays
  misc_feature: MA Experiment 20000477 PARAMETER Experiment Name: Zm_5mM_SA_P Parameter: Plant Line Value: 35A19
  misc_feature: MA Experiment 20000477 PARAMETER Experiment Name: Zm_5mM_SA_P Parameter: Timepoint (hr) Value: 48
  misc_feature: MA Experiment 20000477 PARAMETER Experiment Name: Zm_5mM_SA_P Parameter: Tissue Value: Aerial
  misc_feature: MA Experiment 20000477 PARAMETER Experiment Name: Zm_5mM_SA_P Parameter: Treatment Value: 5mM SA vs. No Treatment
  misc_feature: MA Experiment ID: 20000478 Result: Down-regulated in Transcription
  misc_feature: MA Experiment 20000478 PARAMETER Experiment Name: Zm_5mM_SA_P Parameter: Age (day) Value: 11
  misc_feature: MA Experiment 20000478 PARAMETER Experiment Name: Zm_5mM_SA_P Parameter: Organism Value: Zea mays
  misc_feature: MA Experiment 20000478 PARAMETER Experiment Name: Zm_5mM_SA_P Parameter: Plant Line Value: 35A19
  misc_feature: MA Experiment 20000478 PARAMETER Experiment Name: Zm_5mM_SA_P Parameter: Timepoint (hr) Value: 72
  misc_feature: MA Experiment 20000478 PARAMETER Experiment Name: Zm_5mM_SA_P Parameter: Tissue Value: Aerial
  misc_feature: MA Experiment 20000478 PARAMETER Experiment Name: Zm_5mM_SA_P Parameter: Treatment Value: 5mM SA vs. No Treatment
  misc_feature: MA Experiment ID: 20000479 Result: Down-regulated in Transcription
  misc_feature: MA Experiment 20000479 PARAMETER Experiment Name: Zm_Drought_P Parameter: Age (day) Value: 10
  misc_feature: MA Experiment 20000479 PARAMETER Experiment Name: Zm_Drought_P Parameter: Organism Value: Zea mays
  misc_feature: MA Experiment 20000479 PARAMETER Experiment Name: Zm_Drought_P Parameter: Plant Line Value: 35A19
  misc_feature: MA Experiment 20000479 PARAMETER Experiment Name: Zm_Drought_P Parameter: Timepoint (hr) Value: 48
  misc_feature: MA Experiment 20000479 PARAMETER Experiment Name: Zm_Drought_P Parameter: Tissue Value: Aerial
  misc_feature: MA Experiment 20000479 PARAMETER Experiment Name: Zm_Drought_P Parameter: Treatment Value: Drought vs. No Drought
  misc_feature: MA Experiment ID: 20000535 Result: Down-regulated in Transcription
  misc_feature: MA Experiment 20000535 PARAMETER Experiment Name: Zm_Hybrid_Seed_Dev_P Parameter: DAP Value: 30 vs. 12
  misc_feature: MA Experiment 20000535 PARAMETER Experiment Name: Zm_Hybrid_Seed_Dev_P Parameter: Organism Value: Zea mays
  misc_feature: MA Experiment 20000535 PARAMETER Experiment Name: Zm_Hybrid_Seed_Dev_P Parameter: Plant Line Value: 35A19
  misc_feature: MA Experiment 20000535 PARAMETER Experiment Name: Zm_Hybrid_Seed_Dev_P Parameter: Tissue Value: Embryo vs. Unfert Floret
  misc_feature: MA Experiment ID: 20001608 Result: Down-regulated in Transcription
  misc_feature: MA Experiment 20001608 PARAMETER Experiment Name: Zm_50ppm_KNO3_L-to-H_P Parameter: Age (day) Value: 21
  misc_feature: MA Experiment 20001608 PARAMETER Experiment Name: Zm_50ppm_KNO3_L-to-H_P Parameter: Organism Value: Zea mays
  misc_feature: MA Experiment 20001608 PARAMETER Experiment Name: Zm_50ppm_KNO3_L-to-H_P Parameter: Plant Line Value: 35A19
  misc_feature: MA Experiment 20001608 PARAMETER Experiment Name: Zm_50ppm_KNO3_L-to-H_P Parameter: Timepoint (hr) Value: 48
  misc_feature: MA Experiment 20001608 PARAMETER Experiment Name: Zm_50ppm_KNO3_L-to-H_P Parameter: Tissue Value: Shoots
  misc_feature: MA Experiment 20001608 PARAMETER Experiment Name: Zm_50ppm_KNO3_L-to-H_P Parameter: Treatment Value: 50ppm KNO3 vs. 50ppm KCl
agcagtctcgatggccgccgccgactcctccccgctccacatcgtcattttcccttggctcgcgttcggccacttgatccccggcctcgagttcgccgagcgcctcgctcatcgacttggtggccctcccgttcccgcgcattgacggcctccccgatggcgccgaggccactagcgacctcccgcccggcacggccgagctccacgtgcaggccatggaccgcctcgccccggccttctccgccttcctcggtgccgcctgcgccgacgggagcgaccgtaaggtggactgggtgctcctcgacaacttccacgcgtccatggcggacgtcgccagcgagcacaaggttccctgcatactgaacatgccctactcctcggcgacgacagaggatttcggcattccagacccgtcggttctaccaatgttccggccatttgtcgagaccttcaagagatgcaaagtcatcgctgctcgtagcagcttcgagttggaaccggagtccctgcctctcatgacaaagatcctcgggaagccggtcatccccgtgggcctacttcctccggcgcccgccggaggcaacacgcagcgcgacgacagcgcagccctgtcgtggctcgacgagcagccgtccaagtccgtggtctacgtcgccttcgggagcgagtacccgatgaccgtcaagcagctgcacgagatcgcgcgcgggctggagctcgccgggacgcgcttcctctgggccctcaagaggcctagcgtcgcccaccccgacgaggacctcctgccgccaggtttcgaggagcgcacgcgcggccgtggctccgtcgtcacgggctgggttcctcagaccagcatactggggcatggcgccgtcgccgcgttcatgatgcactgcggctggggctccaccatcgaggcgcttcagtacggccatcctctggtcatgatgccagttctcgtcgaccacctgtccaccgcgcgggtgatggagcagcggaaggtcggagtcaaggtgcggaaggagaagagtgacgaagcgttccttggtgacaacatcgccacagcgatacgggctgtcatgtgcgaagaagagagcaagaggatctttgtggccaatgctaagaggatgcaggagattgtggcagacgacgagtgccacaagaggtacatagacgaattcgttcagagcctgagaacctacaagaactgaaacatgcatggtattggtcagtgcactcagcatacttggcattggcgttacacaagtgattcgctggactccagcttatacgatgtatcttattttgctgcaatatgcaactttatcattgtttggttgtaaaaagatttgaatttgtttctcgtg

SEQ ID NO: 11020 - protein, 331 aa, Zea mays subsp. mays
  peptide (1)..(331): Ceres Seq. ID no. 12341059
  misc_feature (1)..(55): Pfam Name: UDP-glucoronosyl and UDP-glucosyl transferase Pfam Description: UDP-glucoronosyl and UDP-glucosyl transferase
  misc_feature (80)..(326): Homolog of NCBI NO: 37530678 NR Description: putative anthocyanidin-3-glucoside
  misc_feature (1)..(55): Homolog of NCBI NO: 37530678 NR Description: putative anthocyanidin-3-glucoside
  misc_feature (82)..(330): Homolog of NCBI NO: 34393978 NR Description: putative UDP-glucosyltransferase [Oryza sativa
  misc_feature (1)..(49): Homolog of NCBI NO: 34393978 NR Description: putative UDP-glucosyltransferase [Oryza sativa
  misc_feature (80)..(327): Homolog of NCBI NO: 34393985 NR Description: putative UDP-glucosyltransferase [Oryza sativa
  misc_feature (1)..(62): Homolog of NCBI NO: 34393985 NR Description: putative UDP-glucosyltransferase [Oryza sativa
  misc_feature (77)..(330): Homolog of NCBI NO: 34393982 NR Description: putative UDP-glucosyltransferase [Oryza sativa
  misc_feature (1)..(46): Homolog of NCBI NO: 34393982 NR Description: putative UDP-glucosyltransferase [Oryza sativa
  misc_feature (79)..(326): Homolog of NCBI NO: 21435782 NR Description: UDP-glucosyltransferase [Stevia rebaudiana]
  misc_feature (1)..(41): Homolog of NCBI NO: 21435782 NR Description: UDP-glucosyltransferase [Stevia rebaudiana]
MDRLAPAFSAFLGAACADGSDRKVDWVLLDNFHASMADVASEHKVPCILNMPYSSATTEDFGIPDPSVLPMFRPFVETFKRCKVIAARSSFELEPESLPLMTKILGKPVIPVGLLPPAPAGGNTQRDDSAALSWLDEQPSKSVVYVAFGSEYPMTVKQLHEIARGLELAGTRFLWALKRPSVAHPDEDLLPPGFEERTRGRGSVVTGWVPQTSILGHGAVAAFMMHCGWGSTIEALQYGHPLVMMPVLVDHLSTARVMEQRKVGVKVRKEKSDEAFLGDNIATAIRAVMCEEESKRIFVANAKRMQEIVADDECHKRYIDEFVQSLRTYKN

SEQ ID NO: 11021 - protein, 296 aa, Zea mays subsp. mays
  peptide (1)..(296): Ceres Seq. ID no. 12341060
  misc_feature (45)..(291): Pfam Name: UDP-glucoronosyl and UDP-glucosyl transferase Pfam Description: UDP-glucoronosyl and UDP-glucosyl transferase
  misc_feature (45)..(291): Homolog of NCBI NO: 37530678 NR Description: putative anthocyanidin-3-glucoside
  misc_feature (1)..(20): Homolog of NCBI NO: 37530678 NR Description: putative anthocyanidin-3-glucoside
  misc_feature (47)..(295): Homolog of NCBI NO: 34393978 NR Description: putative UDP-glucosyltransferase [Oryza sativa
  misc_feature (1)..(14): Homolog of NCBI NO: 34393978 NR Description: putative UDP-glucosyltransferase [Oryza sativa
  misc_feature (45)..(292): Homolog of NCBI NO: 34393985 NR Description: putative UDP-glucosyltransferase [Oryza sativa
  misc_feature (1)..(27): Homolog of NCBI NO: 34393985 NR Description: putative UDP-glucosyltransferase [Oryza sativa
  misc_feature (42)..(295): Homolog of NCBI NO: 34393982 NR Description: putative UDP-glucosyltransferase [Oryza sativa
  misc_feature (1)..(11): Homolog of NCBI NO: 34393982 NR Description: putative UDP-glucosyltransferase [Oryza sativa
  misc_feature (44)..(291): Homolog of NCBI NO: 21435782 NR Description: UDP-glucosyltransferase [Stevia rebaudiana]
  misc_feature (28)..(295): Homolog of NCBI NO: 34908562 NR Description: putative anthocyanidine rhamnosyl-transferase
MADVASEHKVPCILNMPYSSATTEDFGIPDPSVLPMFRPFVETFKRCKVIAARSSFELEPESLPLMTKILGKPVIPVGLLPPAPAGGNTQRDDSAALSWLDEQPSKSVVYVAFGSEYPMTVKQLHEIARGLELAGTRFLWALKRPSVAHPDEDLLPPGFEERTRGRGSVVTGWVPQTSILGHGAVAAFMMHCGWGSTIEALQYGHPLVMMPVLVDHLSTARVMEQRKVGVKVRKEKSDEAFLGDNIATAIRAVMCEEESKRIFVANAKRMQEIVADDECHKRYIDEFVQSLRTYKN

SEQ ID NO: 11022 - protein, 281 aa, Zea mays subsp. mays
  peptide (1)..(281): Ceres Seq. ID no. 12341061
  misc_feature (30)..(276): Pfam Name: UDP-glucoronosyl and UDP-glucosyl transferase Pfam Description: UDP-glucoronosyl and UDP-glucosyl transferase
  misc_feature (30)..(276): Homolog of NCBI NO: 37530678 NR Description: putative anthocyanidin-3-glucoside
  misc_feature (32)..(280): Homolog of NCBI NO: 34393978 NR Description: putative UDP-glucosyltransferase [Oryza sativa
  misc_feature (30)..(277): Homolog of NCBI NO: 34393985 NR Description: putative UDP-glucosyltransferase [Oryza sativa
  misc_feature (1)..(12): Homolog of NCBI NO: 34393985 NR Description: putative UDP-glucosyltransferase [Oryza sativa
  misc_feature (27)..(280): Homolog of NCBI NO: 34393982 NR Description: putative UDP-glucosyltransferase [Oryza sativa
  misc_feature (29)..(276): Homolog of NCBI NO: 21435782 NR Description: UDP-glucosyltransferase [Stevia rebaudiana]
  misc_feature (13)..(280): Homolog of NCBI NO: 34908562 NR Description: putative anthocyanidine rhamnosyl-transferase
  misc_feature (1)..(12): Homolog of NCBI NO: 34908562 NR Description: putative anthocyanidine rhamnosyl-transferase
  misc_feature (32)..(278): Homolog of NCBI NO: 15450577 NR Description: At2g22590/T9I22.3 [Arabidopsis thaliana]
  misc_feature (32)..(278): Homolog of NCBI NO: 18400022 NR Description: putative anthocyanidin-3-glucoside protein id: At2g22590.1, supported by cDNA: gi_15450576, by cDNA: gi_17380625 [Arabidopsis thaliana]
MPYSSATTEDFGIPDPSVLPMFRPFVETFKRCKVIAARSSFELEPESLPLMTKILGKPVIPVGLLPPAPAGGNTQRDDSAALSWLDEQPSKSVVYVAFGSEYPMTVKQLHEIARGLELAGTRFLWALKRPSVAHPDEDLLPPGFEERTRGRGSVVTGWVPQTSILGHGAVAAFMMHCGWGSTIEALQYGHPLVMMPVLVDHLSTARVMEQRKVGVKVRKEKSDEAFLGDNIATAIRAVMCEEESKRIFVANAKRMQEIVADDECHKRYIDEFVQSLRTYKN

SEQ ID NO: 11023 - DNA, 1408 bp, Zea mays subsp. mays
  misc_feature (1)..(1408): Ceres Seq. ID no. 12383163
  misc_feature: MA Experiment ID: 108559 Result: Up-regulated in Transcription
  misc_feature: MA Experiment 108559 PARAMETER Experiment Name: Zm_5mM_NO_P Parameter: Age (day) Value: 8
  misc_feature: MA Experiment 108559 PARAMETER Experiment Name: Zm_5mM_NO_P Parameter: Organism Value: Zea mays
  misc_feature: MA Experiment 108559 PARAMETER Experiment Name: Zm_5mM_NO_P Parameter: Plant Line Value: 35A19
  misc_feature: MA Experiment 108559 PARAMETER Experiment Name: Zm_5mM_NO_P Parameter: Timepoint (hr) Value: 12
  misc_feature: MA Experiment 108559 PARAMETER Experiment Name: Zm_5mM_NO_P Parameter: Tissue Value: Aerial
  misc_feature: MA Experiment 108559 PARAMETER Experiment Name: Zm_5mM_NO_P Parameter: Treatment Value: 5mM NO vs. No Treatment
gcacgagaccattacctagaacatcctaatcgaaaaaagaacagtagaccaaagacaaaggaactaaggaaggcgagggccaccatccccaaaacccgtaaaaaaacccgaattgacaaattgagtcgacggggaaggaaataaagaaggggaagagcacgcgccgccgccagcaccgcgtccgccatggccgcctcctcccgccgcgcgtctcaattgctggggtccgcggcctcccgcctcctcatcgggcggggcttcgccgcggcagccgccgcgccctcgccggcggtcttcgtcgacaagagcacccgtgtgatctgccagggcatcacggggaagaacggcaccttccacaccgagcaggccatcgagtacggcaccaacatggttggtggagtgactcctaagaaaggtggaactgaacatttagggctcccagtgtttaactctgtagcagaagctaaggctgaaacaaaagctaatgcatctgttatatatgttccaccaccatttgctgccgccgctataatggagtcaatggaggctgagctcgaccttgttgtctgcattacggaaggaattccccagcatgacatggtgaaagtgaaggctgcactaaatagacaatctaaaactcgattgattgggccaaattgccctggtatcattaagcctggtgagtgtaaaattggaatcatgccaggttacatccacaagcctgggcgtattgggattgtatctcgttctggtaccttgacatatgaagcggtgtttcaaacaacagctgtaggcttggggcagtcaacttgtgtaggcattggtggtgacccattcaatggcacaaattttgttgattgccttgaaaaatttgtcgatgaccctcagacagaaggcattgttctcattggtgaaattggaggtacggctgaggaggatgctgcaacgttcatccaggaaagcaaaacacaaaagcctgttgttgcattcattgctggacttacggcacccccaggccgtcgcatgggtcatgctggagctatcgtggcaggaggaaagggtactgcccaggacaaaatcaaggcactcagagaggctggtgttaccgttgtcgagtcaccagcgaagattggttctaccatgtttgaaatcttcaaacagcgtggaatggtagaatagacagtggtacatagagagacattgagaaaccgctttttgatgcttgcgggcaatcgcgagcaattcctcggtagatccgtctccctggccacaaacaaaactactgaggttttcttttcgtacgtgtcttatctttggaagatggcctggccttcttcacttggataacctttcgatgagctcgtttcaataagacgtttcggagccatggaaatgctatgtcgcttgg

SEQ ID NO: 11024 - protein, 330 aa, Zea mays subsp. mays
  peptide (1)..(330): Ceres Seq. ID no. 12383164
  misc_feature (37)..(148): Pfam Name: CoA binding domain Pfam Description: CoA binding domain
  misc_feature (1)..(330): Homolog of NCBI NO: 34393512 NR Description: putative succinyl-CoA ligase alpha subunit [Oryza
  misc_feature (30)..(329): Homolog of NCBI NO: 27357175 NR Description: succinyl-CoA ligase alpha subunit [Lycopersicon
  misc_feature (1)..(330): Homolog of NCBI NO: 15241592 NR Description: succinyl-CoA-ligase alpha subunit; protein id: supported by cDNA: 10292., supported by cDNA: gi_18252214
  misc_feature (19)..(330): Homolog of NCBI NO: 15237260 NR Description: succinyl-CoA synthetase, alpha subunit; protein At5g23250.1, supported by cDNA: 39462., supported by cDNA:
  misc_feature (19)..(330): Homolog of NCBI NO: 21593483 NR Description: succinyl-CoA synthetase, alpha subunit
  misc_feature (36)..(330): Homolog of NCBI NO: 1076415 NR Description: succinate-CoA ligase (GDP-forming) (EC 6.2.1.4)
  misc_feature (20)..(319): Homolog of NCBI NO: 1711574 NR Description: SUCCINYL-COA LIGASE [GDP-FORMING] ALPHA-CHAIN,
  misc_feature (1)..(329): Homolog of NCBI NO: 2258465 NR Description: succinyl-CoA synthetase alpha subunit [Sus scrofa]
  misc_feature (36)..(329): Homolog of NCBI NO: 38181885 NR Description: Suclg1 protein [Rattus norvegicus]
  misc_feature (36)..(329): Homolog of NCBI NO: 4104377 NR Description: ATP-specific succinyl-CoA synthetase alpha
MAASSRRASQLLGSAASRLLIGRGFAAAAAAPSPAVFVDKSTRVICQGITGKNGTFHTEQAIEYGTNMVGGVTPKKGGTEHLGLPVFNSVAEAKAETKANASVIYVPPPFAAAAIMESMEAELDLVVCITEGIPQHDMVKVKAALNRQSKTRLIGPNCPGIIKPGECKIGIMPGYIHKPGRIGIVSRSGTLTYEAVFQTTAVGLGQSTCVGIGGDPFNGTNFVDCLEKFVDDPQTEGIVLIGEIGGTAEEDAATFIQESKTQKPVVAFIAGLTAPPGRRMGHAGAIVAGGKGTAQDKIKALREAGVTVVESPAKIGSTMFEIFKQRGMVE

SEQ ID NO: 11025 - protein, 263 aa, Zea mays subsp. mays
  peptide (1)..(263): Ceres Seq. ID no. 12383165
  misc_feature (1)..(81): Pfam Name: CoA binding domain Pfam Description: CoA binding domain
  misc_feature (1)..(263): Homolog of NCBI NO: 34393512 NR Description: putative succinyl-CoA ligase alpha subunit [Oryza
  misc_feature (1)..(262): Homolog of NCBI NO: 27357175 NR Description: succinyl-CoA ligase alpha subunit [Lycopersicon
  misc_feature (1)..(263): Homolog of NCBI NO: 15241592 NR Description: succinyl-CoA-ligase alpha subunit; protein id: supported by cDNA: 10292., supported by cDNA: gi_18252214
  misc_feature (1)..(263): Homolog of NCBI NO: 15237260 NR Description: succinyl-CoA synthetase, alpha subunit; protein At5g23250.1, supported by cDNA: 39462., supported by cDNA:
  misc_feature (1)..(263): Homolog of NCBI NO: 21593483 NR Description: succinyl-CoA synthetase, alpha subunit
  misc_feature (1)..(263): Homolog of NCBI NO: 1076415 NR Description: succinate-CoA ligase (GDP-forming) (EC 6.2.1.4)
  misc_feature (1)..(252): Homolog of NCBI NO: 1711574 NR Description: SUCCINYL-COA LIGASE [GDP-FORMING] ALPHA-CHAIN,
  misc_feature (1)..(262): Homolog of NCBI NO: 2258465 NR Description: succinyl-CoA synthetase alpha subunit [Sus scrofa]
  misc_feature (1)..(262): Homolog of NCBI NO: 38181885 NR Description: Suclg1 protein [Rattus norvegicus]
  misc_feature (1)..(262): Homolog of NCBI NO: 4104377 NR Description: ATP-specific succinyl-CoA synthetase alpha
MVGGVTPKKGGTEHLGLPVFNSVAEAKAETKANASVIYVPPPFAAAAIMESMEAELDLVVCITEGIPQHDMVKVKAALNRQSKTRLIGPNCPGIIKPGECKIGIMPGYIHKPGRIGIVSRSGTLTYEAVFQTTAVGLGQSTCVGIGGDPFNGTNFVDCLEKFVDDPQTEGIVLIGEIGGTAEEDAATFIQESKTQKPVVAFIAGLTAPPGRRMGHAGAIVAGGKGTAQDKIKALREAGVTVVESPAKIGSTMFEIFKQRGMVE

SEQ ID NO: 11026 - protein, 215 aa, Zea mays subsp. mays
  peptide (1)..(215): Ceres Seq. ID no. 12383166
  misc_feature (1)..(215): Homolog of NCBI NO: 34393512 NR Description: putative succinyl-CoA ligase alpha subunit [Oryza
  misc_feature (1)..(214): Homolog of NCBI NO: 27357175 NR Description: succinyl-CoA ligase alpha subunit [Lycopersicon
  misc_feature (1)..(215): Homolog of NCBI NO: 15241592 NR Description: succinyl-CoA-ligase alpha subunit; protein id: supported by cDNA: 10292., supported by cDNA: gi_18252214
  misc_feature (1)..(215): Homolog of NCBI NO: 15237260 NR Description: succinyl-CoA synthetase, alpha subunit; protein At5g23250.1, supported by cDNA: 39462., supported by cDNA:
  misc_feature (1)..(215): Homolog of NCBI NO: 21593483 NR Description: succinyl-CoA synthetase, alpha subunit
  misc_feature (1)..(215): Homolog of NCBI NO: 1076415 NR Description: succinate-CoA ligase (GDP-forming) (EC 6.2.1.4)
  misc_feature (1)..(204): Homolog of NCBI NO: 1711574 NR Description: SUCCINYL-COA LIGASE [GDP-FORMING] ALPHA-CHAIN,
  misc_feature (1)..(214): Homolog of NCBI NO: 2258465 NR Description: succinyl-CoA synthetase alpha subunit [Sus scrofa]
  misc_feature (1)..(214): Homolog of NCBI NO: 38181885 NR Description: Suclg1 protein [Rattus norvegicus]
  misc_feature (1)..(214): Homolog of NCBI NO: 4104377 NR Description: ATP-specific succinyl-CoA synthetase alpha
MESMEAELDLVVCITEGIPQHDMVKVKAALNRQSKTRLIGPNCPGIIKPGECKIGIMPGYIHKPGRIGIVSRSGTLTYEAVFQTTAVGLGQSTCVGIGGDPFNGTNFVDCLEKFVDDPQTEGIVLIGEIGGTAEEDAATFIQESKTQKPVVAFIAGLTAPPGRRMGHAGAIVAGGKGTAQDKIKALREAGVTVVESPAKIGSTMFEIFKQRGMVE

SEQ ID NO: 11027 - DNA, 1680 bp, Zea mays subsp. mays
  misc_feature (1)..(1680): Ceres Seq. ID no. 12351340
  misc_feature: MA Experiment ID: 108559 Result: Up-regulated in Transcription
  misc_feature: MA Experiment 108559 PARAMETER Experiment Name: Zm_5mM_NO_P Parameter: Age (day) Value: 8
  misc_feature: MA Experiment 108559 PARAMETER Experiment Name: Zm_5mM_NO_P Parameter: Organism Value: Zea mays
  misc_feature: MA Experiment 108559 PARAMETER Experiment Name: Zm_5mM_NO_P Parameter: Plant Line Value: 35A19
  misc_feature: MA Experiment 108559 PARAMETER Experiment Name: Zm_5mM_NO_P Parameter: Timepoint (hr) Value: 12
  misc_feature: MA Experiment 108559 PARAMETER Experiment Name: Zm_5mM_NO_P Parameter: Tissue Value: Aerial
  misc_feature: MA Experiment 108559 PARAMETER Experiment Name: Zm_5mM_NO_P Parameter: Treatment Value: 5mM NO vs. No Treatment
ggcccaccaacctgttcatcgatcttctttcttctcaagaaaagaaaacaaaccgcttgtttgcccttccgactacgtctctccctgactcggcttctctttttcggcggcgacggctggtcgagttgcggcgctctgttcagtgttcattgtgcccttcgccacgacgattatcctccagtagtaagtcaccatgtcttcgtccatgcaatcttcataccttcctgctaccactgagtccgtagccaaggctcaggaggccaaggacgcttctgagtccatctcaatcctctaccacgtgcttgaggatccctcttcatctgcggatgcactgagagtaaaagagcttgccatcacgaatctcacaaactacctcacaaaagagaacagagctgaagacctcaggaaccttttgacccagctcaggcccttttttgcattgatccccaaggcgaagactgcgaagattgtgcgtggcatcattgatgccgttgccaaggtgcctggaacatctcagcttcagatctcactgtgcaaggagatggtagaatggacccgtgcagagaagcgaaccttcctcaggcagcgtgtggaagcaaggctggcagcccttctgttggagaatcaggagtatactgaggctcttacactcctttctggactcatcaaggaagttaggaggctggatgacaagttgcttcttgtggacatcgaccttttggagagcaagctccatttctctctgagaaaccttccaaaggccaaagcttctctgactgctgccagaactgcagccaatgccatttatgtgccgccatctcagcagggcacaattgatctgcagagtgggatccttcatgctgaagagaaggattacaagactgcttacagctacttcttcgaagcatttgaagctttcagttcactggaagatcccaaggctatcttcagcttgaagtacatgcttctgtgcaagataatggtcaaccaagctgatgatgttgcaggaatcatctcatcgaaggctggcctcaagtatctgggtcctgatgttgatgctatgaaagctgtggccgatgcctactccaaaaggtctctgaagtacttcgaaactgctctccgtgattacaaagctcagctggaagaagatcctattgtccacaggcacctttcctcgctgtatgacactctcttggagcagaacctctgcaggctgattgagccctactcaagggtggagattgctcacatagcagagatgattgagctgccaatgaaccatgttgagaagaagctgtcccagatgatcctcgacaagaaattcgcagggacacttgatcaaggcgctggctgcctcatcatcttcgaggacagcaagactgaggagatcttccctgccacacttgaaacgatcacgaatgttggcaaggttgtggacagcctgtacatgagatcggccaagatcatggcctgaaagatgcagtgggaggcctaggtgtcgtcagcttcttttcttggtctattgtcagttcagttaaccaaactttagctgtccaagagacatcttattgtggatttttttttatttgtggttttgggtggcagactgtttgcgttacaatttggtcatgttgctcatgaatactcatgtttctgtttgatggaagtactgttaaggct

SEQ ID NO: 11028 - protein, 426 aa, Zea mays subsp. mays
  peptide (1)..(426): Ceres Seq. ID no. 12351341
  misc_feature (288)..(392): Pfam Name: PCI domain Pfam Description: PCI domain
  misc_feature (12)..(419): Homolog of NCBI NO: 25332510 NR Description: 19S proteosome subunit 9 [imported] - Arabidopsis >gi|3450889|gb|AAC34120.1| 19S proteosome subunit 9 [Arabidopsis
  misc_feature (117)..(426): Homolog of NCBI NO: 38093742 NR Description: putative proteosome subunit [Oryza sativa
  misc_feature (21)..(424): Homolog of NCBI NO: 17137740 NR Description: Proteasome p44.5 subunit CG10149-PB [Drosophila
  misc_feature (18)..(424): Homolog of NCBI NO: 26342168 NR Description: unnamed protein product [Mus musculus]
  misc_feature (3)..(426): Homolog of NCBI NO: 38344536 NR Description: OSJNBa0027P08.4 [Oryza sativa (japonica
  misc_feature (12)..(426): Homolog of NCBI NO: 15218845 NR Description: 26S proteasome regulatory subunit (RPN6), protein id: At1g29150.1, supported by cDNA: 39755., supported by gi_15810544, supported by cDNA: gi_3450888 [Arabidopsis thaliana]
  misc_feature (18)..(424): Homolog of NCBI NO: 33585718 NR Description: Unknown (protein for IMAGE:3964625) [Mus musculus]
  misc_feature (18)..(424): Homolog of NCBI NO: 2150046 NR Description: 26S proteasome subunit 9 [Homo sapiens]
  misc_feature (18)..(424): Homolog of NCBI NO: 28872725 NR Description: proteasome 26S non-ATPase subunit 11; 26S regulatory subunit 9 [Homo sapiens]
  misc_feature (18)..(424): Homolog of NCBI NO: 34872897 NR Description: similar to 26S proteasome non-ATPase regulatory
MSSSMQSSYLPATTESVAKAQEAKDASESISILYHVLEDPSSSADALRVKELAITNLTNYLTKENRAEDLRNLLTQLRPFFALIPKAKTAKIVRGIIDAVAKVPGTSQLQISLCKEMVEWTRAEKRTFLRQRVEARLAALLLENQEYTEALTLLSGLIKEVRRLDDKLLLVDIDLLESKLHFSLRNLPKAKASLTAARTAANAIYVPPSQQGTIDLQSGILHAEEKDYKTAYSYFFEAFEAFSSLEDPKAIFSLKYMLLCKIMVNQADDVAGIISSKAGLKYLGPDVDAMKAVADAYSKRSLKYFETALRDYKAQLEEDPIVHRHLSSLYDTLLEQNLCRLIEPYSRVEIAHIAEMIELPMNHVEKKLSQMILDKKFAGTLDQGAGCLIIFEDSKTEEIFPATLETITNVGKVVDSLYMRSAKIMA

SEQ ID NO: 11029 - protein, 422 aa, Zea mays subsp. mays
  peptide (1)..(422): Ceres Seq. ID no. 12351342
  misc_feature (284)..(388): Pfam Name: PCI domain Pfam Description: PCI domain
  misc_feature (1)..(422): Homolog of NCBI NO: 38344536 NR Description: OSJNBa0027P08.4 [Oryza sativa (japonica
  misc_feature (8)..(422): Homolog of NCBI NO: 15218845 NR Description: 26S proteasome regulatory subunit (RPN6), protein id: At1g29150.1, supported by cDNA: 39755., supported by gi_15810544, supported by cDNA: gi_3450888 [Arabidopsis thaliana]
  misc_feature (8)..(415): Homolog of NCBI NO: 25332510 NR Description: 19S proteosome subunit 9 [imported] - Arabidopsis >gi|3450889|gb|AAC34120.1| 19S proteosome subunit 9 [Arabidopsis
  misc_feature (113)..(422): Homolog of NCBI NO: 38093742 NR Description: putative proteosome subunit [Oryza sativa
  misc_feature (17)..(420): Homolog of NCBI NO: 17137740 NR Description: Proteasome p44.5 subunit CG10149-PB [Drosophila
  misc_feature (14)..(420): Homolog of NCBI NO: 26342168 NR Description: unnamed protein product [Mus musculus]
  misc_feature (14)..(420): Homolog of NCBI NO: 33585718 NR Description: Unknown (protein for IMAGE:3964625) [Mus musculus]
  misc_feature (14)..(420): Homolog of NCBI NO: 2150046 NR Description: 26S proteasome subunit 9 [Homo sapiens]
  misc_feature (14)..(420): Homolog of NCBI NO: 28872725 NR Description: proteasome 26S non-ATPase subunit 11; 26S regulatory subunit 9 [Homo sapiens]
  misc_feature (14)..(420): Homolog of NCBI NO: 34872897 NR Description: similar to 26S proteasome non-ATPase regulatory
MQSSYLPATTESVAKAQEAKDASESISILYHVLEDPSSSADALRVKELAITNLTNYLTKENRAEDLRNLLTQLRPFFALIPKAKTAKIVRGIIDAVAKVPGTSQLQISLCKEMVEWTRAEKRTFLRQRVEARLAALLLENQEYTEALTLLSGLIKEVRRLDDKLLLVDIDLLESKLHFSLRNLPKAKASLTAARTAANAIYVPPSQQGTIDLQSGILHAEEKDYKTAYSYFFEAFEAFSSLEDPKAIFSLKYMLLCKIMVNQADDVAGIISSKAGLKYLGPDVDAMKAVADAYSKRSLKYFETALRDYKAQLEEDPIVHRHLSSLYDTLLEQNLCRLIEPYSRVEIAHIAEMIELPMNHVEKKLSQMILDKKFAGTLDQGAGCLIIFEDSKTEEIFPATLETITNVGKVVDSLYMRSAKIMA

SEQ ID NO: 11030 - protein, 310 aa, Zea mays subsp. mays
  peptide (1)..(310): Ceres Seq. ID no. 12351343
  misc_feature (172)..(276): Pfam Name: PCI domain Pfam Description: PCI domain
  misc_feature (1)..(310): Homolog of NCBI NO: 38344536 NR Description: OSJNBa0027P08.4 [Oryza sativa (japonica
  misc_feature (1)..(310): Homolog of NCBI NO: 15218845 NR Description: 26S proteasome regulatory subunit (RPN6), protein id: At1g29150.1, supported by cDNA: 39755., supported by gi_15810544, supported by cDNA: gi_3450888 [Arabidopsis thaliana]
  misc_feature (1)..(303): Homolog of NCBI NO: 25332510 NR Description: 19S proteosome subunit 9 [imported] - Arabidopsis >gi|3450889|gb|AAC34120.1| 19S proteosome subunit 9 [Arabidopsis
  misc_feature (1)..(310): Homolog of NCBI NO: 38093742 NR Description: putative proteosome subunit [Oryza sativa
  misc_feature (1)..(308): Homolog of NCBI NO: 17137740 NR Description: Proteasome p44.5 subunit CG10149-PB [Drosophila
  misc_feature (1)..(308): Homolog of NCBI NO: 26342168 NR Description: unnamed protein product [Mus musculus]
  misc_feature (1)..(308): Homolog of NCBI NO: 33585718 NR Description: Unknown (protein for IMAGE:3964625) [Mus musculus]
  misc_feature (1)..(308): Homolog of NCBI NO: 2150046 NR Description: 26S proteasome subunit 9 [Homo sapiens]
  misc_feature (1)..(308): Homolog of NCBI NO: 28872725 NR Description: proteasome 26S non-ATPase subunit 11; 26S regulatory subunit 9 [Homo sapiens]
  misc_feature (1)..(308): Homolog of NCBI NO: 34872897 NR Description: similar to 26S proteasome non-ATPase regulatory
MVEWTRAEKRTFLRQRVEARLAALLLENQEYTEALTLLSGLIKEVRRLDDKLLLVDIDLLESKLHFSLRNLPKAKASLTAARTAANAIYVPPSQQGTIDLQSGILHAEEKDYKTAYSYFFEAFEAFSSLEDPKAIFSLKYMLLCKIMVNQADDVAGIISSKAGLKYLGPDVDAMKAVADAYSKRSLKYFETALRDYKAQLEEDPIVHRHLSSLYDTLLEQNLCRLIEPYSRVEIAHIAEMIELPMNHVEKKLSQMILDKKFAGTLDQGAGCLIIFEDSKTEEIFPATLETITNVGKVVDSLYMRSAKIMA

SEQ ID NO: 11031 - DNA, 1686 bp, Zea mays subsp. mays
  misc_feature (1)..(1686): Ceres Seq. ID no. 12406705
  misc_feature: MA Experiment ID: 108535 Result: Up-regulated in Transcription
  misc_feature: MA Experiment 108535 PARAMETER Experiment Name: Zm_Meristem_P Parameter: Age (day) Value: 8
  misc_feature: MA Experiment 108535 PARAMETER Experiment Name: Zm_Meristem_P Parameter: Organism Value: Zea mays
  misc_feature: MA Experiment 108535 PARAMETER Experiment Name: Zm_Meristem_P Parameter: Plant Line Value: 35A19
  misc_feature: MA Experiment 108535 PARAMETER Experiment Name: Zm_Meristem_P Parameter: Tissue Value: Root Meristem vs. Above Root Meristem
  misc_feature: MA Experiment ID: 108556 Result: Down-regulated in Transcription
  misc_feature: MA Experiment 108556 PARAMETER Experiment Name: Zm_Drought_P Parameter: Age (day) Value: 9
  misc_feature: MA Experiment 108556 PARAMETER Experiment Name: Zm_Drought_P Parameter: Organism Value: Zea mays
  misc_feature: MA Experiment 108556 PARAMETER Experiment Name: Zm_Drought_P Parameter: Plant Line Value: 35A19
  misc_feature: MA Experiment 108556 PARAMETER Experiment Name: Zm_Drought_P Parameter: Timepoint (hr) Value: 24
  misc_feature: MA Experiment 108556 PARAMETER Experiment Name: Zm_Drought_P Parameter: Tissue Value: Aerial
  misc_feature: MA Experiment 108556 PARAMETER Experiment Name: Zm_Drought_P Parameter: Treatment Value: Drought vs. No Drought
  misc_feature: MA Experiment ID: 20000487 Result: Up-regulated in Transcription
  misc_feature: MA Experiment 20000487 PARAMETER Experiment Name: Zm_50mM_NH4NO3_L_to_H_P Parameter: Organism Value: Zea mays
  misc_feature: MA Experiment 20000487 PARAMETER Experiment Name: Zm_50mM_NH4NO3_L_to_H_P Parameter: Timepoint (hr) Value: 4
  misc_feature: MA Experiment 20000487 PARAMETER Experiment Name: Zm_50mM_NH4NO3_L_to_H_P Parameter: Tissue Value: Leaves
  misc_feature: MA Experiment 20000487 PARAMETER Experiment Name: Zm_50mM_NH4NO3_L_to_H_P Parameter: Treatment Value: 50mM NH4NO3 vs. 100mM Mannitol
aaggtatcaccacgttcactgtcgctcgacctctgttcttgagctgcttcatgcgatagcgactggaccaaagttgtactctgctgcctccccgtgcctttagtgattcggtcctcgggtttgcgtgcaatttttaatcttcgcctccagccatgggtaaggagaagtctcacatcaacattgtggttattggccacgtcgactctggcaagtcgacaaccaccggccacctgatctacaagcttggaggcattgacaagcgtgtgatcgagaggtttgagaaggaggccgctgaaatgaacaagcggtcctttaagtatgcttgggtgcttgacaagctcaaggctgagcgtgagaggggtatcaccattgatattgctctgtggaagtttgagaccaccaagtactattgcaccgttattgatgcccctggacaccgtgactttatcaagaacatgatcactggtacctcccaggctgactgtgctgtccttatcattgactccaccactggtggttttgaggctggtatctccaaggatggccagacacgtgagcatgctctccttgcgttcacacttggagtgaagcagatgatttgctgctgcaacaagatggatgcaaccactcccaaatactccaaggcacgttatgatgagattgtgaaggaagtctcatcttacctcaagaaagttgggtacaaccctgataagatagcatttgttcccatctctggttttgagggtgacaacatgattgagaggtccaccaaccttgactggtacaaaggcccaaccctgcttgaggctcttgaccagatcaccgagcccaagagaccctcggacaagcccctgcgtctccccctccaggatgtgtacaagattggtggtattggaactgtgccagttggtcgtgtggagactggtgtcatcaagcctggtatggttgtcacctttggtccaactggcctgactactgaggtgaagtctgttgagatgcaccatgaggctcttcaggaggcccttcctggtgacaatgttggcttcaacgtgaagaacgtcgctgtgaaggatatcaagcgtggttatgtggcctccaactccaaggatgaccctgccaaggaggctgccagcttcacctcccaggtcatcatcatgaaccaccctgggcagatcggtaacggttatgccccagtgctggactgccacacctcccatattgctgtcaagtttgctgagctcattaccaagatcgacaggcgttctggcaaggagcttgagaaagagcccaagttcttgaagaacggtgatgctggtatggtgaagatgattcccaccaagcccatggtggtggagacattctcgcagtatcctcccctgggtaggtttgctgtccgtgacatgagacagacggttgctgttggagtcatcaagagtgtggagaagaaggacccgaccggtgccaaggtgaccaaggctgctgccaagaagaaatgatgcgacctgtcgttgatgcagcgtctgcttttccaatacgtagctgagatgttccattttgacataagttttgtatgctgtggttgctgtttaccttgtgaactgttgagctctactattgggtgtccgtttatctgtttatgtagcatcttgttatttcacctattgcaatacaagaatgctatatgac

SEQ ID NO: 11032 - protein, 447 aa, Zea mays subsp. mays
  peptide (1)..(447): Ceres Seq. ID no. 12406706
  misc_feature (5)..(227): Pfam Name: Elongation factor Tu GTP binding domain Pfam Description: Elongation factor Tu GTP binding domain
  misc_feature (1)..(447): Homolog of NCBI NO: 7230387 NR Description: elongation factor 1 alpha [Zea mays]
  misc_feature (1)..(447): Homolog of NCBI NO: 7230385 NR Description: elongation factor 1 alpha [Zea mays]
  misc_feature (1)..(447): Homolog of NCBI NO: 2282584 NR Description: elongation factor 1-alpha [Zea mays]
  misc_feature (1)..(447): Homolog of NCBI NO: 2662341 NR Description: EF-1 alpha [Oryza sativa]
  misc_feature (1)..(447): Homolog of NCBI NO: 3122071 NR Description: ELONGATION FACTOR 1-ALPHA (EF-1-ALPHA)
  misc_feature (1)..(447): Homolog of NCBI NO: 7230397 NR Description: elongation factor 1 alpha [Zea mays]
  misc_feature (1)..(447): Homolog of NCBI NO: 2662343 NR Description: EF-1 alpha [Oryza sativa]
  misc_feature (1)..(447): Homolog of NCBI NO: 6015059 NR Description: ELONGATION FACTOR 1-ALPHA (EF-1-ALPHA)
  misc_feature (1)..(447): Homolog of NCBI NO: 9802384 NR Description: elongation factor [Saccharum officinarum]
  misc_feature (1)..(447): Homolog of NCBI NO: 18873725 NR Description: elongation factor 1 alpha [Saccharum hybrid
MGKEKSHINIVVIGHVDSGKSTTTGHLIYKLGGIDKRVIERFEKEAAEMNKRSFKYAWVLDKLKAERERGITIDIALWKFETTKYYCTVIDAPGHRDFIKNMITGTSQADCAVLIIDSTTGGFEAGISKDGQTREHALLAFTLGVKQMICCCNKMDATTPKYSKARYDEIVKEVSSYLKKVGYNPDKIAFVPISGFEGDNMIERSTNLDWYKGPTLLEALDQITEPKRPSDKPLRLPLQDVYKIGGIGTVPVGRVETGVIKPGMVVTFGPTGLTTEVKSVEMHHEALQEALPGDNVGFNVKNVAVKDIKRGYVASNSKDDPAKEAASFTSQVIIMNHPGQIGNGYAPVLDCHTSHIAVKFAELITKIDRRSGKELEKEPKFLKNGDAGMVKMIPTKPMVVETFSQYPPLGRFAVRDMRQTVAVGVIKSVEKKDPTGAKVTKAAAKKK

SEQ ID NO: 11033 - protein, 399 aa, Zea mays subsp. mays
  peptide (1)..(399): Ceres Seq. ID no. 12406707
  misc_feature (1)..(179): Pfam Name: Elongation factor Tu GTP binding domain Pfam Description: Elongation factor Tu GTP binding domain
  misc_feature (1)..(399): Homolog of NCBI NO: 7230387 NR Description: elongation factor 1 alpha [Zea mays]
  misc_feature (1)..(399): Homolog of NCBI NO: 7230385 NR Description: elongation factor 1 alpha [Zea mays]
  misc_feature (1)..(399): Homolog of NCBI NO: 2282584 NR Description: elongation factor 1-alpha [Zea mays]
  misc_feature (1)..(399): Homolog of NCBI NO: 2662341 NR Description: EF-1 alpha [Oryza sativa]
  misc_feature (1)..(399): Homolog of NCBI NO: 3122071 NR Description: ELONGATION FACTOR 1-ALPHA (EF-1-ALPHA)
  misc_feature (1)..(399): Homolog of NCBI NO: 7230397 NR Description: elongation factor 1 alpha [Zea mays]
  misc_feature (1)..(399): Homolog of NCBI NO: 2662343 NR Description: EF-1 alpha [Oryza sativa]
  misc_feature (1)..(399): Homolog of NCBI NO: 6015059 NR Description: ELONGATION FACTOR 1-ALPHA (EF-1-ALPHA)
  misc_feature (1)..(399): Homolog of NCBI NO: 9802384 NR Description: elongation factor [Saccharum officinarum]
  misc_feature (1)..(399): Homolog of NCBI NO: 18873725 NR Description: elongation factor 1 alpha [Saccharum hybrid
MNKRSFKYAWVLDKLKAERERGITIDIALWKFETTKYYCTVIDAPGHRDFIKNMITGTSQADCAVLIIDSTTGGFEAGISKDGQTREHALLAFTLGVKQMICCCNKMDATTPKYSKARYDEIVKEVSSYLKKVGYNPDKIAFVPISGFEGDNMIERSTNLDWYKGPTLLEALDQITEPKRPSDKPLRLPLQDVYKIGGIGTVPVGRVETGVIKPGMVVTFGPTGLTTEVKSVEMHHEALQEALPGDNVGFNVKNVAVKDIKRGYVASNSKDDPAKEAASFTSQVIIMNHPGQIGNGYAPVLDCHTSHIAVKFAELITKIDRRSGKELEKEPKFLKNGDAGMVKMIPTKPMVVETFSQYPPLGRFAVRDMRQTVAVGVIKSVEKKDPTGAKVTKAAAKKK

SEQ ID NO: 11034 - protein, 346 aa, Zea mays subsp. mays
  peptide (1)..(346): Ceres Seq. ID no. 12406708
  misc_feature (1)..(126): Pfam Name: Elongation factor Tu GTP binding domain Pfam Description: Elongation factor Tu GTP binding domain
  misc_feature (1)..(346): Homolog of NCBI NO: 7230387 NR Description: elongation factor 1 alpha [Zea mays]
  misc_feature (1)..(346): Homolog of NCBI NO: 7230385 NR Description: elongation factor 1 alpha [Zea mays]
  misc_feature (1)..(346): Homolog of NCBI NO: 2282584 NR Description: elongation factor 1-alpha [Zea mays]
  misc_feature (1)..(346): Homolog of NCBI NO: 2662341 NR Description: EF-1 alpha [Oryza sativa]
  misc_feature (1)..(346): Homolog of NCBI NO: 3122071 NR Description: ELONGATION FACTOR 1-ALPHA (EF-1-ALPHA)
  misc_feature (1)..(346): Homolog of NCBI NO: 7230397 NR Description: elongation factor 1 alpha [Zea mays]
  misc_feature (1)..(346): Homolog of NCBI NO: 2662343 NR Description: EF-1 alpha [Oryza sativa]
  misc_feature (1)..(346): Homolog of NCBI NO: 6015059 NR Description: ELONGATION FACTOR 1-ALPHA (EF-1-ALPHA)
  misc_feature (1)..(346): Homolog of NCBI NO: 9802384 NR Description: elongation factor [Saccharum officinarum]
  misc_feature (1)..(346): Homolog of NCBI NO: 18873725 NR Description: elongation factor 1 alpha [Saccharum hybrid
MITGTSQADCAVLIIDSTTGGFEAGISKDGQTREHALLAFTLGVKQMICCCNKMDATTPKYSKARYDEIVKEVSSYLKKVGYNPDKIAFVPISGFEGDNMIERSTNLDWYKGPTLLEALDQITEPKRPSDKPLRLPLQDVYKIGGIGTVPVGRVETGVIKPGMVVTFGPTGLTTEVKSVEMHHEALQEALPGDNVGFNVKNVAVKDIKRGYVASNSKDDPAKEAASFTSQVIIMNHPGQIGNGYAPVLDCHTSHIAVKFAELITKIDRRSGKELEKEPKFLKNGDAGMVKMIPTKPMVVETFSQYPPLGRFAVRDMRQTVAVGVIKSVEKKDPTGAKVTKAAAKKK

SEQ ID NO: 11035 - DNA, 1318 bp, Zea mays subsp. mays
  misc_feature (1)..(1318): Ceres Seq. ID no. 12406702
  misc_feature: MA Experiment ID: 108504 Result: Down-regulated in Transcription
  misc_feature: MA Experiment 108504 PARAMETER Experiment Name: Zm_Drought_P Parameter: Age (day) Value: 8
  misc_feature: MA Experiment 108504 PARAMETER Experiment Name: Zm_Drought_P Parameter: Organism Value: Zea mays
  misc_feature: MA Experiment 108504 PARAMETER Experiment Name: Zm_Drought_P Parameter: Plant Line Value: 35A19
  misc_feature: MA Experiment 108504 PARAMETER Experiment Name: Zm_Drought_P Parameter: Timepoint (hr) Value: 12
  misc_feature: MA Experiment 108504 PARAMETER Experiment Name: Zm_Drought_P Parameter: Tissue Value: Aerial
  misc_feature: MA Experiment 108504 PARAMETER Experiment Name: Zm_Drought_P Parameter: Treatment Value: Drought vs. No Drought
  misc_feature: MA Experiment ID: 108523 Result: Down-regulated in Transcription
  misc_feature: MA Experiment 108523 PARAMETER Experiment Name: Zm_42deg_Heat_P Parameter: Age (day) Value: 8
  misc_feature: MA Experiment 108523 PARAMETER Experiment Name: Zm_42deg_Heat_P Parameter: Organism Value: Zea mays
  misc_feature: MA Experiment 108523 PARAMETER Experiment Name: Zm_42deg_Heat_P Parameter: Plant Line Value: 35A19
  misc_feature: MA Experiment 108523 PARAMETER Experiment Name: Zm_42deg_Heat_P Parameter: Temperature (deg C) Value: 42 vs. 22
  misc_feature: MA Experiment 108523 PARAMETER Experiment Name: Zm_42deg_Heat_P Parameter: Timepoint (hr) Value: 6
  misc_feature: MA Experiment 108523 PARAMETER Experiment Name: Zm_42deg_Heat_P Parameter: Tissue Value: Aerial
  misc_feature: MA Experiment ID: 108528 Result: Up-regulated in Transcription
  misc_feature: MA Experiment 108528 PARAMETER Experiment Name: Zm_Imbibed_Seeds_P Parameter: Age (day) Value: 5 vs. 2
  misc_feature: MA Experiment 108528 PARAMETER Experiment Name: Zm_Imbibed_Seeds_P Parameter: Organism Value: Zea mays
  misc_feature: MA Experiment 108528 PARAMETER Experiment Name: Zm_Imbibed_Seeds_P Parameter: Plant Line Value: 35A19
  misc_feature: MA Experiment 108528 PARAMETER Experiment Name: Zm_Imbibed_Seeds_P Parameter: Tissue Value: Aerial vs. Embryo
  misc_feature: MA Experiment ID: 108529 Result: Down-regulated in Transcription
  misc_feature: MA Experiment 108529 PARAMETER Experiment Name: Zm_Imbibed_Seeds_P Parameter: Age (day) Value: 5 vs. 2
  misc_feature: MA Experiment 108529 PARAMETER Experiment Name: Zm_Imbibed_Seeds_P Parameter: Organism Value: Zea mays
  misc_feature: MA Experiment 108529 PARAMETER Experiment Name: Zm_Imbibed_Seeds_P Parameter: Plant Line Value: 35A19
  misc_feature: MA Experiment 108529 PARAMETER Experiment Name: Zm_Imbibed_Seeds_P Parameter: Tissue Value: Roots vs. Embryo
  misc_feature: MA Experiment ID: 108535 Result: Up-regulated in Transcription
  misc_feature: MA Experiment 108535 PARAMETER Experiment Name: Zm_Meristem_P Parameter: Age (day) Value: 8
  misc_feature: MA Experiment 108535 PARAMETER Experiment Name: Zm_Meristem_P Parameter: Organism Value: Zea mays
  misc_feature: MA Experiment 108535 PARAMETER Experiment Name: Zm_Meristem_P Parameter: Plant Line Value: 35A19
  misc_feature: MA Experiment 108535 PARAMETER Experiment Name: Zm_Meristem_P Parameter: Tissue Value: Root Meristem vs. Above Root Meristem
  misc_feature: MA Experiment ID: 108536 Result: Down-regulated in Transcription
  misc_feature: MA Experiment 108536 PARAMETER Experiment Name: Zm_Meristem_P Parameter: Age (day) Value: 8
  misc_feature: MA Experiment 108536 PARAMETER Experiment Name: Zm_Meristem_P Parameter: Organism Value: Zea mays
  misc_feature: MA Experiment 108536 PARAMETER Experiment Name: Zm_Meristem_P Parameter: Plant Line Value: 35A19
  misc_feature: MA Experiment 108536 PARAMETER Experiment Name: Zm_Meristem_P Parameter: Tissue Value: Shoot Meristem vs. Above Shoot Meristem
  misc_feature: MA Experiment ID: 108543 Result: Up-regulated in Transcription
  misc_feature: MA Experiment ID: 108544 Result: Up-regulated in Transcription
  misc_feature: MA Experiment ID: 108545 Result: Up-regulated in Transcription
  misc_feature: MA Experiment 108545 PARAMETER Experiment Name: Zm_Imbibed_Seeds_P Parameter: Age (day) Value: 3 vs. 2
  misc_feature: MA Experiment 108545 PARAMETER Experiment Name: Zm_Imbibed_Seeds_P Parameter: Organism Value: Zea mays
  misc_feature: MA Experiment 108545 PARAMETER Experiment Name: Zm_Imbibed_Seeds_P Parameter: Plant Line Value: 35A19
  misc_feature: MA Experiment 108545 PARAMETER Experiment Name: Zm_Imbibed_Seeds_P Parameter: Tissue Value: Aerial vs. Embryo
  misc_feature: MA Experiment ID: 108546 Result: Down-regulated in Transcription
  misc_feature: MA Experiment 108546 PARAMETER Experiment Name: Zm_Imbibed_Seeds_P Parameter: Age (day) Value: 3 vs. 2
  misc_feature: MA Experiment 108546 PARAMETER Experiment Name: Zm_Imbibed_Seeds_P Parameter: Organism Value: Zea mays
  misc_feature: MA Experiment 108546 PARAMETER Experiment Name: Zm_Imbibed_Seeds_P Parameter: Plant Line Value: 35A19
  misc_feature: MA Experiment 108546 PARAMETER Experiment Name: Zm_Imbibed_Seeds_P Parameter: Tissue Value: Roots vs. Embryo
  misc_feature: MA Experiment ID: 108547 Result: Up-regulated in Transcription
  misc_feature: MA Experiment 108547 PARAMETER Experiment Name: Zm_Imbibed_Seeds_P Parameter: Age (day) Value: 4 vs. 2
  misc_feature: MA Experiment 108547 PARAMETER Experiment Name: Zm_Imbibed_Seeds_P Parameter: Organism Value: Zea mays
  misc_feature: MA Experiment 108547 PARAMETER Experiment Name: Zm_Imbibed_Seeds_P Parameter: Plant Line Value: 35A19
  misc_feature: MA Experiment 108547 PARAMETER Experiment Name: Zm_Imbibed_Seeds_P Parameter: Tissue Value: Aerial vs. Embryo
  misc_feature: MA Experiment ID: 108556 Result: Down-regulated in Transcription
  misc_feature: MA Experiment 108556 PARAMETER Experiment Name: Zm_Drought_P Parameter: Age (day) Value: 9
  misc_feature: MA Experiment 108556 PARAMETER Experiment Name: Zm_Drought_P Parameter: Organism Value: Zea mays
  misc_feature: MA Experiment 108556 PARAMETER Experiment Name: Zm_Drought_P Parameter: Plant Line Value: 35A19
  misc_feature: MA Experiment 108556 PARAMETER Experiment Name: Zm_Drought_P Parameter: Timepoint (hr) Value: 24
  misc_feature: MA Experiment 108556 PARAMETER Experiment Name: Zm_Drought_P Parameter: Tissue Value: Aerial
  misc_feature: MA Experiment 108556 PARAMETER Experiment Name: Zm_Drought_P Parameter: Treatment Value: Drought vs. No Drought
  misc_feature: MA Experiment ID: 108597 Result: Down-regulated in Transcription
  misc_feature: MA Experiment 108597 PARAMETER Experiment Name: Zm_100uM_ABA_P Parameter: Age (day) Value: 9
  misc_feature: MA Experiment 108597 PARAMETER Experiment Name: Zm_100uM_ABA_P Parameter: Organism Value: Zea mays
  misc_feature: MA Experiment 108597 PARAMETER Experiment Name: Zm_100uM_ABA_P Parameter: Plant Line Value: 35A19
  misc_feature: MA Experiment 108597 PARAMETER Experiment Name: Zm_100uM_ABA_P Parameter: Timepoint (hr) Value: 24
  misc_feature: MA Experiment 108597 PARAMETER Experiment Name: Zm_100uM_ABA_P Parameter: Tissue Value: Aerial
  misc_feature: MA Experiment 108597 PARAMETER Experiment Name: Zm_100uM_ABA_P Parameter: Treatment Value: 100uM ABA vs. No Treatment
  misc_feature: MA Experiment ID: 108688 Result: Down-regulated in Transcription
  misc_feature: MA Experiment 108688 PARAMETER Experiment Name: Zm_Embryos-Flowers__P Parameter: Tissue Value: Immature Flowers vs. Aerial+
  misc_feature: MA Experiment ID: 108689 Result: Down-regulated in Transcription
  misc_feature: MA Experiment 108689 PARAMETER Experiment Name: Zm_Drought_Roots_P Parameter: Age (day) Value: 9
  misc_feature: MA Experiment 108689 PARAMETER Experiment Name: Zm_Drought_Roots_P Parameter: Organism Value: Zea mays
  misc_feature: MA Experiment 108689 PARAMETER Experiment Name: Zm_Drought_Roots_P Parameter: Plant Line Value: 35A19
  misc_feature: MA Experiment 108689 PARAMETER Experiment Name: Zm_Drought_Roots_P Parameter: Timepoint (hr) Value: 24
  misc_feature: MA Experiment 108689 PARAMETER Experiment Name: Zm_Drought_Roots_P Parameter: Tissue Value: Roots
  misc_feature: MA Experiment 108689 PARAMETER Experiment Name: Zm_Drought_Roots_P Parameter: Treatment Value: Drought vs. No Drought
  misc_feature: MA Experiment ID: 20000477 Result: Down-regulated in Transcription
  misc_feature: MA Experiment 20000477 PARAMETER Experiment Name: Zm_5mM_SA_P Parameter: Age (day) Value: 10
  misc_feature: MA Experiment 20000477 PARAMETER Experiment Name: Zm_5mM_SA_P Parameter: Organism Value: Zea mays
  misc_feature: MA Experiment 20000477 PARAMETER Experiment Name: Zm_5mM_SA_P Parameter: Plant Line Value: 35A19
  misc_feature: MA Experiment 20000477 PARAMETER Experiment Name: Zm_5mM_SA_P Parameter: Timepoint (hr) Value: 48
  misc_feature: MA Experiment 20000477 PARAMETER Experiment Name: Zm_5mM_SA_P Parameter: Tissue Value: Aerial
  misc_feature: MA Experiment 20000477 PARAMETER Experiment Name: Zm_5mM_SA_P Parameter: Treatment Value: 5mM SA vs. No Treatment
  misc_feature: MA Experiment ID: 20000478 Result: Down-regulated in Transcription
  misc_feature: MA Experiment 20000478 PARAMETER Experiment Name: Zm_5mM_SA_P Parameter: Age (day) Value: 11
  misc_feature: MA Experiment 20000478 PARAMETER Experiment Name: Zm_5mM_SA_P Parameter: Organism Value: Zea mays
  misc_feature: MA Experiment 20000478 PARAMETER Experiment Name: Zm_5mM_SA_P Parameter: Plant Line Value: 35A19
  misc_feature: MA Experiment 20000478 PARAMETER Experiment Name: Zm_5mM_SA_P Parameter: Timepoint (hr) Value: 72
  misc_feature: MA Experiment 20000478 PARAMETER Experiment Name: Zm_5mM_SA_P Parameter: Tissue Value: Aerial
  misc_feature: MA Experiment 20000478 PARAMETER Experiment Name: Zm_5mM_SA_P Parameter: Treatment Value: 5mM SA vs. No Treatment
  misc_feature: MA Experiment ID: 20000479 Result: Down-regulated in Transcription
  misc_feature: MA Experiment 20000479 PARAMETER Experiment Name: Zm_Drought_P Parameter: Age (day) Value: 10
  misc_feature: MA Experiment 20000479 PARAMETER Experiment Name: Zm_Drought_P Parameter: Organism Value: Zea mays
  misc_feature: MA Experiment 20000479 PARAMETER Experiment Name: Zm_Drought_P Parameter: Plant Line Value: 35A19
  misc_feature: MA Experiment 20000479 PARAMETER Experiment Name: Zm_Drought_P Parameter: Timepoint (hr) Value: 48
  misc_feature: MA Experiment 20000479 PARAMETER Experiment Name: Zm_Drought_P Parameter: Tissue Value: Aerial
  misc_feature: MA Experiment 20000479 PARAMETER Experiment Name: Zm_Drought_P Parameter: Treatment Value: Drought vs. No Drought
  misc_feature: MA Experiment ID: 20000480 Result: Down-regulated in Transcription
  misc_feature: MA Experiment 20000480 PARAMETER Experiment Name: Zm_Drought_P Parameter: Age (day) Value: 11
  misc_feature: MA Experiment 20000480 PARAMETER Experiment Name: Zm_Drought_P Parameter: Organism Value: Zea mays
  misc_feature: MA Experiment 20000480 PARAMETER Experiment Name: Zm_Drought_P Parameter: Plant Line Value: 35A19
  misc_feature: MA Experiment 20000480 PARAMETER Experiment Name: Zm_Drought_P Parameter: Timepoint (hr) Value: 72
  misc_feature: MA Experiment 20000480 PARAMETER Experiment Name: Zm_Drought_P Parameter: Tissue Value: Aerial
  misc_feature: MA Experiment 20000480 PARAMETER Experiment Name: Zm_Drought_P Parameter: Treatment Value: Drought vs. No Drought
  misc_feature: MA Experiment ID: 20000487 Result: Down-regulated in Transcription
  misc_feature: MA Experiment 20000487 PARAMETER Experiment Name: Zm_50mM_NH4NO3_L_to_H_P Parameter: Organism Value: Zea mays
  misc_feature: MA Experiment 20000487 PARAMETER Experiment Name: Zm_50mM_NH4NO3_L_to_H_P Parameter: Timepoint (hr) Value: 4
  misc_feature: MA Experiment 20000487 PARAMETER Experiment Name: Zm_50mM_NH4NO3_L_to_H_P Parameter: Tissue Value: Leaves
  misc_feature: MA Experiment 20000487 PARAMETER Experiment Name: Zm_50mM_NH4NO3_L_to_H_P Parameter: Treatment Value: 50mM NH4NO3 vs. 100mM Mannitol
  misc_feature: MA Experiment ID: 20000492 Result: Up-regulated in Transcription
  misc_feature: MA Experiment 20000492 PARAMETER Experiment Name: Zm_Hybrid_Seed_Dev_P Parameter: DAP Value: 12
  misc_feature: MA Experiment 20000492 PARAMETER Experiment Name: Zm_Hybrid_Seed_Dev_P Parameter: Organism Value: Zea mays
  misc_feature: MA Experiment 20000492 PARAMETER Experiment Name: Zm_Hybrid_Seed_Dev_P Parameter: Plant Line Value: 35A19
  misc_feature: MA Experiment 20000492 PARAMETER Experiment Name: Zm_Hybrid_Seed_Dev_P Parameter: Tissue Value: Fert Kernel vs. Unfert Floret
  misc_feature: MA Experiment ID: 20000535 Result: Down-regulated in Transcription
  misc_feature: MA Experiment 20000535 PARAMETER Experiment Name: Zm_Hybrid_Seed_Dev_P Parameter: DAP Value: 30 vs. 12
  misc_feature: MA Experiment 20000535 PARAMETER Experiment Name: Zm_Hybrid_Seed_Dev_P Parameter: Organism Value: Zea mays
  misc_feature: MA Experiment 20000535 PARAMETER Experiment Name: Zm_Hybrid_Seed_Dev_P Parameter: Plant Line Value: 35A19
  misc_feature: MA Experiment 20000535 PARAMETER Experiment Name: Zm_Hybrid_Seed_Dev_P Parameter: Tissue Value: Embryo vs. Unfert Floret
  misc_feature: MA Experiment ID: 20000626 Result: Down-regulated in Transcription
  misc_feature: MA Experiment 20000626 PARAMETER Experiment Name: Zm_Herbicide-Treatments_P Parameter: Timepoint (hr) Value: 12
  misc_feature: MA Experiment 20000626 PARAMETER Experiment Name: Zm_Herbicide-Treatments_P Parameter: Tissue Value: Aerial
  misc_feature: MA Experiment 20000626 PARAMETER Experiment Name: Zm_Herbicide-Treatments_P Parameter: Treatment Value: Roundup vs. No Treatment
  misc_feature: MA Experiment ID: 20000628 Result: Down-regulated in Transcription
  misc_feature: MA Experiment 20000628 PARAMETER Experiment Name: Zm_Herbicide-Treatments_P Parameter: Timepoint (hr) Value: 12
  misc_feature: MA Experiment 20000628 PARAMETER Experiment Name: Zm_Herbicide-Treatments_P Parameter: Tissue Value: Aerial
  misc_feature: MA Experiment 20000628 PARAMETER Experiment Name: Zm_Herbicide-Treatments_P Parameter: Treatment Value: Glean vs. No Treatment
  misc_feature: MA Experiment ID: 20000629 Result: Down-regulated in Transcription
  misc_feature: MA Experiment 20000629 PARAMETER Experiment Name: Zm_Herbicide-Treatments_P Parameter: Timepoint (hr) Value: 12
  misc_feature: MA Experiment 20000629 PARAMETER Experiment Name: Zm_Herbicide-Treatments_P Parameter: Tissue Value: Aerial
  misc_feature: MA Experiment 20000629 PARAMETER Experiment Name: Zm_Herbicide-Treatments_P Parameter: Treatment Value: Trimec vs. No Treatment
  misc_feature: MA Experiment ID: 20000632 Result: Down-regulated in Transcription
  misc_feature: MA Experiment 20000632 PARAMETER Experiment Name: Zm_Herbicide-Treatments_P Parameter: Timepoint (hr) Value: 4
  misc_feature: MA Experiment 20000632 PARAMETER Experiment Name: Zm_Herbicide-Treatments_P Parameter: Tissue Value: Aerial
  misc_feature: MA Experiment 20000632 PARAMETER Experiment Name: Zm_Herbicide-Treatments_P Parameter: Treatment Value: Glean vs. No Treatment
gcacgagaccattacctagaacatcctaatcgaaaagtacttggcaatcctctctagctagctcagcatccgacgacgggacttgcacgatggatgctgctctgctcgtcgtctccctcgtcctctgcctgctggcggctgcccctgcggcgtccgcggcgcgggccttcttcgtcttcggcgactccctcgtcgacaacggcaacaacaactacctgctgaccacggcgcgcgccgacgcgcccccctacggcatcgacttccccacgcaccaagccacgggccgcttctccaacgggcttaacatccccgacatcatcagcgagcacctcggggccgaacctgcgctgccgtacctgagccccgagctccgaggggagaagctgctcgtcggcgccaacttcgcgtcggccggcgtcgggatcctcaacgacacaggaatacagtttgtgaacatcatcaggatcggcgaccagctgcagtacttccgggagtaccagcggaagctgcgagccctcgtcggcgagccgcaggcgacgcagctcgtgaaccaggccctcgtgctcatcacgctcggcggcaacgacttcgtgaacaactactacctggtgcccatgtccgtgcggtcgcgccagtacgcactcccggactacgtccgcttcatcgtctccgagtacaggaagatcctctcgaggctgtacgagctgggcgcgcggcgcgtgatcgtgacggggacggggccgctggggtgcgtcccggccgagctggcgctacacagccagaacggcgagtgcgcggcggagctgacgcgcgccgtgaacctcttcaacccgcagatggtggacatggtgcgcggcatcaaccgcgccatcggcgccgacgtcttcgtcaccgccaacacctaccgcatgaacttcgactacctcgcaaacccgcaggacttcgggttcacgaacgtgcaggtggcgtgctgcggccagggcccgtacaacgggatcgggctgtgcacggcggcgtcgaacgtgtgcgacaaccgcgacgtgttcgcgttctgggacgcgttccaccccacggagagggcaaaccgcatcatcgtcgcccagttcatgcacggngacacggactacatgcaccccatgaacctnancaccatnctngccacggaccaggagggcctctagactatagcttgatcagccggacacgattatacgtacatgcgtgatgtgtctcacgtgcctagcacgttagccatgtgttggatgatggcagcccaatttgccaataatattcgtgcctcgatccaagtttcaccttc

SEQ ID NO: 11036 - protein, 363 aa, Zea mays subsp. mays
  peptide (1)..(363): Ceres Seq. ID no. 12406703
  misc_feature (27)..(338): Pfam Name: GDSL-like Lipase/Acylhydrolase Pfam Description: GDSL-like Lipase/Acylhydrolase
  misc_feature (1)..(359): Homolog of NCBI NO: 37535146 NR Description: putative early nodulin gene (Enod) related
  misc_feature (7)..(359): Homolog of NCBI NO: 15229265 NR Description: putative GDSL-motif lipase/acylhydrolase; protein
  misc_feature (5)..(359): Homolog of NCBI NO: 22758315 NR Description: putative early nodulin gene (Enod) related
  misc_feature (4)..(359): Homolog of NCBI NO: 15242808 NR Description: putative protein; protein id: At5g33370.1,
  misc_feature (3)..(359): Homolog of NCBI NO: 28071322 NR Description: P0705A05.30 [Oryza sativa (japonica
  misc_feature (5)..(359): Homolog of NCBI NO: 15235421 NR Description: Proline-rich APG - like protein; protein id:
  misc_feature (1)..(357): Homolog of NCBI NO: 15238814 NR Description: putative protein; protein id: At5g18430.1
  misc_feature (11)..(186): Homolog of NCBI NO: 37789825 NR Description: putative GDSL-motif lipase [Vitis vinifera]
  misc_feature (26)..(352): Homolog of NCBI NO: 15227849 NR Description: putative GDSL-motif lipase/hydrolase; protein id:
  misc_feature (15)..(352): Homolog of NCBI NO: 15229742 NR Description: putative protein; protein id: At3g50400.1 thaliana] >gi|7630026|emb|CAB88323.1| putative protein thaliana] >gi|26450386|dbj|BAC42308.1| unknown protein
  misc_feature (342)..(342): Xaa is any aa, unknown or other
  misc_feature (352)..(352): Xaa is any aa, unknown or other
  misc_feature (353)..(353): Xaa is any aa, unknown or other
  misc_feature (355)..(355): Xaa is any aa, unknown or other
  misc_feature (356)..(356): Xaa is any aa, unknown or other
MDAALLVVSLVLCLLAAAPAASAARAFFVFGDSLVDNGNNNYLLTTARADAPPYGIDFPTHQATGRFSNGLNIPDIISEHLGAEPALPYLSPELRGEKLLVGANFASAGVGILNDTGIQFVNIIRIGDQLQYFREYQRKLRALVGEPQATQLVNQALVLITLGGNDFVNNYYLVPMSVRSRQYALPDYVRFIVSEYRKILSRLYELGARRVIVTGTGPLGCVPAELALHSQNGECAAELTRAVNLFNPQMVDMVRGINRAIGADVFVTANTYRMNFDYLANPQDFGFTNVQVACCGQGPYNGIGLCTAASNVCDNRDVFAFWDAFHPTERANRIIVAQFMHXDTDYMHPMNXXTXXATDQEGL

SEQ ID NO: 11037 - protein, 188 aa, Zea mays subsp. mays
  peptide (1)..(188): Ceres Seq. ID no. 12406704
  misc_feature (1)..(163): Pfam Name: GDSL-like Lipase/Acylhydrolase Pfam Description: GDSL-like Lipase/Acylhydrolase
  misc_feature (1)..(184): Homolog of NCBI NO: 37535146 NR Description: putative early nodulin gene (Enod) related
  misc_feature (1)..(184): Homolog of NCBI NO: 15229265 NR Description: putative GDSL-motif lipase/acylhydrolase; protein
  misc_feature (1)..(184): Homolog of NCBI NO: 22758315 NR Description: putative early nodulin gene (Enod) related
  misc_feature (1)..(184): Homolog of NCBI NO: 15242808 NR Description: putative protein; protein id: At5g33370.1,
  misc_feature (1)..(184): Homolog of NCBI NO: 28071322 NR Description: P0705A05.30 [Oryza sativa (japonica
  misc_feature (1)..(184): Homolog of NCBI NO: 15235421 NR Description: Proline-rich APG - like protein; protein id:
  misc_feature (1)..(182): Homolog of NCBI NO: 15238814 NR Description: putative protein; protein id: At5g18430.1
  misc_feature (1)..(11): Homolog of NCBI NO: 37789825 NR Description: putative GDSL-motif lipase [Vitis vinifera]
  misc_feature (1)..(177): Homolog of NCBI NO: 15227849 NR Description: putative GDSL-motif lipase/hydrolase; protein id:
  misc_feature (1)..(177): Homolog of NCBI NO: 15229742 NR Description: putative protein; protein id: At3g50400.1 thaliana] >gi|7630026|emb|CAB88323.1| putative protein thaliana] >gi|26450386|dbj|BAC42308.1| unknown protein
  misc_feature (167)..(167): Xaa is any aa, unknown or other
  misc_feature (177)..(177): Xaa is any aa, unknown or other
  misc_feature (178)..(178): Xaa is any aa, unknown or other
  misc_feature (180)..(180): Xaa is any aa, unknown or other
  misc_feature (181)..(181): Xaa is any aa, unknown or other
MSVRSRQYALPDYVRFIVSEYRKILSRLYELGARRVIVTGTGPLGCVPAELALHSQNGECAAELTRAVNLFNPQMVDMVRGINRAIGADVFVTANTYRMNFDYLANPQDFGFTNVQVACCGQGPYNGIGLCTAASNVCDNRDVFAFWDAFHPTERANRIIVAQFMHXDTDYMHPMNXXTXXATDQEGL

SEQ ID NO: 11038 - DNA, 1807 bp, Zea mays subsp. mays
  misc_feature (1)..(1807): Ceres Seq. ID no. 12343300
  misc_feature: MA Experiment ID: 108545 Result: Up-regulated in Transcription
  misc_feature: MA Experiment 108545 PARAMETER Experiment Name: Zm_Imbibed_Seeds_P Parameter: Age (day) Value: 3 vs. 2
  misc_feature: MA Experiment 108545 PARAMETER Experiment Name: Zm_Imbibed_Seeds_P Parameter: Organism Value: Zea mays
  misc_feature: MA Experiment 108545 PARAMETER Experiment Name: Zm_Imbibed_Seeds_P Parameter: Plant Line Value: 35A19
  misc_feature: MA Experiment 108545 PARAMETER Experiment Name: Zm_Imbibed_Seeds_P Parameter: Tissue Value: Aerial vs. Embryo
  misc_feature: MA Experiment ID: 20000492 Result: Up-regulated in Transcription
  misc_feature: MA Experiment 20000492 PARAMETER Experiment Name: Zm_Hybrid_Seed_Dev_P Parameter: DAP Value: 12
  misc_feature: MA Experiment 20000492 PARAMETER Experiment Name: Zm_Hybrid_Seed_Dev_P Parameter: Organism Value: Zea mays
  misc_feature: MA Experiment 20000492 PARAMETER Experiment Name: Zm_Hybrid_Seed_Dev_P Parameter: Plant Line Value: 35A19
  misc_feature: MA Experiment 20000492 PARAMETER Experiment Name: Zm_Hybrid_Seed_Dev_P Parameter: Tissue Value: Fert Kernel vs. Unfert Floret
  misc_feature: MA Experiment ID: 20000534 Result: Down-regulated in Transcription
  misc_feature: MA Experiment 20000534 PARAMETER Experiment Name: Zm_Hybrid_Pollen_P Parameter: Age (day) Value: 8
  misc_feature: MA Experiment 20000534 PARAMETER Experiment Name: Zm_Hybrid_Pollen_P Parameter: Organism Value: Zea mays
  misc_feature: MA Experiment 20000534 PARAMETER Experiment Name: Zm_Hybrid_Pollen_P Parameter: Plant Line Value: 35A19
  misc_feature: MA Experiment 20000534 PARAMETER Experiment Name: Zm_Hybrid_Pollen_P Parameter: Tissue Value: Pollen vs. Aerial
agcgaattagtgaaaagaagacaataaataaatacaacgaatgcagcgagcgaggtggaggtggggggaaaagggcgaggtgacaccgtgacagagagaaggcgagggagggatcacgaggtgtgcttcctcctccgcccaatcctgcccaaccaaatccgccagcgccgcctcctttacactcccacctctgtcccggagcaaaaaagggagggagaggctcgcttcttggatcgcggggtcacgggacgcgcgccgcgggccggtacgctgctgctggcggactgctcgacccttgcctaccagctgctgcctgctgctgcttccttggctggcgccggcgagagacggaggcgaggcgacgacgatggaccgggcggcgctcaccgtgggcccggggatggacatgcccataatgcacgacggcgaccgctacgagctcgtccgcgacatcggctccggcaacttcggcgtcgcgcgcctcatgcgcaaccgcgccgacggccagctcgtcgccgtcaagtacatcgagcgaggcgagaagattgacgagaacgtgcagcgggagatcatcaaccaccgctccctgcggcaccccaacatcatccgcttcaaggaggtcatcctcaccccgacgcacctcgccatcgtcatggagtacgcctccggcggggagctcttcgagcgcatctgcaacgctggcaggttcagcgaggacgaggcgcgtttctttttccagcaactcatatcaggggtcagctactgccattccatgcaagtatgccatcgcgacttgaagctagagaacaccctgttggacgggagcaccgcgcctcgcctcaagatatgtgattttggctactcaaagtcatcagttctacactcgcagccgaaatctacagtgggaactcctgcatacattgctcctgaggttcttctgaagaaggaatacgatggaaaggtcgctgatgtgtggtcatgtggagtaacgctgtacgtgatgctggtcggtgcatatccgtttgaggacccagattagcctaagaatttcaggaagacaattcagagaatattgggtgtgcagtactcaattccagactatgtccacatatctccagagtgccaaaatcttgtctctaggattttcgtcgccgacccagccaccaggatcaccatccctgagataaggaaccatccatggttcttgaagaacctgccagctgacctaatggatgacagcacgatgagcaagcagtacgaggagcctgagcaaccgatgcagagcatggatgagatcatgcagatcctggccgaggcgaccattccagcagctggtccccgtggactcaatcagttcctgaacgacggccttgacctcgacgatgacatggacgacctggactcagataccgatcttgacctggaaagcagtggggaaatcgtgtatgctatttgacagcagcgaggcaatgtgtatcatcagtcgtgctcagatcgtttgttgcgccataggttaccgagataattagagagacaggggggaggtatctgctggagatgctgctcgtgtctgatgccgtgatgcccccttttttcatcctgttatgtttggctgttgtttggttgtggtgcacctccagtgttttacaacagtttggcccttcggaattggttgtgctagaacctcgtccatctaagaagaccctttgtttttgcatccccagctaagagacagtgaagtacttgtataattatactgtttgtgtcatatgtatttggtgtaggaaaataaagaaactccattgcc

SEQ ID NO: 11039 - protein, 223 aa, Zea mays subsp. mays
  peptide (1)..(223): Ceres Seq. ID no. 12343301
  misc_feature (23)..(223): Pfam Name: Protein kinase domain Pfam Description: Protein kinase domain
  misc_feature (1)..(223): Homolog of NCBI NO: 31415944 NR Description: putative serine-threonine protein kinase [Oryza
  misc_feature (1)..(223): Homolog of NCBI NO: 18418337 NR Description: protein kinase - like protein; protein id: supported by cDNA: gi_15451087, supported by cDNA: gi_20148418
  misc_feature (1)..(223): Homolog of NCBI NO: 15240124 NR Description: protein kinase, 41K (EC 2.7.1.-) (pir||S71172); id: At5g66880.1, supported by cDNA: gi_166818 [Arabidopsis
  misc_feature (1)..(223): Homolog of NCBI NO: 7446439 NR Description: probable serine/threonine-specific protein kinase
  misc_feature (14)..(223): Homolog of NCBI NO: 20260398 NR Description: putative protein [Arabidopsis thaliana]
  misc_feature (1)..(223): Homolog of NCBI NO: 15229772 NR Description: protein kinase SPK-2; protein id: At3g50500.1, by cDNA: 3988., supported by cDNA: gi_16209651, supported by
  misc_feature (1)..(223): Homolog of NCBI NO: 21593534 NR Description: protein kinase SPK-2 [Arabidopsis thaliana]
  misc_feature (12)..(223): Homolog of NCBI NO: 6739629 NR Description: abscisic acid-activated protein kinase [Vicia
  misc_feature (21)..(223): Homolog of NCBI NO: 29164823 NR Description: abcisic acid-inducible protein kinanase [Oryza
  misc_feature (21)..(223): Homolog of NCBI NO: 34906840 NR Description: putative protein kinase HvPKABA1(Abcisic
MDRAALTVGPGMDMPIMHDGDRYELVRDIGSGNFGVARLMRNRADGQLVAVKYIERGEKIDENVQREIINHRSLRHPNIIRFKEVILTPTHLAIVMEYASGGELFERICNAGRFSEDEARFFFQQLISGVSYCHSMQVCHRDLKLENTLLDGSTAPRLKICDFGYSKSSVLHSQPKSTVGTPAYIAPEVLLKKEYDGKVADVWSCGVTLYVMLVGAYPFEDPD

SEQ ID NO: 11040 - protein, 212 aa, Zea mays subsp. mays
  peptide (1)..(212): Ceres Seq. ID no. 12343302
  misc_feature (12)..(212): Pfam Name: Protein kinase domain Pfam Description: Protein kinase domain
  misc_feature (1)..(212): Homolog of NCBI NO: 31415944 NR Description: putative serine-threonine protein kinase [Oryza
  misc_feature (1)..(212): Homolog of NCBI NO: 18418337 NR Description: protein kinase - like protein; protein id: supported by cDNA: gi_15451087, supported by cDNA: gi_20148418
  misc_feature (1)..(212): Homolog of NCBI NO: 15240124 NR Description: protein kinase, 41K (EC 2.7.1.-) (pir||S71172); id: At5g66880.1, supported by cDNA: gi_166818 [Arabidopsis
  misc_feature (1)..(212): Homolog of NCBI NO: 7446439 NR Description: probable serine/threonine-specific protein kinase
  misc_feature (3)..(212): Homolog of NCBI NO: 20260398 NR Description: putative protein [Arabidopsis thaliana]
  misc_feature (1)..(212): Homolog of NCBI NO: 15229772 NR Description: protein kinase SPK-2; protein id: At3g50500.1, by cDNA: 3988., supported by cDNA: gi_16209651, supported by
  misc_feature (1)..(212): Homolog of NCBI NO: 21593534 NR Description: protein kinase SPK-2 [Arabidopsis thaliana]
  misc_feature (1)..(212): Homolog of NCBI NO: 6739629 NR Description: abscisic acid-activated protein kinase [Vicia
  misc_feature (10)..(212): Homolog of NCBI NO: 29164823 NR Description: abcisic acid-inducible protein kinanase [Oryza
  misc_feature (10)..(212): Homolog of NCBI NO: 34906840 NR Description: putative protein kinase HvPKABA1(Abcisic
MDMPIMHDGDRYELVRDIGSGNFGVARLMRNRADGQLVAVKYIERGEKIDENVQREIINHRSLRHPNIIRFKEVILTPTHLAIVMEYASGGELFERICNAGRFSEDEARFFFQQLISGVSYCHSMQVCHRDLKLENTLLDGSTAPRLKICDFGYSKSSVLHSQPKSTVGTPAYIAPEVLLKKEYDGKVADVWSCGVTLYVMLVGAYPFEDPD

SEQ ID NO: 11041 - protein, 210 aa, Zea mays subsp. mays
  peptide (1)..(210): Ceres Seq. ID no. 12343303
  misc_feature (10)..(210): Pfam Name: Protein kinase domain Pfam Description: Protein kinase domain
  misc_feature (1)..(210): Homolog of NCBI NO: 31415944 NR Description: putative serine-threonine protein kinase [Oryza
  misc_feature (1)..(210): Homolog of NCBI NO: 18418337 NR Description: protein kinase - like protein; protein id: supported by cDNA: gi_15451087, supported by cDNA: gi_20148418
  misc_feature (1)..(210): Homolog of NCBI NO: 15240124 NR Description: protein kinase, 41K (EC 2.7.1.-) (pir||S71172); id: At5g66880.1, supported by cDNA: gi_166818 [Arabidopsis
  misc_feature (1)..(210): Homolog of NCBI NO: 7446439 NR Description: probable serine/threonine-specific protein kinase
  misc_feature (1)..(210): Homolog of NCBI NO: 20260398 NR Description: putative protein [Arabidopsis thaliana]
  misc_feature (1)..(210): Homolog of NCBI NO: 15229772 NR Description: protein kinase SPK-2; protein id: At3g50500.1, by cDNA: 3988., supported by cDNA: gi_16209651, supported by
  misc_feature (1)..(210): Homolog of NCBI NO: 21593534 NR Description: protein kinase SPK-2 [Arabidopsis thaliana]
  misc_feature (1)..(210): Homolog of NCBI NO: 6739629 NR Description: abscisic acid-activated protein kinase [Vicia
  misc_feature (8)..(210): Homolog of NCBI NO: 29164823 NR Description: abcisic acid-inducible protein kinanase [Oryza
  misc_feature (8)..(210): Homolog of NCBI NO: 34906840 NR Description: putative protein kinase HvPKABA1(Abcisic
MPIMHDGDRYELVRDIGSGNFGVARLMRNRADGQLVAVKYIERGEKIDENVQREIINHRSLRHPNIIRFKEVILTPTHLAIVMEYASGGELFERICNAGRFSEDEARFFFQQLISGVSYCHSMQVCHRDLKLENTLLDGSTAPRLKICDFGYSKSSVLHSQPKSTVGTPAYIAPEVLLKKEYDGKVADVWSCGVTLYVMLVGAYPFEDPD

SEQ ID NO: 11042 - DNA, 1293 bp, Zea mays subsp. mays
  misc_feature (1)..(1293): Ceres Seq. ID no. 12353343
  misc_feature: MA Experiment ID: 108533 Result: Down-regulated in Transcription
  misc_feature: MA Experiment 108533 PARAMETER Experiment Name: Zm_4deg_Cold_P Parameter: Age (hr) Value: 8
  misc_feature: MA Experiment 108533 PARAMETER Experiment Name: Zm_4deg_Cold_P Parameter: Organism Value: Zea mays
  misc_feature: MA Experiment 108533 PARAMETER Experiment Name: Zm_4deg_Cold_P Parameter: Plant Line Value: 35A19
  misc_feature: MA Experiment 108533 PARAMETER Experiment Name: Zm_4deg_Cold_P Parameter: Temperature (deg C) Value: 4 vs. 22
  misc_feature: MA Experiment 108533 PARAMETER Experiment Name: Zm_4deg_Cold_P Parameter: Timepoint (hr) Value: 1
  misc_feature: MA Experiment 108533 PARAMETER Experiment Name: Zm_4deg_Cold_P Parameter: Tissue Value: Aerial
  misc_feature: MA Experiment ID: 108535 Result: Down-regulated in Transcription
  misc_feature: MA Experiment 108535 PARAMETER Experiment Name: Zm_Meristem_P Parameter: Age (day) Value: 8
  misc_feature: MA Experiment 108535 PARAMETER Experiment Name: Zm_Meristem_P Parameter: Organism Value: Zea mays
  misc_feature: MA Experiment 108535 PARAMETER Experiment Name: Zm_Meristem_P Parameter: Plant Line Value: 35A19
  misc_feature: MA Experiment 108535 PARAMETER Experiment Name: Zm_Meristem_P Parameter: Tissue Value: Root Meristem vs. Above Root Meristem
  misc_feature: MA Experiment ID: 108543 Result: Down-regulated in Transcription
  misc_feature: MA Experiment ID: 108689 Result: Up-regulated in Transcription
  misc_feature: MA Experiment 108689 PARAMETER Experiment Name: Zm_Drought_Roots_P Parameter: Age (day) Value: 9
  misc_feature: MA Experiment 108689 PARAMETER Experiment Name: Zm_Drought_Roots_P Parameter: Organism Value: Zea mays
  misc_feature: MA Experiment 108689 PARAMETER Experiment Name: Zm_Drought_Roots_P Parameter: Plant Line Value: 35A19
  misc_feature: MA Experiment 108689 PARAMETER Experiment Name: Zm_Drought_Roots_P Parameter: Timepoint (hr) Value: 24
  misc_feature: MA Experiment 108689 PARAMETER Experiment Name: Zm_Drought_Roots_P Parameter: Tissue Value: Roots
  misc_feature: MA Experiment 108689 PARAMETER Experiment Name: Zm_Drought_Roots_P Parameter: Treatment Value: Drought vs. No Drought
gtcccgctggtggcgtcctttttttccgccgggagataaaccgaccggacccctgactgcgacccgcagctgctcctgcttccgatccgaacttctctcgcccgccggttcttcgcgagcaattcttataaagcatcatcatcaccacttgtgatgggtggaagccagtacgatgatgaatgggtgttgcccagtgccgatatcactcttgttcttgttgggaaacttggctatggaaagagtgcaactggaaatagcatccttggacgggaagcatttgtatcagaatattcacattctggtgttactaatacttgtcagctgggaagcactaccctgatggacggccggaccatcaatgttattgatacaccagggttatttgatatgagcattgcatcagacgatgctggtaaagagattgttaaatgtatgaacatggctaaagatgggatacatgcagttctaatggtttttagtggcacatctcggttttctcgagaggatgcaagtacaattgagactattaaggtcttttttggagaaaagattgttgaccacatggttttagtttttacttatggtgatctagttggtgaatctaagttgaagaacatgctcaatgatgcgccagagtatttgcagaatgttgttgagctatgccaaaacagagttgtcgtcttcgataacaggaccaaggaccgaaggctccaagcgcagcaacttgacaaattgctctatgtagtggactcggtttgtgcaaacaatggaggaaaaccatttacagatcaaatgttcactcgcatcaaggaggtgcatgatagggaaaaagaggtgcataccttgggatattcagatgagcagatatctgagttgaaggaggagattcatagaactagggatgaacagcttgcacagataaccagcatggtcgaggaaaagctaaaccgcactgtggagaagctgcaacagcagctcatggaggaacagaacgcaaggctggaggccgagaaggtggcgcatgaagctatgcggaaatcagaagcgcagatccaggagctgaaggagagactcgagaaggctcgactggaaaacgaggagttccggaggatggcgcagagcagtaaatgtgctatcctatagtacttgctagaaaaactctgtgcggctatcgtgctgacgcgtctcttttttttttttgtctgtagcacctttttttaacagtttatttattacgcgacaactgttatgaagacactgctttgcttccgtatattatcttcttttttgcgc

SEQ ID NO: 11043 - protein, 329 aa, Zea mays subsp. mays
  peptide (1)..(329): Ceres Seq. ID no. 12353344
  misc_feature (18)..(220): Pfam Name: AIG1 family Pfam Description: AIG1 family
  misc_feature (7)..(327): Homolog of NCBI NO: 38346576 NR Description: OSJNBa0064D20.7 [Oryza sativa (japonica
  misc_feature (1)..(329): Homolog of NCBI NO: 4097585 NR Description: NTGP4 [Nicotiana tabacum]
  misc_feature (1)..(326): Homolog of NCBI NO: 18399081 NR Description: expressed protein; protein id: At1g33970.1,
  misc_feature (1)..(326): Homolog of NCBI NO: 24417378 NR Description: unknown [Arabidopsis thaliana]
  misc_feature (1)..(326): Homolog of NCBI NO: 25373414 NR Description: hypothetical protein F12G12.21 - Arabidopsis >gi|10086478|gb|AAG12538.1|AC015446_19 Similar to AIG1 protein thaliana] >gi|10092443|gb|AAG12846.1|AC079286_3 disease
  misc_feature (41)..(326): Homolog of NCBI NO: 12324509 NR Description: AIG1-like protein, 5' partial; 1-1205
  misc_feature (8)..(305): Homolog of NCBI NO: 15217724 NR Description: AIG1-like protein; protein id: At1g33930.1
  misc_feature (19)..(329): Homolog of NCBI NO: 15217731 NR Description: AIG1; protein id: At1g33960.1, supported by cDNA: [Arabidopsis thaliana] >gi|1703219|sp|P54120|AIG1_ARATH AIG1 >gi|1127804|gb|AAC49282.1| AIG1
  misc_feature (19)..(329): Homolog of NCBI NO: 10092442 NR Description: disease resistance protein AIG1; 916-2572
  misc_feature (7)..(329): Homolog of NCBI NO: 15234871 NR Description: AIG1-like protein; protein id: At4g09950.1
MGGSQYDDEWVLPSADITLVLVGKLGYGKSATGNSILGREAFVSEYSHSGVTNTCQLGSTTLMDGRTINVIDTPGLFDMSIASDDAGKEIVKCMNMAKDGIHAVLMVFSGTSRFSREDASTIETIKVFFGEKIVDHMVLVFTYGDLVGESKLKNMLNDAPEYLQNVVELCQNRVVVFDNRTKDRRLQAQQLDKLLYVVDSVCANNGGKPFTDQMFTRIKEVHDREKEVHTLGYSDEQISELKEEIHRTRDEQLAQITSMVEEKLNRTVEKLQQQLMEEQNARLEAEKVAHEAMRKSEAQIQELKERLEKARLENEEFRRMAQSSKCAIL

SEQ ID NO: 11044 - protein, 267 aa, Zea mays subsp. mays
  peptide (1)..(267): Ceres Seq. ID no. 12353345
  misc_feature (1)..(158): Pfam Name: AIG1 family Pfam Description: AIG1 family
  misc_feature (1)..(264): Homolog of NCBI NO: 25373414 NR Description: hypothetical protein F12G12.21 - Arabidopsis >gi|10086478|gb|AAG12538.1|AC015446_19 Similar to AIG1 protein thaliana] >gi|10092443|gb|AAG12846.1|AC079286_3 disease
  misc_feature (1)..(264): Homolog of NCBI NO: 12324509 NR Description: AIG1-like protein, 5' partial; 1-1205
  misc_feature (1)..(243): Homolog of NCBI NO: 15217724 NR Description: AIG1-like protein; protein id: At1g33930.1
  misc_feature (1)..(265): Homolog of NCBI NO: 38346576 NR Description: OSJNBa0064D20.7 [Oryza sativa (japonica
  misc_feature (1)..(264): Homolog of NCBI NO: 18399081 NR Description: expressed protein; protein id: At1g33970.1,
  misc_feature (1)..(264): Homolog of NCBI NO: 24417378 NR Description: unknown [Arabidopsis thaliana]
  misc_feature (1)..(267): Homolog of NCBI NO: 4097585 NR Description: NTGP4 [Nicotiana tabacum]
  misc_feature (1)..(267): Homolog of NCBI NO: 15217731 NR Description: AIG1; protein id: At1g33960.1, supported by cDNA: [Arabidopsis thaliana] >gi|1703219|sp|P54120|AIG1_ARATH AIG1 >gi|1127804|gb|AAC49282.1| AIG1
  misc_feature (1)..(267): Homolog of NCBI NO: 10092442 NR Description: disease resistance protein AIG1; 916-2572
  misc_feature (1)..(267): Homolog of NCBI NO: 15234871 NR Description: AIG1-like protein; protein id: At4g09950.1
MDGRTINVIDTPGLFDMSIASDDAGKEIVKCMNMAKDGIHAVLMVFSGTSRFSREDASTIETIKVFFGEKIVDHMVLVFTYGDLVGESKLKNMLNDAPEYLQNVVELCQNRVVVFDNRTKDRRLQAQQLDKLLYVVDSVCANNGGKPFTDQMFTRIKEVHDREKEVHTLGYSDEQISELKEEIHRTRDEQLAQITSMVEEKLNRTVEKLQQQLMEEQNARLEAEKVAHEAMRKSEAQIQELKERLEKARLENEEFRRMAQSSKCAIL

SEQ ID NO: 11045 - protein, 251 aa, Zea mays subsp. mays
  peptide (1)..(251): Ceres Seq. ID no. 12353346
  misc_feature (1)..(142): Pfam Name: AIG1 family Pfam Description: AIG1 family
  misc_feature (1)..(249): Homolog of NCBI NO: 38346576 NR Description: OSJNBa0064D20.7 [Oryza sativa (japonica
  misc_feature (1)..(251): Homolog of NCBI NO: 4097585 NR Description: NTGP4 [Nicotiana tabacum]
  misc_feature (1)..(248): Homolog of NCBI NO: 18399081 NR Description: expressed protein; protein id: At1g33970.1,
  misc_feature (1)..(248): Homolog of NCBI NO: 24417378 NR Description: unknown [Arabidopsis thaliana]
  misc_feature (1)..(248): Homolog of NCBI NO: 25373414 NR Description: hypothetical protein F12G12.21 - Arabidopsis >gi|10086478|gb|AAG12538.1|AC015446_19 Similar to AIG1 protein thaliana] >gi|10092443|gb|AAG12846.1|AC079286_3 disease
  misc_feature (1)..(248): Homolog of NCBI NO: 12324509 NR Description: AIG1-like protein, 5' partial; 1-1205
  misc_feature (1)..(227): Homolog of NCBI NO: 15217724 NR Description: AIG1-like protein; protein id: At1g33930.1
  misc_feature (1)..(251): Homolog of NCBI NO: 15217731 NR Description: AIG1; protein id: At1g33960.1, supported by cDNA: [Arabidopsis thaliana] >gi|1703219|sp|P54120|AIG1_ARATH AIG1 >gi|1127804|gb|AAC49282.1| AIG1
  misc_feature (1)..(251): Homolog of NCBI NO: 10092442 NR Description: disease resistance protein AIG1; 916-2572
  misc_feature (1)..(251): Homolog of NCBI NO: 15234871 NR Description: AIG1-like protein; protein id: At4g09950.1
MSIASDDAGKEIVKCMNMAKDGIHAVLMVFSGTSRFSREDASTIETIKVFFGEKIVDHMVLVFTYGDLVGESKLKNMLNDAPEYLQNVVELCQNRVVVFDNRTKDRRLQAQQLDKLLYVVDSVCANNGGKPFTDQMFTRIKEVHDREKEVHTLGYSDEQISELKEEIHRTRDEQLAQITSMVEEKLNRTVEKLQQQLMEEQNARLEAEKVAHEAMRKSEAQIQELKERLEKARLENEEFRRMAQSSKCAIL

SEQ ID NO: 11046 - DNA, 1612 bp, Zea mays subsp. mays
  misc_feature (1)..(1612): Ceres Seq. ID no. 12374154
  misc_feature: MA Experiment ID: 108535 Result: Up-regulated in Transcription
  misc_feature: MA Experiment 108535 PARAMETER Experiment Name: Zm_Meristem_P Parameter: Age (day) Value: 8
  misc_feature: MA Experiment 108535 PARAMETER Experiment Name: Zm_Meristem_P Parameter: Organism Value: Zea mays
  misc_feature: MA Experiment 108535 PARAMETER Experiment Name: Zm_Meristem_P Parameter: Plant Line Value: 35A19
  misc_feature: MA Experiment 108535 PARAMETER Experiment Name: Zm_Meristem_P Parameter: Tissue Value: Root Meristem vs. Above Root Meristem
  misc_feature: MA Experiment ID: 108544 Result: Down-regulated in Transcription
  misc_feature: MA Experiment ID: 20000478 Result: Down-regulated in Transcription
  misc_feature: MA Experiment 20000478 PARAMETER Experiment Name: Zm_5mM_SA_P Parameter: Age (day) Value: 11
  misc_feature: MA Experiment 20000478 PARAMETER Experiment Name: Zm_5mM_SA_P Parameter: Organism Value: Zea mays
  misc_feature: MA Experiment 20000478 PARAMETER Experiment Name: Zm_5mM_SA_P Parameter: Plant Line Value: 35A19
  misc_feature: MA Experiment 20000478 PARAMETER Experiment Name: Zm_5mM_SA_P Parameter: Timepoint (hr) Value: 72
  misc_feature: MA Experiment 20000478 PARAMETER Experiment Name: Zm_5mM_SA_P Parameter: Tissue Value: Aerial
  misc_feature: MA Experiment 20000478 PARAMETER Experiment Name: Zm_5mM_SA_P Parameter: Treatment Value: 5mM SA vs. No Treatment
  misc_feature: MA Experiment ID: 20000480 Result: Down-regulated in Transcription
  misc_feature: MA Experiment 20000480 PARAMETER Experiment Name: Zm_Drought_P Parameter: Age (day) Value: 11
  misc_feature: MA Experiment 20000480 PARAMETER Experiment Name: Zm_Drought_P Parameter: Organism Value: Zea mays
  misc_feature: MA Experiment 20000480 PARAMETER Experiment Name: Zm_Drought_P Parameter: Plant Line Value: 35A19
  misc_feature: MA Experiment 20000480 PARAMETER Experiment Name: Zm_Drought_P Parameter: Timepoint (hr) Value: 72
  misc_feature: MA Experiment 20000480 PARAMETER Experiment Name: Zm_Drought_P Parameter: Tissue Value: Aerial
  misc_feature: MA Experiment 20000480 PARAMETER Experiment Name: Zm_Drought_P Parameter: Treatment Value: Drought vs. No Drought
  misc_feature: MA Experiment ID: 20000488 Result: Up-regulated in Transcription
  misc_feature: MA Experiment 20000488 PARAMETER Experiment Name: Zm_50mM_NH4NO3_L_to_H_P Parameter: Organism Value: Zea mays
  misc_feature: MA Experiment 20000488 PARAMETER Experiment Name: Zm_50mM_NH4NO3_L_to_H_P Parameter: Timepoint (hr) Value: 8
  misc_feature: MA Experiment 20000488 PARAMETER Experiment Name: Zm_50mM_NH4NO3_L_to_H_P Parameter: Tissue Value: Leaves
  misc_feature: MA Experiment 20000488 PARAMETER Experiment Name: Zm_50mM_NH4NO3_L_to_H_P Parameter: Treatment Value: 50mM NH4NO3 vs. 100mM Mannitol
gcactgttcaaacaaaccctccactgccctccccactctccccttcaccgcgccgcactcccaagtcccaacaggcctaaatggcggcggccggaacaattcccggcgccgccgcagccattggcgcttctgtgtcccaacgccaacgtcgcgtcggcgctccttctttcgtagctgcctacgtctccgagggcacccgcctcgtctgccggaggcagctccgtccggctccggtcctcgcttcttccttcatctccctttctcatccagcgaggcggcggttcctctgcgatgctgcggccggagcctcctcaggtcccgctggagaagccaagccccagggatttgcagagagatacccagctcttgtcacaggtttcttcttcttcttgtggtattttctgaatgtaatatttaacatcctcaacaagaagatcttcgactacttcccctatccatattttgtgtcagtgagccatctttttattggagtactatactgccttattggctggagcttcggcatcccaaagcgcgcgccaatcaactcaacacttctgaagcagcttgttccagttgcggtttgcccatgccattggccatgtaacaagcactgtgtcatttgctgctgtagctgtgtcatttgcccacactattaaagctctcgagccattcttcaatgcggctgcttcccagtttatccttggacaaccagttccattgacactctggctgtctcttgttccagtggtgattggtgtctcggtagcatccctcactgaactctcatttaattggactggcttcattaatgccatgatctcaaatatttctttcacctaccgaagcatctattctaagaaggctatgactgacatggatagtaccaacttgtatgcatacatatcaataattgctctctttgtctgcatcccccctgcaattattattgaaggacctcaattagtgcagcatggttttaaagatgcaattgccaaagttggattaacaaagttgatttctaatttttttgtggtgggcttattctatcacctttataaccaggttgctacaaacacattggagcgggtagcccctttaacacatgccatcggcaatgtgttgaaacgtgttttcgtcattggcttttccatcatcgcattcggcaacaagatcaccacacagactggaattggcacttccattgctgtttctggtgttgccctctactcatttataaaggctaagattgaggagaaaaagcaaataaagagtgcataaggtgttggctgatgtggatgcggttggtttgtcgctttgatggacctctattctctcggtgaacgaacaaacttgcaagatggataaaatcttgctatctcctagtacatttgattgttattcccagtctggtactgaggtgtgcggttgttgttggctaacttgtttatttgaagcaaatttgagcaatgctcagtggcatggaatttccatttctgttttccttcgctcatttattctgacttgacatggtgctattgtaatcttaagcagtagtgtctctagaatgttttccccaaggagatttcagtaccaaatttgaacaatcctc

SEQ ID NO: 11047 - protein, 192 aa, Zea mays subsp. mays
  peptide (1)..(192): Ceres Seq. ID no. 12374155
  misc_feature (1)..(169): Homolog of NCBI NO: 1352200 NR Description: TRIOSE PHOSPHATE/PHOSPHATE TRANSLOCATOR,
  misc_feature (32)..(169): Homolog of NCBI NO: 34904488 NR Description: putative triose phosphate/phosphate translocator
  misc_feature (1)..(169): Homolog of NCBI NO: 13195734 NR Description: triose phosphate translocator [Triticum aestivum]
  misc_feature (32)..(169): Homolog of NCBI NO: 13518113 NR Description: triose phosphate/phosphate translocator [Oryza
  misc_feature (7)..(169): Homolog of NCBI NO: 9757731 NR Description: phosphate/triose-phosphate translocator precursor
  misc_feature (7)..(169): Homolog of NCBI NO: 21593093 NR Description: phosphate/triose-phosphate translocator precursor
  misc_feature (35)..(169): Homolog of NCBI NO: 117291 NR Description: TRIOSE PHOSPHATE/PHOSPHATE TRANSLOCATOR,
  misc_feature (11)..(169): Homolog of NCBI NO: 9295273 NR Description: triose phosphate/phosphate translocator precursor
  misc_feature (7)..(169): Homolog of NCBI NO: 30694881 NR Description: phosphate/triose-phosphate translocator, putative
  misc_feature (35)..(169): Homolog of NCBI NO: 117290 NR Description: TRIOSE PHOSPHATE/PHOSPHATE TRANSLOCATOR,
MAAAGTIPGAAAAIGASVSQRQRRVGAPSFVAAYVSEGTRLVCRRQLRPAPVLASSFISLSHPARRRFLCDAAAGASSGPAGEAKPQGFAERYPALVTGFFFFLWYFLNVIFNILNKKIFDYFPYPYFVSVSHLFIGVLYCLIGWSFGIPKRAPINSTLLKQLVPVAVCPCHWPCNKHCVICCCSCVICPHY

SEQ ID NO: 11048 - protein, 154 aa, Zea mays subsp. mays
  peptide (1)..(154): Ceres Seq. ID no. 12374156
  misc_feature (1)..(154): Homolog of NCBI NO: 1352200 NR Description: TRIOSE PHOSPHATE/PHOSPHATE TRANSLOCATOR,
  misc_feature (1)..(154): Homolog of NCBI NO: 34904488 NR Description: putative triose phosphate/phosphate translocator
  misc_feature (1)..(154): Homolog of NCBI NO: 13195734 NR Description: triose phosphate translocator [Triticum aestivum]
  misc_feature (1)..(154): Homolog of NCBI NO: 13518113 NR Description: triose phosphate/phosphate translocator [Oryza
  misc_feature (1)..(153): Homolog of NCBI NO: 9757731 NR Description: phosphate/triose-phosphate translocator precursor
  misc_feature (1)..(154): Homolog of NCBI NO: 21593093 NR Description: phosphate/triose-phosphate translocator precursor
  misc_feature (1)..(153): Homolog of NCBI NO: 117291 NR Description: TRIOSE PHOSPHATE/PHOSPHATE TRANSLOCATOR,
  misc_feature (1)..(154): Homolog of NCBI NO: 9295273 NR Description: triose phosphate/phosphate translocator precursor
  misc_feature (1)..(154): Homolog of NCBI NO: 30694881 NR Description: phosphate/triose-phosphate translocator, putative
  misc_feature (1)..(154): Homolog of NCBI NO: 117290 NR Description: TRIOSE PHOSPHATE/PHOSPHATE TRANSLOCATOR,
MISNISFTYRSIYSKKAMTDMDSTNLYAYISIIALFVCIPPAIIIEGPQLVQHGFKDAIAKVGLTKLISNFFVVGLFYHLYNQVATNTLERVAPLTHAIGNVLKRVFVIGFSIIAFGNKITTQTGIGTSIAVSGVALYSFIKAKIEEKKQIKSA

SEQ ID NO: 11049 - protein, 138 aa, Zea mays subsp. mays
  peptide (1)..(138): Ceres Seq. ID no. 12374157
HCSNKPSTALPTLPFTAPHSQVPTGLNGGGRNNSRRRRSHWRFCVPTPTSRRRSFFRSCLRLRGHPPRLPEAAPSGSGPRFFLHLPFSSSEAAVPLRCCGRSLLRSRWRSQAPGICREIPSSCHRFLLLLVVFSECNI

SEQ ID NO: 11050 - DNA, 1081 bp, Zea mays subsp. mays
  misc_feature (1)..(1081): Ceres Seq. ID no. 12411966
  misc_feature: MA Experiment ID: 108523 Result: Up-regulated in Transcription
  misc_feature: MA Experiment 108523 PARAMETER Experiment Name: Zm_42deg_Heat_P Parameter: Age (day) Value: 8
  misc_feature: MA Experiment 108523 PARAMETER Experiment Name: Zm_42deg_Heat_P Parameter: Organism Value: Zea mays
  misc_feature: MA Experiment 108523 PARAMETER Experiment Name: Zm_42deg_Heat_P Parameter: Plant Line Value: 35A19
  misc_feature: MA Experiment 108523 PARAMETER Experiment Name: Zm_42deg_Heat_P Parameter: Temperature (deg C) Value: 42 vs. 22
  misc_feature: MA Experiment 108523 PARAMETER Experiment Name: Zm_42deg_Heat_P Parameter: Timepoint (hr) Value: 6
  misc_feature: MA Experiment 108523 PARAMETER Experiment Name: Zm_42deg_Heat_P Parameter: Tissue Value: Aerial
agcagttgggctctctcggcccgcctccttcccgagcacgcacgccgcctcgcttccaattcttccccccctctcctcgtccgctccgctccgctcctgcgttgccgtggagtgccgcccggggctccattccattccacccgtagcccggtccccccgcgccgccggcgcgccggttccttcggttcccgggatcaagatgattggttcattcattaccggaatgctaacgcttgttctcggatacgcgtaccctgcatacgactgctacaagacagtggagctgaacaggcctgaggtcgagcagctgcggttctggtgtcagtactggattttactcgcgtttctcaccgtactggagagagttggggaaagtttcgtatcatggttgccaatgtatagtgaagcaaagctcgcatttatcgtgtacttgtggtatccaaagacacgggggactgcctatgtatacgagtcattcttcaagccatacattgcaaaacatgaaactgagattgatcgaaatctgcttgagttgaggacaagggccggtgacatggcagttctttatttccagagggttacaaactatgctcagacaaggtcttatgaaatcttgcagtatattgcctcacagtcaccgactcaaagacaggcacatcagcagcagcaacgcccaccaccgccacggactcggcaggtcaaccctgcacctccacctattcccgcttggctgggggatctggaccaccgcaaaattagcgtcgatcaagatttccatctcacgcgaattgcaccacactggtctggttcttggtgattgactgagaagagggggaatgctgagttggttgaacagagtttgggtttcctcgcatgcgttctccgttgtacgaactggaaccggtttggtctcgaattgtgaatagtatcccagaaacagaagtggatgatcatttcaattcacagtgtagcgctaggaaatatggttgggaaccatcttctgcaagacgcgaaggcgcgacatgtcatgagcatttagcaacgatgatactactggtcacagtagtgtagtctggaattc

SEQ ID NO: 11051 - protein, 271 aa, Zea mays subsp. mays
  peptide (1)..(271): Ceres Seq. ID no. 12411967
  misc_feature (69)..(164): Pfam Name: TB2/DP1, HVA22 family Pfam Description: TB2/DP1, HVA22 family
  misc_feature (67)..(223): Homolog of NCBI NO: 20502988 NR Description: Putative InsB from Escherichia coli [Oryza sativa
  misc_feature (67)..(238): Homolog of NCBI NO: 18422223 NR Description: expressed protein; protein id: At5g42560.1,
  misc_feature (67)..(238): Homolog of NCBI NO: 21553813 NR Description: unknown [Arabidopsis thaliana]
  misc_feature (75)..(238): Homolog of NCBI NO: 9759014 NR Description: gene_id:K16E1.3~unknown protein [Arabidopsis
  misc_feature (67)..(235): Homolog of NCBI NO: 18394805 NR Description: expressed protein; protein id: At1g19950.1, by cDNA: 147130., supported by cDNA: gi_15010625 [Arabidopsis >gi|15010626|gb|AAK73972.1| At1g19950/T20H2_25 [Arabidopsis
  misc_feature (67)..(235): Homolog of NCBI NO: 21553483 NR Description: pathogenicity protein PATH531-like protein
  misc_feature (78)..(227): Homolog of NCBI NO: 15222332 NR Description: hypothetical protein; protein id: At1g75700.1
  misc_feature (78)..(235): Homolog of NCBI NO: 25513732 NR Description: T20H2.26 protein - Arabidopsis thaliana Contains similarity to Magnaporthe grisea pathogenicity protein
  misc_feature (67)..(231): Homolog of NCBI NO: 37531658 NR Description: putative Magnaporthe grisea pathogenicity protein
  misc_feature (66)..(224): Homolog of NCBI NO: 21671921 NR Description: Putative protein with HVA22 domain [Oryza sativa
AVGLSRPASFPSTHAASLPILPPLSSSAPLRSCVAVECRPGLHSIPPVARSPRAAGAPVPSVPGIKMIGSFITGMLTLVLGYAYPAYDCYKTVELNRPEVEQLRFWCQYWILLAFLTVLERVGESFVSWLPMYSEAKLAFIVYLWYPKTRGTAYVYESFFKPYIAKHETEIDRNLLELRTRAGDMAVLYFQRVTNYAQTRSYEILQYIASQSPTQRQAHQQQQRPPPPRTRQVNPAPPPIPAWLGDLDHRKISVDQDFHLTRIAPHWSGSW

SEQ ID NO: 11052 - protein, 205 aa, Zea mays subsp. mays
  peptide (1)..(205): Ceres Seq. ID no. 12411968
  misc_feature (3)..(98): Pfam Name: TB2/DP1, HVA22 family Pfam Description: TB2/DP1, HVA22 family
  misc_feature (1)..(157): Homolog of NCBI NO: 20502988 NR Description: Putative InsB from Escherichia coli [Oryza sativa
  misc_feature (1)..(172): Homolog of NCBI NO: 18422223 NR Description: expressed protein; protein id: At5g42560.1,
  misc_feature (1)..(172): Homolog of NCBI NO: 21553813 NR Description: unknown [Arabidopsis thaliana]
  misc_feature (9)..(172): Homolog of NCBI NO: 9759014 NR Description: gene_id:K16E1.3~unknown protein [Arabidopsis
  misc_feature (1)..(169): Homolog of NCBI NO: 18394805 NR Description: expressed protein; protein id: At1g19950.1, by cDNA: 147130., supported by cDNA: gi_15010625 [Arabidopsis >gi|15010626|gb|AAK73972.1| At1g19950/T20H2_25 [Arabidopsis
  misc_feature (1)..(169): Homolog of NCBI NO: 21553483 NR Description: pathogenicity protein PATH531-like protein
  misc_feature (12)..(161): Homolog of NCBI NO: 15222332 NR Description: hypothetical protein; protein id: At1g75700.1
  misc_feature (12)..(169): Homolog of NCBI NO: 25513732 NR Description: T20H2.26 protein - Arabidopsis thaliana Contains similarity to Magnaporthe grisea pathogenicity protein
  misc_feature (1)..(165): Homolog of NCBI NO: 37531658 NR Description: putative Magnaporthe grisea pathogenicity protein
  misc_feature (1)..(158): Homolog of NCBI NO: 21671921 NR Description: Putative protein with HVA22 domain [Oryza sativa
MIGSFITGMLTLVLGYAYPAYDCYKTVELNRPEVEQLRFWCQYWILLAFLTVLERVGESFVSWLPMYSEAKLAFIVYLWYPKTRGTAYVYESFFKPYIAKHETEIDRNLLELRTRAGDMAVLYFQRVTNYAQTRSYEILQYIASQSPTQRQAHQQQQRPPPPRTRQVNPAPPPIPAWLGDLDHRKISVDQDFHLTRIAPHWSGSW

SEQ ID NO: 11053 - protein, 197 aa, Zea mays subsp. mays
  peptide (1)..(197): Ceres Seq. ID no. 12411969
  misc_feature (1)..(90): Pfam Name: TB2/DP1, HVA22 family Pfam Description: TB2/DP1, HVA22 family
  misc_feature (1)..(149): Homolog of NCBI NO: 20502988 NR Description: Putative InsB from Escherichia coli [Oryza sativa
  misc_feature (1)..(164): Homolog of NCBI NO: 18422223 NR Description: expressed protein; protein id: At5g42560.1,
  misc_feature (1)..(164): Homolog of NCBI NO: 21553813 NR Description: unknown [Arabidopsis thaliana]
  misc_feature (1)..(164): Homolog of NCBI NO: 9759014 NR Description: gene_id:K16E1.3~unknown protein [Arabidopsis
  misc_feature (1)..(161): Homolog of NCBI NO: 18394805 NR Description: expressed protein; protein id: At1g19950.1, by cDNA: 147130., supported by cDNA: gi_15010625 [Arabidopsis >gi|15010626|gb|AAK73972.1| At1g19950/T20H2_25 [Arabidopsis
  misc_feature (1)..(161): Homolog of NCBI NO: 21553483 NR Description: pathogenicity protein PATH531-like protein
  misc_feature (4)..(153): Homolog of NCBI NO: 15222332 NR Description: hypothetical protein; protein id: At1g75700.1
  misc_feature (4)..(161): Homolog of NCBI NO: 25513732 NR Description: T20H2.26 protein - Arabidopsis thaliana Contains similarity to Magnaporthe grisea pathogenicity protein
  misc_feature (1)..(157): Homolog of NCBI NO: 37531658 NR Description: putative Magnaporthe grisea pathogenicity protein
  misc_feature (1)..(150): Homolog of NCBI NO: 21671921 NR Description: Putative protein with HVA22 domain [Oryza sativa
MLTLVLGYAYPAYDCYKTVELNRPEVEQLRFWCQYWILLAFLTVLERVGESFVSWLPMYSEAKLAFIVYLWYPKTRGTAYVYESFFKPYIAKHETEIDRNLLELRTRAGDMAVLYFQRVTNYAQTRSYEILQYIASQSPTQRQAHQQQQRPPPPRTRQVNPAPPPIPAWLGDLDHRKISVDQDFHLTRIAPHWSGSW

SEQ ID NO: 11054 - DNA, 1191 bp, Zea mays subsp. mays
  misc_feature (1)..(1191): Ceres Seq. ID no. 13634967
  misc_feature: MA Experiment ID: 108528 Result: Down-regulated in Transcription
  misc_feature: MA Experiment 108528 PARAMETER Experiment Name: Zm_Imbibed_Seeds_P Parameter: Age (day) Value: 5 vs. 2
  misc_feature: MA Experiment 108528 PARAMETER Experiment Name: Zm_Imbibed_Seeds_P Parameter: Organism Value: Zea mays
  misc_feature: MA Experiment 108528 PARAMETER Experiment Name: Zm_Imbibed_Seeds_P Parameter: Plant Line Value: 35A19
  misc_feature: MA Experiment 108528 PARAMETER Experiment Name: Zm_Imbibed_Seeds_P Parameter: Tissue Value: Aerial vs. Embryo
  misc_feature: MA Experiment ID: 108529 Result: Down-regulated in Transcription
  misc_feature: MA Experiment 108529 PARAMETER Experiment Name: Zm_Imbibed_Seeds_P Parameter: Age (day) Value: 5 vs. 2
  misc_feature: MA Experiment 108529 PARAMETER Experiment Name: Zm_Imbibed_Seeds_P Parameter: Organism Value: Zea mays
  misc_feature: MA Experiment 108529 PARAMETER Experiment Name: Zm_Imbibed_Seeds_P Parameter: Plant Line Value: 35A19
  misc_feature: MA Experiment 108529 PARAMETER Experiment Name: Zm_Imbibed_Seeds_P Parameter: Tissue Value: Roots vs. Embryo
  misc_feature: MA Experiment ID: 108546 Result: Down-regulated in Transcription
  misc_feature: MA Experiment 108546 PARAMETER Experiment Name: Zm_Imbibed_Seeds_P Parameter: Age (day) Value: 3 vs. 2
  misc_feature: MA Experiment 108546 PARAMETER Experiment Name: Zm_Imbibed_Seeds_P Parameter: Organism Value: Zea mays
  misc_feature: MA Experiment 108546 PARAMETER Experiment Name: Zm_Imbibed_Seeds_P Parameter: Plant Line Value: 35A19
  misc_feature: MA Experiment 108546 PARAMETER Experiment Name: Zm_Imbibed_Seeds_P Parameter: Tissue Value: Roots vs. Embryo
  misc_feature: MA Experiment ID: 20000478 Result: Up-regulated in Transcription
  misc_feature: MA Experiment 20000478 PARAMETER Experiment Name: Zm_5mM_SA_P Parameter: Age (day) Value: 11
  misc_feature: MA Experiment 20000478 PARAMETER Experiment Name: Zm_5mM_SA_P Parameter: Organism Value: Zea mays
  misc_feature: MA Experiment 20000478 PARAMETER Experiment Name: Zm_5mM_SA_P Parameter: Plant Line Value: 35A19
  misc_feature: MA Experiment 20000478 PARAMETER Experiment Name: Zm_5mM_SA_P Parameter: Timepoint (hr) Value: 72
  misc_feature: MA Experiment 20000478 PARAMETER Experiment Name: Zm_5mM_SA_P Parameter: Tissue Value: Aerial
  misc_feature: MA Experiment 20000478 PARAMETER Experiment Name: Zm_5mM_SA_P Parameter: Treatment Value: 5mM SA vs. No Treatment
  misc_feature: MA Experiment ID: 20000492 Result: Up-regulated in Transcription
  misc_feature: MA Experiment 20000492 PARAMETER Experiment Name: Zm_Hybrid_Seed_Dev_P Parameter: DAP Value: 12
  misc_feature: MA Experiment 20000492 PARAMETER Experiment Name: Zm_Hybrid_Seed_Dev_P Parameter: Organism Value: Zea mays
  misc_feature: MA Experiment 20000492 PARAMETER Experiment Name: Zm_Hybrid_Seed_Dev_P Parameter: Plant Line Value: 35A19
  misc_feature: MA Experiment 20000492 PARAMETER Experiment Name: Zm_Hybrid_Seed_Dev_P Parameter: Tissue Value: Fert Kernel vs. Unfert Floret
  misc_feature: MA Experiment ID: 20000535 Result: Down-regulated in Transcription
  misc_feature: MA Experiment 20000535 PARAMETER Experiment Name: Zm_Hybrid_Seed_Dev_P Parameter: DAP Value: 30 vs. 12
  misc_feature: MA Experiment 20000535 PARAMETER Experiment Name: Zm_Hybrid_Seed_Dev_P Parameter: Organism Value: Zea mays
  misc_feature: MA Experiment 20000535 PARAMETER Experiment Name: Zm_Hybrid_Seed_Dev_P Parameter: Plant Line Value: 35A19
  misc_feature: MA Experiment 20000535 PARAMETER Experiment Name: Zm_Hybrid_Seed_Dev_P Parameter: Tissue Value: Embryo vs. Unfert Floret
agctccctttaatacctcaccctcctctcctcccttctctggactggccggatctcttccctgcagatcgagaggcactgccacaccaccatcaccccatgctcaacatgatgactgatctgagctgcgggccgtcgtccaaggtcaaggagcaggtggcggcggcgcgacgggctccggcgacaggcaggggcaggggagaggcaagatcgagatcaagcgcatcgagaacacgacgagccggcaggtgaccttctgcaagcgccgcaacggcctgctcaagaaggcgtacgagctctcggtgctctgcgacgccgaggtcgcgctcgtcgtcttctccagccgcggccgcctctacgagtacgccaacaacagtgtgaagtccaccattgagaggtacaagaaggccaacagtgactcctccaactctgggcacagttgcagaagtcaatgcccagtactaccagcaggagtcctccaagctgcgacagatgatccacagcttgcaaaacgcaaacactaggaacatagtgggagattccatccacaccatgggcctcagggatcttaaacaaatggagggcaagctggagaaagccataatcaagattagagctagaaagaatgagctgctatacgctgaagttgactatatgcaaaaaagggagatggatctgcagactgacaacatgtacctgaggagcaagatcgctgagagtaatgaaacggggcagccggcgatgcacatgacgatgggagcgccgccgacgagcgagtacgaccacatggcccctttcgactcgagaaactttctgcaagtgagcatgcctcagcactactcccatcagctgcaacctacaaccctccagctcggatgatgaaatcagcgctatacctggcggcgcccggcccccaatcgagatagatcacgcatgcagttatatcatgtgccaaatcgagatctcaagtaactctacgtacgtttgcttaattattaataattgtgattagtgcaactgttagggtatatatatttgtgagtgccaccactgtgtgcgtgcatttgtacgtgtgaatttagctgttgcatctactactattgtaccctccggccaggccatatcatcagaaacgcgggtttatttacgcatacttatatatatatatgatttgtgtgctttatatagattg

SEQ ID NO: 11055 - protein, 128 aa, Zea mays subsp. mays
  peptide (1)..(128): Ceres Seq. ID no. 13634968
  misc_feature (1)..(75): Pfam Name: K-box region Pfam Description: K-box region
  misc_feature (1)..(75): Pfam Name: K-box region Pfam Description: K-box region
  misc_feature (1)..(128): Homolog of NCBI NO: 1006768 NR Description: ZMM2 [Zea mays]
  misc_feature (1)..(128): Homolog of NCBI NO: 2130078 NR Description: MADS-box protein 3 - rice
  misc_feature (1)..(128): Homolog of NCBI NO: 34903684 NR Description: putative MADS-box protein [Oryza sativa (japonica
  misc_feature (1)..(128): Homolog of NCBI NO: 19698536 NR Description: AGAMOUS-like protein 1 HvAG1 [Hordeum vulgare
  misc_feature (1)..(128): Homolog of NCBI NO: 29372746 NR Description: putative MADS-domain transcription factor [Zea
  misc_feature (1)..(128): Homolog of NCBI NO: 2130078 NR Description: MADS-box protein 3 - rice
  misc_feature (1)..(128): Homolog of NCBI NO: 19698536 NR Description: AGAMOUS-like protein 1 HvAG1 [Hordeum vulgare
  misc_feature (1)..(127): Homolog of NCBI NO: 3913007 NR Description: AGAMOUS protein (NAG1) >gi|7446523|pir||T03592
  misc_feature (1)..(119): Homolog of NCBI NO: 24636577 NR Description: MADS box transcription factor [Triticum aestivum]
  misc_feature (1)..(125): Homolog of NCBI NO: 19698538 NR Description: AGAMOUS-like protein 2 HvAG2 [Hordeum vulgare
  misc_feature (1)..(128): Homolog of NCBI NO: 18650789 NR Description: MADS-box transcription factor [Phalaenopsis
  misc_feature (1)..(128): Homolog of NCBI NO: 7446524 NR Description: hypothetical protein - maize
  misc_feature (1)..(128): Homolog of NCBI NO: 29372746 NR Description: putative MADS-domain transcription factor [Zea
  misc_feature (1)..(128): Homolog of NCBI NO: 34903684 NR Description: putative MADS-box protein [Oryza sativa (japonica
  misc_feature (1)..(128): Homolog of NCBI NO: 1006768 NR Description: ZMM2 [Zea mays]
  misc_feature (1)..(128): Homolog of NCBI NO: 7446524 NR Description: hypothetical protein - maize
  misc_feature (1)..(128): Homolog of NCBI NO: 18650789 NR Description: MADS-box transcription factor [Phalaenopsis
  misc_feature (1)..(125): Homolog of NCBI NO: 19698538 NR Description: AGAMOUS-like protein 2 HvAG2 [Hordeum vulgare
  misc_feature (1)..(119): Homolog of NCBI NO: 24636577 NR Description: MADS box transcription factor [Triticum aestivum]
  misc_feature (1)..(127): Homolog of NCBI NO: 3913007 NR Description: AGAMOUS protein (NAG1) >gi|7446523|pir||T03592
MIHSLQNANTRNIVGDSIHTMGLRDLKQMEGKLEKAIIKIRARKNELLYAEVDYMQKREMDLQTDNMYLRSKIAESNETGQPAMHMTMGAPPTSEYDHMAPFDSRNFLQVSMPQHYSHQLQPTTLQLG

SEQ ID NO: 11056 - protein, 108 aa, Zea mays subsp. mays
  peptide (1)..(108): Ceres Seq. ID no. 13634969
  misc_feature (1)..(55): Pfam Name: K-box region Pfam Description: K-box region
  misc_feature (1)..(55): Pfam Name: K-box region Pfam Description: K-box region
  misc_feature (1)..(108): Homolog of NCBI NO: 1006768 NR Description: ZMM2 [Zea mays]
  misc_feature (1)..(108): Homolog of NCBI NO: 2130078 NR Description: MADS-box protein 3 - rice
  misc_feature (1)..(108): Homolog of NCBI NO: 34903684 NR Description: putative MADS-box protein [Oryza sativa (japonica
  misc_feature (1)..(108): Homolog of NCBI NO: 19698536 NR Description: AGAMOUS-like protein 1 HvAG1 [Hordeum vulgare
  misc_feature (1)..(108): Homolog of NCBI NO: 29372746 NR Description: putative MADS-domain transcription factor [Zea
  misc_feature (1)..(108): Homolog of NCBI NO: 2130078 NR Description: MADS-box protein 3 - rice
  misc_feature (1)..(108): Homolog of NCBI NO: 19698536 NR Description: AGAMOUS-like protein 1 HvAG1 [Hordeum vulgare
  misc_feature (1)..(107): Homolog of NCBI NO: 3913007 NR Description: AGAMOUS protein (NAG1) >gi|7446523|pir||T03592
  misc_feature (1)..(99): Homolog of NCBI NO: 24636577 NR Description: MADS box transcription factor [Triticum aestivum]
  misc_feature (1)..(105): Homolog of NCBI NO: 19698538 NR Description: AGAMOUS-like protein 2 HvAG2 [Hordeum vulgare
  misc_feature (1)..(108): Homolog of NCBI NO: 18650789 NR Description: MADS-box transcription factor [Phalaenopsis
  misc_feature (1)..(108): Homolog of NCBI NO: 7446524 NR Description: hypothetical protein - maize
  misc_feature (1)..(108): Homolog of NCBI NO: 29372746 NR Description: putative MADS-domain transcription factor [Zea
  misc_feature (1)..(108): Homolog of NCBI NO: 34903684 NR Description: putative MADS-box protein [Oryza sativa (japonica
  misc_feature (1)..(108): Homolog of NCBI NO: 1006768 NR Description: ZMM2 [Zea mays]
  misc_feature (1)..(108): Homolog of NCBI NO: 7446524 NR Description: hypothetical protein - maize
  misc_feature (1)..(108): Homolog of NCBI NO: 18650789 NR Description: MADS-box transcription factor [Phalaenopsis
  misc_feature (1)..(105): Homolog of NCBI NO: 19698538 NR Description: AGAMOUS-like protein 2 HvAG2 [Hordeum vulgare
  misc_feature (1)..(99): Homolog of NCBI NO: 24636577 NR Description: MADS box transcription factor [Triticum aestivum]
  misc_feature (1)..(107): Homolog of NCBI NO: 3913007 NR Description: AGAMOUS protein (NAG1) >gi|7446523|pir||T03592
MGLRDLKQMEGKLEKAIIKIRARKNELLYAEVDYMQKREMDLQTDNMYLRSKIAESNETGQPAMHMTMGAPPTSEYDHMAPFDSRNFLQVSMPQHYSHQLQPTTLQLG

SEQ ID NO: 11057 - protein, 100 aa, Zea mays subsp. mays
  peptide (1)..(100): Ceres Seq. ID no. 13634970
  misc_feature (1)..(100): Homolog of NCBI NO: 1006768 NR Description: ZMM2 [Zea mays]
  misc_feature (1)..(100): Homolog of NCBI NO: 2130078 NR Description: MADS-box protein 3 - rice
  misc_feature (1)..(100): Homolog of NCBI NO: 34903684 NR Description: putative MADS-box protein [Oryza sativa (japonica
  misc_feature (1)..(100): Homolog of NCBI NO: 19698536 NR Description: AGAMOUS-like protein 1 HvAG1 [Hordeum vulgare
  misc_feature (1)..(100): Homolog of NCBI NO: 29372746 NR Description: putative MADS-domain transcription factor [Zea
  misc_feature (1)..(100): Homolog of NCBI NO: 7446524 NR Description: hypothetical protein - maize
  misc_feature (1)..(100): Homolog of NCBI NO: 18650789 NR Description: MADS-box transcription factor [Phalaenopsis
  misc_feature (1)..(97): Homolog of NCBI NO: 19698538 NR Description: AGAMOUS-like protein 2 HvAG2 [Hordeum vulgare
  misc_feature (1)..(91): Homolog of NCBI NO: 24636577 NR Description: MADS box transcription factor [Triticum aestivum]
  misc_feature (1)..(99): Homolog of NCBI NO: 3913007 NR Description: AGAMOUS protein (NAG1) >gi|7446523|pir||T03592
  misc_feature (1)..(100): Homolog of NCBI NO: 1006768 NR Description: ZMM2 [Zea mays]
  misc_feature (1)..(100): Homolog of NCBI NO: 2130078 NR Description: MADS-box protein 3 - rice
  misc_feature (1)..(100): Homolog of NCBI NO: 34903684 NR Description: putative MADS-box protein [Oryza sativa (japonica
  misc_feature (1)..(100): Homolog of NCBI NO: 19698536 NR Description: AGAMOUS-like protein 1 HvAG1 [Hordeum vulgare
  misc_feature (1)..(100): Homolog of NCBI NO: 29372746 NR Description: putative MADS-domain transcription factor [Zea
  misc_feature (1)..(100): Homolog of NCBI NO: 7446524 NR Description: hypothetical protein - maize
  misc_feature (1)..(100): Homolog of NCBI NO: 18650789 NR Description: MADS-box transcription factor [Phalaenopsis
  misc_feature (1)..(97): Homolog of NCBI NO: 19698538 NR Description: AGAMOUS-like protein 2 HvAG2 [Hordeum vulgare
  misc_feature (1)..(91): Homolog of NCBI NO: 24636577 NR Description: MADS box transcription factor [Triticum aestivum]
  misc_feature (1)..(99): Homolog of NCBI NO: 3913007 NR Description: AGAMOUS protein (NAG1) >gi|7446523|pir||T03592
MEGKLEKAIIKIRARKNELLYAEVDYMQKREMDLQTDNMYLRSKIAESNETGQPAMHMTMGAPPTSEYDHMAPFDSRNFLQVSMPQHYSHQLQPTTLQLG

SEQ ID NO: 11058 - DNA, 1623 bp, Zea mays subsp. mays
  misc_feature (1)..(1623): Ceres Seq. ID no. 12373419
  misc_feature: MA Experiment ID: 108522 Result: Down-regulated in Transcription
  misc_feature: MA Experiment 108522 PARAMETER Experiment Name: Zm_42deg_Heat_P Parameter: Age (day) Value: 8
  misc_feature: MA Experiment 108522 PARAMETER Experiment Name: Zm_42deg_Heat_P Parameter: Organism Value: Zea mays
  misc_feature: MA Experiment 108522 PARAMETER Experiment Name: Zm_42deg_Heat_P Parameter: Plant Line Value: 35A19
  misc_feature: MA Experiment 108522 PARAMETER Experiment Name: Zm_42deg_Heat_P Parameter: Temperature (deg C) Value: 42 vs. 22
  misc_feature: MA Experiment 108522 PARAMETER Experiment Name: Zm_42deg_Heat_P Parameter: Timepoint (hr) Value: 1
  misc_feature: MA Experiment 108522 PARAMETER Experiment Name: Zm_42deg_Heat_P Parameter: Tissue Value: Aerial
  misc_feature: MA Experiment ID: 108535 Result: Up-regulated in Transcription
  misc_feature: MA Experiment 108535 PARAMETER Experiment Name: Zm_Meristem_P Parameter: Age (day) Value: 8
  misc_feature: MA Experiment 108535 PARAMETER Experiment Name: Zm_Meristem_P Parameter: Organism Value: Zea mays
  misc_feature: MA Experiment 108535 PARAMETER Experiment Name: Zm_Meristem_P Parameter: Plant Line Value: 35A19
  misc_feature: MA Experiment 108535 PARAMETER Experiment Name: Zm_Meristem_P Parameter: Tissue Value: Root Meristem vs. Above Root Meristem
  misc_feature: MA Experiment ID: 20000487 Result: Up-regulated in Transcription
  misc_feature: MA Experiment 20000487 PARAMETER Experiment Name: Zm_50mM_NH4NO3_L_to_H_P Parameter: Organism Value: Zea mays
  misc_feature: MA Experiment 20000487 PARAMETER Experiment Name: Zm_50mM_NH4NO3_L_to_H_P Parameter: Timepoint (hr) Value: 4
  misc_feature: MA Experiment 20000487 PARAMETER Experiment Name: Zm_50mM_NH4NO3_L_to_H_P Parameter: Tissue Value: Leaves
  misc_feature: MA Experiment 20000487 PARAMETER Experiment Name: Zm_50mM_NH4NO3_L_to_H_P Parameter: Treatment Value: 50mM NH4NO3 vs. 100mM Mannitol
aatcgcttccccagaccccagtccccagtccccttttcccaacggccacactttcatcagttcccctttccacggcgccgccggaatccccacaaagccccaaaaccctacggccacctcgccacccccaacgaaaacccagaccacgagatggcccccggtggagagggcaagccaagcacgggcggcggcggcggcggcgggaggaagcgcaagttccttccccacgggaagccggtgcggaagggggcctacccgctgcgccccggcgtgcagggcttcttcatcacctgcgacggcggccgcgagcaccaggccacccgcgaggcgctctccctcctcgactccttctatgaagacctggtggatgggaaaggatcggatgagaagcctaaaaacattccagagaagccactgaacaaaaagataaagtttgaggactctgattcctcagatgatgaggatgaagacaactctggtgaggaagccgacaatgggaatgtgaatgatgtggagaaaggtgaaaccgctccatctgagaagcaacaggaggtgcttgatacctctaataccgcaagcaaggacaatactgctctatctgagaagaaagaggaggtgcttgatacctctgataccgtgagtaaggacaatgaggaacaagcagtcactgctgatgaaccaagagaaaagaagcaacgagtggaagatcctccagtttttgagcaggccgtgcaaaaagagactgctgatgaaccaaaggagtccactgataaaccaaaggagtccagtgaaaaaaatattgacgatttaattgatgaggacctgaaagaaataggggacaggaaaaagaggctctttgcaagcctcgagacaggctgcaatggatgcatattcattcaaatgcataaaagagcaggagaccctggtccagttgagattgtacaaaacatgatgtcatctgctgcattgactcgtaaacatatgtcaagatttattctgcgagttttgcctgttgaggtggcatgctatgcatctgaagaggaaataacaaaggcaattagtccccttattgaaaagtacttcccaaaagaatgctcctcaggtcataagtttgcagtgttatatgaagcaaggtcaaacacaggaattgatagaatgaaaatcataaacgcagcagcgaaatctgtaccacaacctcataaagttgacctgaagaacccagacaagactattgttgtccagattgcaaagaccatatgcatgattggagttgtggaaaggtacaaagagctctcgaagttcaacctaaggcagctgacctcaccggagtcggagaagtaagcctatgagtgacaaaatcttccaggcaaaacgtggaccaacttaaatcagcagcagcgtcaggtggttaggcgctagcgaattaaattatggccggccgaacctcactgtcttgaaagattcagatgttctaatgtttaatgctttaccaccagtggttagtggttgctggttcatgcttcccaggttagattcacggtttttttttgaggctgtagaaagatctgacgatacttcatgtgtgctttctctctgacgatggttccatacaggggcttaccg

SEQ ID NO: 11059 - protein, 446 aa, Zea mays subsp. mays
  peptide (1)..(446): Ceres Seq. ID no. 12373420
  misc_feature (334)..(426): Pfam Name: THUMP domain Pfam Description: THUMP domain
  misc_feature (69)..(441): Homolog of NCBI NO: 18416857 NR Description: putative protein; protein id: At5g12410.1 thaliana] >gi|14586371|emb|CAC42902.1| putative protein thaliana] >gi|22022558|gb|AAM83236.1| At5g12410 [Arabidopsis
  misc_feature (235)..(446): Homolog of NCBI NO: 24657540 NR Description: CG15014-PA [Drosophila melanogaster]
  misc_feature (244)..(441): Homolog of NCBI NO: 31198447 NR Description: ENSANGP00000021551 [Anopheles gambiae]
  misc_feature (252)..(443): Homolog of NCBI NO: 12653357 NR Description: hypothetical protein FLJ20274 [Homo sapiens]
  misc_feature (241)..(446): Homolog of NCBI NO: 38174056 NR Description: Unknown (protein for MGC:75804) [Silurana
  misc_feature (252)..(439): Homolog of NCBI NO: 21704176 NR Description: RIKEN cDNA 6330575P11; similar to hypothetical FLJ20274 [Mus musculus] >gi|13435852|gb|AAH04776.1| Similar to protein FLJ20274 [Mus musculus] >gi|26327889|dbj|BAC27685.1|
  misc_feature (252)..(439): Homolog of NCBI NO: 34859071 NR Description: similar to RIKEN cDNA 6330575P11 [Rattus
  misc_feature (252)..(443): Homolog of NCBI NO: 8923247 NR Description: hypothetical protein FLJ20274 [Homo sapiens]
  misc_feature (252)..(443): Homolog of NCBI NO: 34365206 NR Description: hypothetical protein [Homo sapiens]
  misc_feature (284)..(443): Homolog of NCBI NO: 2988398 NR Description: Unknown gene product [Homo sapiens]
NRFPRPQSPVPFSQRPHFHQFPFPRRRRNPHKAPKPYGHLATPNENPDHEMAPGGEGKPSTGGGGGGGRKRKFLPHGKPVRKGAYPLRPGVQGFFITCDGGREHQATREALSLLDSFYEDLVDGKGSDEKPKNIPEKPLNKKIKFEDSDSSDDEDEDNSGEEADNGNVNDVEKGETAPSEKQQEVLDTSNTASKDNTALSEKKEEVLDTSDTVSKDNEEQAVTADEPREKKQRVEDPPVFEQAVQKETADEPKESTDKPKESSEKNIDDLIDEDLKEIGDRKKRLFASLETGCNGCIFIQMHKRAGDPGPVEIVQNMMSSAALTRKHMSRFILRVLPVEVACYASEEEITKAISPLIEKYFPKECSSGHKFAVLYEARSNTGIDRMKIINAAAKSVPQPHKVDLKNPDKTIVVQIAKTICMIGVVERYKELSKFNLRQLTSPESEK

SEQ ID NO: 11060 - protein, 396 aa, Zea mays subsp. mays
  peptide (1)..(396): Ceres Seq. ID no. 12373421
  misc_feature (284)..(376): Pfam Name: THUMP domain Pfam Description: THUMP domain
  misc_feature (19)..(391): Homolog of NCBI NO: 18416857 NR Description: putative protein; protein id: At5g12410.1 thaliana] >gi|14586371|emb|CAC42902.1| putative protein thaliana] >gi|22022558|gb|AAM83236.1| At5g12410 [Arabidopsis
  misc_feature (185)..(396): Homolog of NCBI NO: 24657540 NR Description: CG15014-PA [Drosophila melanogaster]
  misc_feature (194)..(391): Homolog of NCBI NO: 31198447 NR Description: ENSANGP00000021551 [Anopheles gambiae]
  misc_feature (202)..(393): Homolog of NCBI NO: 12653357 NR Description: hypothetical protein FLJ20274 [Homo sapiens]
  misc_feature (191)..(396): Homolog of NCBI NO: 38174056 NR Description: Unknown (protein for MGC:75804) [Silurana
  misc_feature (202)..(389): Homolog of NCBI NO: 21704176 NR Description: RIKEN cDNA 6330575P11; similar to hypothetical FLJ20274 [Mus musculus] >gi|13435852|gb|AAH04776.1| Similar to protein FLJ20274 [Mus musculus] >gi|26327889|dbj|BAC27685.1|
  misc_feature (202)..(389): Homolog of NCBI NO: 34859071 NR Description: similar to RIKEN cDNA 6330575P11 [Rattus
  misc_feature (202)..(393): Homolog of NCBI NO: 8923247 NR Description: hypothetical protein FLJ20274 [Homo sapiens]
  misc_feature (202)..(393): Homolog of NCBI NO: 34365206 NR Description: hypothetical protein [Homo sapiens]
  misc_feature (234)..(393): Homolog of NCBI NO: 2988398 NR Description: Unknown gene product [Homo sapiens]
MAPGGEGKPSTGGGGGGGRKRKFLPHGKPVRKGAYPLRPGVQGFFITCDGGREHQATREALSLLDSFYEDLVDGKGSDEKPKNIPEKPLNKKIKFEDSDSSDDEDEDNSGEEADNGNVNDVEKGETAPSEKQQEVLDTSNTASKDNTALSEKKEEVLDTSDTVSKDNEEQAVTADEPREKKQRVEDPPVFEQAVQKETADEPKESTDKPKESSEKNIDDLIDEDLKEIGDRKKRLFASLETGCNGCIFIQMHKRAGDPGPVEIVQNMMSSAALTRKHMSRFILRVLPVEVACYASEEEITKAISPLIEKYFPKECSSGHKFAVLYEARSNTGIDRMKIINAAAKSVPQPHKVDLKNPDKTIVVQIAKTICMIGVVERYKELSKFNLRQLTSPESEK

SEQ ID NO: 11061 - DNA, 1419 bp, Zea mays subsp. mays
  misc_feature (1)..(1419): Ceres Seq. ID no. 12566155
  misc_feature: MA Experiment ID: 108504 Result: Up-regulated in Transcription
  misc_feature: MA Experiment 108504 PARAMETER Experiment Name: Zm_Drought_P Parameter: Age (day) Value: 8
  misc_feature: MA Experiment 108504 PARAMETER Experiment Name: Zm_Drought_P Parameter: Organism Value: Zea mays
  misc_feature: MA Experiment 108504 PARAMETER Experiment Name: Zm_Drought_P Parameter: Plant Line Value: 35A19
  misc_feature: MA Experiment 108504 PARAMETER Experiment Name: Zm_Drought_P Parameter: Timepoint (hr) Value: 12
  misc_feature: MA Experiment 108504 PARAMETER Experiment Name: Zm_Drought_P Parameter: Tissue Value: Aerial
  misc_feature: MA Experiment 108504 PARAMETER Experiment Name: Zm_Drought_P Parameter: Treatment Value: Drought vs. No Drought
  misc_feature: MA Experiment ID: 108522 Result: Up-regulated in Transcription
  misc_feature: MA Experiment 108522 PARAMETER Experiment Name: Zm_42deg_Heat_P Parameter: Age (day) Value: 8
  misc_feature: MA Experiment 108522 PARAMETER Experiment Name: Zm_42deg_Heat_P Parameter: Organism Value: Zea mays
  misc_feature: MA Experiment 108522 PARAMETER Experiment Name: Zm_42deg_Heat_P Parameter: Plant Line Value: 35A19
  misc_feature: MA Experiment 108522 PARAMETER Experiment Name: Zm_42deg_Heat_P Parameter: Temperature (deg C) Value: 42 vs. 22
  misc_feature: MA Experiment 108522 PARAMETER Experiment Name: Zm_42deg_Heat_P Parameter: Timepoint (hr) Value: 1
  misc_feature: MA Experiment 108522 PARAMETER Experiment Name: Zm_42deg_Heat_P Parameter: Tissue Value: Aerial
  misc_feature: MA Experiment ID: 108523 Result: Up-regulated in Transcription
  misc_feature: MA Experiment 108523 PARAMETER Experiment Name: Zm_42deg_Heat_P Parameter: Age (day) Value: 8
  misc_feature: MA Experiment 108523 PARAMETER Experiment Name: Zm_42deg_Heat_P Parameter: Organism Value: Zea mays
  misc_feature: MA Experiment 108523 PARAMETER Experiment Name: Zm_42deg_Heat_P Parameter: Plant Line Value: 35A19
  misc_feature: MA Experiment 108523 PARAMETER Experiment Name: Zm_42deg_Heat_P Parameter: Temperature (deg C) Value: 42 vs. 22
  misc_feature: MA Experiment 108523 PARAMETER Experiment Name: Zm_42deg_Heat_P Parameter: Timepoint (hr) Value: 6
  misc_feature: MA Experiment 108523 PARAMETER Experiment Name: Zm_42deg_Heat_P Parameter: Tissue Value: Aerial
  misc_feature: MA Experiment ID: 108536 Result: Up-regulated in Transcription
  misc_feature: MA Experiment 108536 PARAMETER Experiment Name: Zm_Meristem_P Parameter: Age (day) Value: 8
  misc_feature: MA Experiment 108536 PARAMETER Experiment Name: Zm_Meristem_P Parameter: Organism Value: Zea mays
  misc_feature: MA Experiment 108536 PARAMETER Experiment Name: Zm_Meristem_P Parameter: Plant Line Value: 35A19
  misc_feature: MA Experiment 108536 PARAMETER Experiment Name: Zm_Meristem_P Parameter: Tissue Value: Shoot Meristem vs. Above Shoot Meristem
  misc_feature: MA Experiment ID: 108556 Result: Up-regulated in Transcription
  misc_feature: MA Experiment 108556 PARAMETER Experiment Name: Zm_Drought_P Parameter: Age (day) Value: 9
  misc_feature: MA Experiment 108556 PARAMETER Experiment Name: Zm_Drought_P Parameter: Organism Value: Zea mays
  misc_feature: MA Experiment 108556 PARAMETER Experiment Name: Zm_Drought_P Parameter: Plant Line Value: 35A19
  misc_feature: MA Experiment 108556 PARAMETER Experiment Name: Zm_Drought_P Parameter: Timepoint (hr) Value: 24
  misc_feature: MA Experiment 108556 PARAMETER Experiment Name: Zm_Drought_P Parameter: Tissue Value: Aerial
  misc_feature: MA Experiment 108556 PARAMETER Experiment Name: Zm_Drought_P Parameter: Treatment Value: Drought vs. No Drought
  misc_feature: MA Experiment ID: 108559 Result: Up-regulated in Transcription
  misc_feature: MA Experiment 108559 PARAMETER Experiment Name: Zm_5mM_NO_P Parameter: Age (day) Value: 8
  misc_feature: MA Experiment 108559 PARAMETER Experiment Name: Zm_5mM_NO_P Parameter: Organism Value: Zea mays
  misc_feature: MA Experiment 108559 PARAMETER Experiment Name: Zm_5mM_NO_P Parameter: Plant Line Value: 35A19
  misc_feature: MA Experiment 108559 PARAMETER Experiment Name: Zm_5mM_NO_P Parameter: Timepoint (hr) Value: 12
  misc_feature: MA Experiment 108559 PARAMETER Experiment Name: Zm_5mM_NO_P Parameter: Tissue Value: Aerial
  misc_feature: MA Experiment 108559 PARAMETER Experiment Name: Zm_5mM_NO_P Parameter: Treatment Value: 5mM NO vs. No Treatment
  misc_feature: MA Experiment ID: 20000477 Result: Up-regulated in Transcription
  misc_feature: MA Experiment 20000477 PARAMETER Experiment Name: Zm_5mM_SA_P Parameter: Age (day) Value: 10
  misc_feature: MA Experiment 20000477 PARAMETER Experiment Name: Zm_5mM_SA_P Parameter: Organism Value: Zea mays
  misc_feature: MA Experiment 20000477 PARAMETER Experiment Name: Zm_5mM_SA_P Parameter: Plant Line Value: 35A19
  misc_feature: MA Experiment 20000477 PARAMETER Experiment Name: Zm_5mM_SA_P Parameter: Timepoint (hr) Value: 48
  misc_feature: MA Experiment 20000477 PARAMETER Experiment Name: Zm_5mM_SA_P Parameter: Tissue Value: Aerial
  misc_feature: MA Experiment 20000477 PARAMETER Experiment Name: Zm_5mM_SA_P Parameter: Treatment Value: 5mM SA vs. No Treatment
  misc_feature: MA Experiment ID: 20000478 Result: Up-regulated in Transcription
  misc_feature: MA Experiment 20000478 PARAMETER Experiment Name: Zm_5mM_SA_P Parameter: Age (day) Value: 11
  misc_feature: MA Experiment 20000478 PARAMETER Experiment Name: Zm_5mM_SA_P Parameter: Organism Value: Zea mays
  misc_feature: MA Experiment 20000478 PARAMETER Experiment Name: Zm_5mM_SA_P Parameter: Plant Line Value: 35A19
  misc_feature: MA Experiment 20000478 PARAMETER Experiment Name: Zm_5mM_SA_P Parameter: Timepoint (hr) Value: 72
  misc_feature: MA Experiment 20000478 PARAMETER Experiment Name: Zm_5mM_SA_P Parameter: Tissue Value: Aerial
  misc_feature: MA Experiment 20000478 PARAMETER Experiment Name: Zm_5mM_SA_P Parameter: Treatment Value: 5mM SA vs. No Treatment
  misc_feature: MA Experiment ID: 20000479 Result: Up-regulated in Transcription
  misc_feature: MA Experiment 20000479 PARAMETER Experiment Name: Zm_Drought_P Parameter: Age (day) Value: 10
  misc_feature: MA Experiment 20000479 PARAMETER Experiment Name: Zm_Drought_P Parameter: Organism Value: Zea mays
  misc_feature: MA Experiment 20000479 PARAMETER Experiment Name: Zm_Drought_P Parameter: Plant Line Value: 35A19
  misc_feature: MA Experiment 20000479 PARAMETER Experiment Name: Zm_Drought_P Parameter: Timepoint (hr) Value: 48
  misc_feature: MA Experiment 20000479 PARAMETER Experiment Name: Zm_Drought_P Parameter: Tissue Value: Aerial
  misc_feature: MA Experiment 20000479 PARAMETER Experiment Name: Zm_Drought_P Parameter: Treatment Value: Drought vs. No Drought
  misc_feature: MA Experiment ID: 20000480 Result: Up-regulated in Transcription
  misc_feature: MA Experiment 20000480 PARAMETER Experiment Name: Zm_Drought_P Parameter: Age (day) Value: 11
  misc_feature: MA Experiment 20000480 PARAMETER Experiment Name: Zm_Drought_P Parameter: Organism Value: Zea mays
  misc_feature: MA Experiment 20000480 PARAMETER Experiment Name: Zm_Drought_P Parameter: Plant Line Value: 35A19
  misc_feature: MA Experiment 20000480 PARAMETER Experiment Name: Zm_Drought_P Parameter: Timepoint (hr) Value: 72
  misc_feature: MA Experiment 20000480 PARAMETER Experiment Name: Zm_Drought_P Parameter: Tissue Value: Aerial
  misc_feature: MA Experiment 20000480 PARAMETER Experiment Name: Zm_Drought_P Parameter: Treatment Value: Drought vs. No Drought
  misc_feature: MA Experiment ID: 20000487 Result: Up-regulated in Transcription
  misc_feature: MA Experiment 20000487 PARAMETER Experiment Name: Zm_50mM_NH4NO3_L_to_H_P Parameter: Organism Value: Zea mays
  misc_feature: MA Experiment 20000487 PARAMETER Experiment Name: Zm_50mM_NH4NO3_L_to_H_P Parameter: Timepoint (hr) Value: 4
  misc_feature: MA Experiment 20000487 PARAMETER Experiment Name: Zm_50mM_NH4NO3_L_to_H_P Parameter: Tissue Value: Leaves
  misc_feature: MA Experiment 20000487 PARAMETER Experiment Name: Zm_50mM_NH4NO3_L_to_H_P Parameter: Treatment Value: 50mM NH4NO3 vs. 100mM Mannitol
  misc_feature: MA Experiment ID: 20000534 Result: Up-regulated in Transcription
  misc_feature: MA Experiment 20000534 PARAMETER Experiment Name: Zm_Hybrid_Pollen_P Parameter: Age (day) Value: 8
  misc_feature: MA Experiment 20000534 PARAMETER Experiment Name: Zm_Hybrid_Pollen_P Parameter: Organism Value: Zea mays
  misc_feature: MA Experiment 20000534 PARAMETER Experiment Name: Zm_Hybrid_Pollen_P Parameter: Plant Line Value: 35A19
  misc_feature: MA Experiment 20000534 PARAMETER Experiment Name: Zm_Hybrid_Pollen_P Parameter: Tissue Value: Pollen vs. Aerial
  misc_feature: MA Experiment ID: 20000629 Result: Down-regulated in Transcription
  misc_feature: MA Experiment 20000629 PARAMETER Experiment Name: Zm_Herbicide-Treatments_P Parameter: Timepoint (hr) Value: 12
  misc_feature: MA Experiment 20000629 PARAMETER Experiment Name: Zm_Herbicide-Treatments_P Parameter: Tissue Value: Aerial
  misc_feature: MA Experiment 20000629 PARAMETER Experiment Name: Zm_Herbicide-Treatments_P Parameter: Treatment Value: Trimec vs. No Treatment
  misc_feature: MA Experiment ID: 20001613 Result: Up-regulated in Transcription
  misc_feature: MA Experiment 20001613 PARAMETER Experiment Name: Zm_50ppm_KNO3_L-to-H_P Parameter: Age (day) Value: 20
  misc_feature: MA Experiment 20001613 PARAMETER Experiment Name: Zm_50ppm_KNO3_L-to-H_P Parameter: Organism Value: Zea mays
  misc_feature: MA Experiment 20001613 PARAMETER Experiment Name: Zm_50ppm_KNO3_L-to-H_P Parameter: Plant Line Value: 35A19
  misc_feature: MA Experiment 20001613 PARAMETER Experiment Name: Zm_50ppm_KNO3_L-to-H_P Parameter: Timepoint (hr) Value: 24
  misc_feature: MA Experiment 20001613 PARAMETER Experiment Name: Zm_50ppm_KNO3_L-to-H_P Parameter: Tissue Value: Roots
  misc_feature: MA Experiment 20001613 PARAMETER Experiment Name: Zm_50ppm_KNO3_L-to-H_P Parameter: Treatment Value: 50ppm KNO3 vs. 50ppm KCl
gcacgagaccattacctagaacatcctaatcgaaaaatcagccgcagtcgcgtcgcgtcgcgtcgcgtccagtccaatcctcggagcctcacacgggcggacgagcgggagcttctcccaatctcccctgcccagccctgccctgccgccgcgcttagcttcgcatcttcccctcctcctcctcctccttcctcggccaagcgaggagcgaggcgcgggcgcgagcgcgtcgttgagatggattcggaggcggtgcagcacggctgcgcgcattacagccgtgggtgcagcgtcgtggcgccctgctgcggccaggccttcggctgccgccattgccacaacgacgccaaggttcggtggtttccctcctcccgttttcgcttcggctccggttcagcagatgttctgaaacaaccctgtcccgtgccccggcagaactcgctggaggtcgacccgcgcgaccggcacgagatcccccgccacgaaataaagaaggtgatctgttctctctgctccaaggaacaggacgtgcaacagaactgctccagctgtggggcctgcatgggcaagtacttctgtaaagtatgcaagttcttcgatgatgatgtctcaaagggccagtaccactgtgacggatgtggaatatgtagaactggcggcgtggagaactttttccactgtgataaatgtgggtgttgttacagcaatgtcttgaaggattcccaccactgcgtggaaagagcaatgcatcacaactgccccgtctgcttcgagtatctgttcgactccacaaaggacatcagtgtgctgcaatgtgggcataccatccatttggagtgcatgaacgaaatgagagcacaccatcacttctcatgcccagtgtgctcgaggtccgcctgcgacatgtcggccacgtggcggaaactcgacgaggaggtcgcggccacgccgatgcctgacatctaccagaagcacatggtgtggatcctgtgcaacgactgcagcgcgacctcgagcgtgcggttccacgtgctggggcacaagtgccccgcgtgcagttcgtacaacacccgggagacgagggttgcgtgccccaggatctgaggcgaacgagaggccatgtcacaaaatgccagggagatgccgtccaacgactggtggagatcatctgtctgcaggacgttgctgcgcttaaggttaaaggctagcgcgagaccatgcctggtagtccagtcttgagtctggtgctgtccaggcacacctgtggatcggggccggctcaggattagtggggctgttcatgtttagggcgcgaatgcaacgatatttcacgtgggccgtgggctcggtatgtaactgaaccgattatttctattgcaataataacatgcagttctattgggccgagcctaatcagcc

SEQ ID NO: 11062 - protein, 367 aa, Zea mays subsp. mays
  peptide (1)..(367): Ceres Seq. ID no. 12566156
  misc_feature (140)..(200): Pfam Name: CHY zinc finger Pfam Description: CHY zinc finger
  misc_feature (154)..(358): Homolog of NCBI NO: 15238890 NR Description: putative protein; protein id: At5g18650.1, by cDNA: gi_17381207, supported by cDNA: gi_20465812 [Arabidopsis >gi|17381208|gb|AAL36416.1| unknown protein [Arabidopsis
  misc_feature (107)..(366): Homolog of NCBI NO: 30102616 NR Description: At3g62970 [Arabidopsis thaliana]
  misc_feature (107)..(366): Homolog of NCBI NO: 30695702 NR Description: expressed protein [Arabidopsis thaliana]
  misc_feature (107)..(361): Homolog of NCBI NO: 4105798 NR Description: PGPD14 [Petunia x hybrida]
  misc_feature (107)..(361): Homolog of NCBI NO: 15237169 NR Description: PGPD14 protein; protein id: At5g22920.1, by cDNA: 41666., supported by cDNA: gi_15450520 [Arabidopsis >gi|10177239|dbj|BAB10613.1| PGPD14 protein [Arabidopsis
  misc_feature (107)..(359): Homolog of NCBI NO: 34910658 NR Description: putative PGPD14 protein (pollen germination
  misc_feature (107)..(361): Homolog of NCBI NO: 21593716 NR Description: PGPD14 protein [Arabidopsis thaliana]
  misc_feature (108)..(366): Homolog of NCBI NO: 37535002 NR Description: putative PGPD14 protein (pollen germination
  misc_feature (217)..(336): Homolog of NCBI NO: 15451615 NR Description: Hypothetical protein with similarity to PGPD14
  misc_feature (107)..(366): Homolog of NCBI NO: 11358168 NR Description: hypothetical protein T20O10.70 - Arabidopsis >gi|7573426|emb|CAB87742.1| putative protein [Arabidopsis
ARDHYLEHPNRKISRSRVASRRVQSNPRSLTRADERELLPISPAQPCPAAALSFASSPPPPPPSSAKRGARRGRERVVEMDSEAVQHGCAHYSRGCSVVAPCCGQAFGCRHCHNDAKVRWFPSSRFRFGSGSADVLKQPCPVPRQNSLEVDPRDRHEIPRHEIKKVICSLCSKEQDVQQNCSSCGACMGKYFCKVCKFFDDDVSKGQYHCDGCGICRTGGVENFFHCDKCGCCYSNVLKDSHHCVERAMHHNCPVCFEYLFDSTKDISVLQCGHTIHLECMNEMRAHHHFSCPVCSRSACDMSATWRKLDEEVAATPMPDIYQKHMVWILCNDCSATSSVRFHVLGHKCPACSSYNTRETRVACPRI

SEQ ID NO: 11063 - protein, 288 aa, Zea mays subsp. mays
  peptide (1)..(288): Ceres Seq. ID no. 12566157
  misc_feature (61)..(121): Pfam Name: CHY zinc finger Pfam Description: CHY zinc finger
  misc_feature (29)..(287): Homolog of NCBI NO: 37535002 NR Description: putative PGPD14 protein (pollen germination
  misc_feature (28)..(282): Homolog of NCBI NO: 4105798 NR Description: PGPD14 [Petunia x hybrida]
  misc_feature (28)..(282): Homolog of NCBI NO: 21593716 NR Description: PGPD14 protein [Arabidopsis thaliana]
  misc_feature (28)..(282): Homolog of NCBI NO: 15237169 NR Description: PGPD14 protein; protein id: At5g22920.1, by cDNA: 41666., supported by cDNA: gi_15450520 [Arabidopsis >gi|10177239|dbj|BAB10613.1| PGPD14 protein [Arabidopsis
  misc_feature (28)..(280): Homolog of NCBI NO: 34910658 NR Description: putative PGPD14 protein (pollen germination
  misc_feature (75)..(279): Homolog of NCBI NO: 15238890 NR Description: putative protein; protein id: At5g18650.1, by cDNA: gi_17381207, supported by cDNA: gi_20465812 [Arabidopsis >gi|17381208|gb|AAL36416.1| unknown protein [Arabidopsis
  misc_feature (28)..(287): Homolog of NCBI NO: 30102616 NR Description: At3g62970 [Arabidopsis thaliana]
  misc_feature (28)..(287): Homolog of NCBI NO: 30695702 NR Description: expressed protein [Arabidopsis thaliana]
  misc_feature (138)..(257): Homolog of NCBI NO: 15451615 NR Description: Hypothetical protein with similarity to PGPD14
  misc_feature (28)..(287): Homolog of NCBI NO: 11358168 NR Description: hypothetical protein T20O10.70 - Arabidopsis >gi|7573426|emb|CAB87742.1| putative protein [Arabidopsis
MDSEAVQHGCAHYSRGCSVVAPCCGQAFGCRHCHNDAKVRWFPSSRFRFGSGSADVLKQPCPVPRQNSLEVDPRDRHEIPRHEIKKVICSLCSKEQDVQQNCSSCGACMGKYFCKVCKFFDDDVSKGQYHCDGCGICRTGGVENFFHCDKCGCCYSNVLKDSHHCVERAMHHNCPVCFEYLFDSTKDISVLQCGHTIHLECMNEMRAHHHFSCPVCSRSACDMSATWRKLDEEVAATPMPDIYQKHMVWILCNDCSATSSVRFHVLGHKCPACSSYNTRETRVACPRI

SEQ ID NO: 11064 - DNA, 1332 bp, Zea mays subsp. mays
  misc_feature (1)..(1332): Ceres Seq. ID no. 12387152
  misc_feature: MA Experiment ID: 20000492 Result: Down-regulated in Transcription
  misc_feature: MA Experiment 20000492 PARAMETER Experiment Name: Zm_Hybrid_Seed_Dev_P Parameter: DAP Value: 12
  misc_feature: MA Experiment 20000492 PARAMETER Experiment Name: Zm_Hybrid_Seed_Dev_P Parameter: Organism Value: Zea mays
  misc_feature: MA Experiment 20000492 PARAMETER Experiment Name: Zm_Hybrid_Seed_Dev_P Parameter: Plant Line Value: 35A19
  misc_feature: MA Experiment 20000492 PARAMETER Experiment Name: Zm_Hybrid_Seed_Dev_P Parameter: Tissue Value: Fert Kernel vs. Unfert Floret
aatcccattccagtgcccgtaccgcgccgtccctatcgtgccggatcgccacccgctcgctgcgcccccacctcccccccctcgccggttcgccacttcgccccacctccgcgcctcagatccatccccaatccggcaaccctagcgccgggttcctcctcctcgtctccgcccgccgccgcctccattgccagaggtgatcgagggggagagacagagcttgggtggtcggattagggagagagggaggggaggatgtccagaaggtcggtgaacccgagccggcgggtggcggacgggggcttgccgtccttcggcggcccgttccaccctaagtcacgctcgcctcccgtgctcaccattgccctcgtcgtcctgggtgtcatttttctcattgcctacttcaacagcagcccaggtgtaactgttacgagcaaagagactgtgaccagatctgaaggttcttgcacatcagaagttatgcgggcgcttccatatcttaagaaggcatatggcaatgccatgcaaaaggttctccatgtaggccctgatagttgtacagtagtttctaacctgttgaaagaaggaaaggttgaagcatggggagtggagccttatgatttggaggatactgacagtacttgcaaaagactcgtgcgcaagggctttgtccgtatgtctgatattaagttcccccttccataccgtccagattcttttaatcttgttattgtgtcagatgctttagattatctgaccccaaggtatctgaacaaaacgcttcccggtttagcaagggtttccacagatggccttgtgatttttgctggcaatcctggtcaacagaaagctaaggtctcagaactaccaaaatttggaagaccggcaaaattgcggagttcatcgtggtggacaagatactttgtccagactggcttaacagagaacgaagggccactgaagaaatttgaagaggctacatcccagaacaaataccaaccagattgtcagatcttccacttaagttcgccaaggtgatgcgcatccagaacaccttgggttgttgtcacaccagttctgtaagcagcacctttgcttacccctgttgacttgcgcatctttcgtgcggaggaatggtcacacaaacagagccagccatcagcagtaggttagcttgtgtagagagggagagagagagagaggcctcgacacttgttcctagaaaatccttctggaaattaaattatgtgttaccaatgactgcaaactggagcccgctgggatatatatatgtaagaacttcacgctgttgtactactaagctatgagctg

SEQ ID NO: 11065 - protein, 260 aa, Zea mays subsp. mays
  peptide (1)..(260): Ceres Seq. ID no. 12387153
  misc_feature (1)..(258): Homolog of NCBI NO: 34895744 NR Description: P0019D06.30 [Oryza sativa (japonica
  misc_feature (1)..(256): Homolog of NCBI NO: 18408931 NR Description: expressed protein; protein id: At3g49720.1, by cDNA: 35598. [Arabidopsis thaliana] >gi|11285664|pir||T46038
  misc_feature (1)..(256): Homolog of NCBI NO: 21593192 NR Description: unknown [Arabidopsis thaliana]
  misc_feature (1)..(256): Homolog of NCBI NO: 18424995 NR Description: putative protein; protein id: At5g65810.1,
  misc_feature (1)..(210): Homolog of NCBI NO: 9758568 NR Description: emb|CAB66910.1~gene_id:K22J17.2~similar to
  misc_feature (90)..(256): Homolog of NCBI NO: 16649137 NR Description: Unknown protein [Arabidopsis thaliana]
MSRRSVNPSRRVADGGLPSFGGPFHPKSRSPPVLTIALVVLGVIFLIAYFNSSPGVTVTSKETVTRSEGSCTSEVMRALPYLKKAYGNAMQKVLHVGPDSCTVVSNLLKEGKVEAWGVEPYDLEDTDSTCKRLVRKGFVRMSDIKFPLPYRPDSFNLVIVSDALDYLTPRYLNKTLPGLARVSTDGLVIFAGNPGQQKAKVSELPKFGRPAKLRSSSWWTRYFVQTGLTENEGPLKKFEEATSQNKYQPDCQIFHLSSPR

SEQ ID NO: 11066 - protein, 185 aa, Zea mays subsp. mays
  peptide (1)..(185): Ceres Seq. ID no. 12387154
  misc_feature (1)..(183): Homolog of NCBI NO: 34895744 NR Description: P0019D06.30 [Oryza sativa (japonica
  misc_feature (1)..(181): Homolog of NCBI NO: 18408931 NR Description: expressed protein; protein id: At3g49720.1, by cDNA: 35598. [Arabidopsis thaliana] >gi|11285664|pir||T46038
  misc_feature (1)..(181): Homolog of NCBI NO: 21593192 NR Description: unknown [Arabidopsis thaliana]
  misc_feature (1)..(181): Homolog of NCBI NO: 18424995 NR Description: putative protein; protein id: At5g65810.1,
  misc_feature (1)..(135): Homolog of NCBI NO: 9758568 NR Description: emb|CAB66910.1~gene_id:K22J17.2~similar to
  misc_feature (15)..(181): Homolog of NCBI NO: 16649137 NR Description: Unknown protein [Arabidopsis thaliana]
MRALPYLKKAYGNAMQKVLHVGPDSCTVVSNLLKEGKVEAWGVEPYDLEDTDSTCKRLVRKGFVRMSDIKFPLPYRPDSFNLVIVSDALDYLTPRYLNKTLPGLARVSTDGLVIFAGNPGQQKAKVSELPKFGRPAKLRSSSWWTRYFVQTGLTENEGPLKKFEEATSQNKYQPDCQIFHLSSPR

SEQ ID NO: 11067 - protein, 171 aa, Zea mays subsp. mays
  peptide (1)..(171): Ceres Seq. ID no. 12387155
  misc_feature (1)..(169): Homolog of NCBI NO: 34895744 NR Description: P0019D06.30 [Oryza sativa (japonica
  misc_feature (1)..(167): Homolog of NCBI NO: 18408931 NR Description: expressed protein; protein id: At3g49720.1, by cDNA: 35598. [Arabidopsis thaliana] >gi|11285664|pir||T46038
  misc_feature (1)..(167): Homolog of NCBI NO: 21593192 NR Description: unknown [Arabidopsis thaliana]
  misc_feature (1)..(167): Homolog of NCBI NO: 18424995 NR Description: putative protein; protein id: At5g65810.1,
  misc_feature (1)..(121): Homolog of NCBI NO: 9758568 NR Description: emb|CAB66910.1~gene_id:K22J17.2~similar to
  misc_feature (1)..(167): Homolog of NCBI NO: 16649137 NR Description: Unknown protein [Arabidopsis thaliana]
MQKVLHVGPDSCTVVSNLLKEGKVEAWGVEPYDLEDTDSTCKRLVRKGFVRMSDIKFPLPYRPDSFNLVIVSDALDYLTPRYLNKTLPGLARVSTDGLVIFAGNPGQQKAKVSELPKFGRPAKLRSSSWWTRYFVQTGLTENEGPLKKFEEATSQNKYQPDCQIFHLSSPR

SEQ ID NO: 11068 - DNA, 981 bp, Zea mays subsp. mays
  misc_feature (1)..(981): Ceres Seq. ID no. 12414420
  misc_feature: MA Experiment ID: 108523 Result: Up-regulated in Transcription
  misc_feature: MA Experiment 108523 PARAMETER Experiment Name: Zm_42deg_Heat_P Parameter: Age (day) Value: 8
  misc_feature: MA Experiment 108523 PARAMETER Experiment Name: Zm_42deg_Heat_P Parameter: Organism Value: Zea mays
  misc_feature: MA Experiment 108523 PARAMETER Experiment Name: Zm_42deg_Heat_P Parameter: Plant Line Value: 35A19
  misc_feature: MA Experiment 108523 PARAMETER Experiment Name: Zm_42deg_Heat_P Parameter: Temperature (deg C) Value: 42 vs. 22
  misc_feature: MA Experiment 108523 PARAMETER Experiment Name: Zm_42deg_Heat_P Parameter: Timepoint (hr) Value: 6
  misc_feature: MA Experiment 108523 PARAMETER Experiment Name: Zm_42deg_Heat_P Parameter: Tissue Value: Aerial
  misc_feature: MA Experiment ID: 108556 Result: Up-regulated in Transcription
  misc_feature: MA Experiment 108556 PARAMETER Experiment Name: Zm_Drought_P Parameter: Age (day) Value: 9
  misc_feature: MA Experiment 108556 PARAMETER Experiment Name: Zm_Drought_P Parameter: Organism Value: Zea mays
  misc_feature: MA Experiment 108556 PARAMETER Experiment Name: Zm_Drought_P Parameter: Plant Line Value: 35A19
  misc_feature: MA Experiment 108556 PARAMETER Experiment Name: Zm_Drought_P Parameter: Timepoint (hr) Value: 24
  misc_feature: MA Experiment 108556 PARAMETER Experiment Name: Zm_Drought_P Parameter: Tissue Value: Aerial
  misc_feature: MA Experiment 108556 PARAMETER Experiment Name: Zm_Drought_P Parameter: Treatment Value: Drought vs. No Drought
  misc_feature: MA Experiment ID: 20000480 Result: Up-regulated in Transcription
  misc_feature: MA Experiment 20000480 PARAMETER Experiment Name: Zm_Drought_P Parameter: Age (day) Value: 11
  misc_feature: MA Experiment 20000480 PARAMETER Experiment Name: Zm_Drought_P Parameter: Organism Value: Zea mays
  misc_feature: MA Experiment 20000480 PARAMETER Experiment Name: Zm_Drought_P Parameter: Plant Line Value: 35A19
  misc_feature: MA Experiment 20000480 PARAMETER Experiment Name: Zm_Drought_P Parameter: Timepoint (hr) Value: 72
  misc_feature: MA Experiment 20000480 PARAMETER Experiment Name: Zm_Drought_P Parameter: Tissue Value: Aerial
  misc_feature: MA Experiment 20000480 PARAMETER Experiment Name: Zm_Drought_P Parameter: Treatment Value: Drought vs. No Drought
cttacactctccttttgtcaccttctcttcgttcccctcctcggctcctcgcgatccttctttactgcccgagagttctgactagccacatccagtcaagcagtaaaggcgcaccatggaggcggcggcggagaataaggaggccgagcaggaggagcagcagctaccgcacgcgcagaaggataacgcgcccgccgccgccgaggaagacgaagcggattcggaggagaccgagcgccgcaaccgcgacctcaagtccggccttcacccccttaggcacaaactcgtgctctggtacactcgccggacgcctggagcgaggtcgcagtcgtacgaggacaacatcaagaagatcatcgatttcagcacagtcgaatcgttctgggtttgctactgccaccttgcgcgcccttcttccctgccgagccccactgaccttcatctcttcaaggatggcatccgtcccctctgggaggatcctgcaaaccagaatggtggcaagtggataattagattcaaaaaggcagtttcaggtcgattttgggaggatttggtgctagtggtagtaggcgaccagcttgagtatagcgatgatgtctgtggtgttgtgcttagtgtccgtttcaatgaagacattctgagcgtctggaaccggaacgcatcagaccatcaggctgtgatggcattgagggattctatcaagaggcacctcaagctgccgcacagctatctgatggagtacaaaccccatgatgcttcgcggcgtgacaactcgtcctacaggaacacatggctgagaggatagataaacctcatgatactcggcagcttcactgcgacggttctgaagcaaagagactcttttatgtaccaagaacgcagactattatgcaatgtagtactactactactactactcaaaagcccctacaatgtgacgcgcaacaattttactatctaatgtgttttttttgcaaaagc

SEQ ID NO: 11069 - protein, 229 aa, Zea mays subsp. mays
  peptide (1)..(229): Ceres Seq. ID no. 12414421
  misc_feature (35)..(229): Homolog of NCBI NO: 25453555 NR Description: eukaryotic cap-binding protein [imported] -
  misc_feature (35)..(229): Homolog of NCBI NO: 15238740 NR Description: eukaryotic cap-binding protein (gb|AAC17220.1); id: At5g18110.1, supported by cDNA: gi_20260129, supported by gi_20260617, supported by cDNA: gi_3108208 [Arabidopsis thaliana]
  misc_feature (2)..(225): Homolog of NCBI NO: 13624327 NR Description: RIKEN cDNA 2700069E09; DNA segment, human [Mus musculus] >gi|12858256|dbj|BAB31251.1| unnamed protein
  misc_feature (12)..(225): Homolog of NCBI NO: 37590370 NR Description: Unknown (protein for MGC:73242) [Danio rerio]
  misc_feature (2)..(215): Homolog of NCBI NO: 4757702 NR Description: eukaryotic translation initiation factor 4E-like
  misc_feature (2)..(215): Homolog of NCBI NO: 12653185 NR Description: EIF4EL3 protein [Homo sapiens]
  misc_feature (2)..(215): Homolog of NCBI NO: 29144998 NR Description: Similar to RIKEN cDNA 2700069E09 gene [Mus
  misc_feature (2)..(215): Homolog of NCBI NO: 29839292 NR Description: Eukaryotic translation initiation factor 4E type
  misc_feature (2)..(215): Homolog of NCBI NO: 3201958 NR Description: eIF4E-like protein 4E-LP [Mus musculus]
  misc_feature (30)..(215): Homolog of NCBI NO: 3329384 NR Description: translation initiation factor 4e [Homo sapiens]
MEAAAENKEAEQEEQQLPHAQKDNAPAAAEEDEADSEETERRNRDLKSGLHPLRHKLVLWYTRRTPGARSQSYEDNIKKIIDFSTVESFWVCYCHLARPSSLPSPTDLHLFKDGIRPLWEDPANQNGGKWIIRFKKAVSGRFWEDLVLVVVGDQLEYSDDVCGVVLSVRFNEDILSVWNRNASDHQAVMALRDSIKRHLKLPHSYLMEYKPHDASRRDNSSYRNTWLRG

SEQ ID NO: 11070 - protein, 168 aa, Zea mays subsp. mays
  peptide (1)..(168): Ceres Seq. ID no. 12414422
YTLLLSPSLRSPPRLLAILLYCPRVLTSHIQSSSKGAPWRRRRRIRRPSRRSSSYRTRRRITRPPPPRKTKRIRRRPSAATATSSPAFTPLGTNSCSGTLAGRLERGRSRTRTTSRRSSISAQSNRSGFATATLRALLPCRAPLTFISSRMASVPSGRILQTRMVASG

SEQ ID NO: 11071 - DNA, 1357 bp, Zea mays subsp. mays
  misc_feature (1)..(1357): Ceres Seq. ID no. 12345592
  misc_feature: MA Experiment ID: 108527 Result: Up-regulated in Transcription
  misc_feature: MA Experiment 108527 PARAMETER Experiment Name: Zm_5mM_NO_P Parameter: Age (day) Value: 8
  misc_feature: MA Experiment 108527 PARAMETER Experiment Name: Zm_5mM_NO_P Parameter: Organism Value: Zea mays
  misc_feature: MA Experiment 108527 PARAMETER Experiment Name: Zm_5mM_NO_P Parameter: Plant Line Value: 35A19
  misc_feature: MA Experiment 108527 PARAMETER Experiment Name: Zm_5mM_NO_P Parameter: Timepoint (hr) Value: 6
  misc_feature: MA Experiment 108527 PARAMETER Experiment Name: Zm_5mM_NO_P Parameter: Tissue Value: Aerial
  misc_feature: MA Experiment 108527 PARAMETER Experiment Name: Zm_5mM_NO_P Parameter: Treatment Value: 5mM NO vs. No Treatment
  misc_feature: MA Experiment ID: 108528 Result: Down-regulated in Transcription
  misc_feature: MA Experiment 108528 PARAMETER Experiment Name: Zm_Imbibed_Seeds_P Parameter: Age (day) Value: 5 vs. 2
  misc_feature: MA Experiment 108528 PARAMETER Experiment Name: Zm_Imbibed_Seeds_P Parameter: Organism Value: Zea mays
  misc_feature: MA Experiment 108528 PARAMETER Experiment Name: Zm_Imbibed_Seeds_P Parameter: Plant Line Value: 35A19
  misc_feature: MA Experiment 108528 PARAMETER Experiment Name: Zm_Imbibed_Seeds_P Parameter: Tissue Value: Aerial vs. Embryo
  misc_feature: MA Experiment ID: 108529 Result: Up-regulated in Transcription
  misc_feature: MA Experiment 108529 PARAMETER Experiment Name: Zm_Imbibed_Seeds_P Parameter: Age (day) Value: 5 vs. 2
  misc_feature: MA Experiment 108529 PARAMETER Experiment Name: Zm_Imbibed_Seeds_P Parameter: Organism Value: Zea mays
  misc_feature: MA Experiment 108529 PARAMETER Experiment Name: Zm_Imbibed_Seeds_P Parameter: Plant Line Value: 35A19
  misc_feature: MA Experiment 108529 PARAMETER Experiment Name: Zm_Imbibed_Seeds_P Parameter: Tissue Value: Roots vs. Embryo
  misc_feature: MA Experiment ID: 108535 Result: Down-regulated in Transcription
  misc_feature: MA Experiment 108535 PARAMETER Experiment Name: Zm_Meristem_P Parameter: Age (day) Value: 8
  misc_feature: MA Experiment 108535 PARAMETER Experiment Name: Zm_Meristem_P Parameter: Organism Value: Zea mays
  misc_feature: MA Experiment 108535 PARAMETER Experiment Name: Zm_Meristem_P Parameter: Plant Line Value: 35A19
  misc_feature: MA Experiment 108535 PARAMETER Experiment Name: Zm_Meristem_P Parameter: Tissue Value: Root Meristem vs. Above Root Meristem
  misc_feature: MA Experiment ID: 108544 Result: Down-regulated in Transcription
  misc_feature: MA Experiment ID: 108545 Result: Down-regulated in Transcription
  misc_feature: MA Experiment 108545 PARAMETER Experiment Name: Zm_Imbibed_Seeds_P Parameter: Age (day) Value: 3 vs. 2
  misc_feature: MA Experiment 108545 PARAMETER Experiment Name: Zm_Imbibed_Seeds_P Parameter: Organism Value: Zea mays
  misc_feature: MA Experiment 108545 PARAMETER Experiment Name: Zm_Imbibed_Seeds_P Parameter: Plant Line Value: 35A19
  misc_feature: MA Experiment 108545 PARAMETER Experiment Name: Zm_Imbibed_Seeds_P Parameter: Tissue Value: Aerial vs. Embryo
  misc_feature: MA Experiment ID: 108547 Result: Down-regulated in Transcription
  misc_feature: MA Experiment 108547 PARAMETER Experiment Name: Zm_Imbibed_Seeds_P Parameter: Age (day) Value: 4 vs. 2
  misc_feature: MA Experiment 108547 PARAMETER Experiment Name: Zm_Imbibed_Seeds_P Parameter: Organism Value: Zea mays
  misc_feature: MA Experiment 108547 PARAMETER Experiment Name: Zm_Imbibed_Seeds_P Parameter: Plant Line Value: 35A19
  misc_feature: MA Experiment 108547 PARAMETER Experiment Name: Zm_Imbibed_Seeds_P Parameter: Tissue Value: Aerial vs. Embryo
  misc_feature: MA Experiment ID: 20000477 Result: Up-regulated in Transcription
  misc_feature: MA Experiment 20000477 PARAMETER Experiment Name: Zm_5mM_SA_P Parameter: Age (day) Value: 10
  misc_feature: MA Experiment 20000477 PARAMETER Experiment Name: Zm_5mM_SA_P Parameter: Organism Value: Zea mays
  misc_feature: MA Experiment 20000477 PARAMETER Experiment Name: Zm_5mM_SA_P Parameter: Plant Line Value: 35A19
  misc_feature: MA Experiment 20000477 PARAMETER Experiment Name: Zm_5mM_SA_P Parameter: Timepoint (hr) Value: 48
  misc_feature: MA Experiment 20000477 PARAMETER Experiment Name: Zm_5mM_SA_P Parameter: Tissue Value: Aerial
  misc_feature: MA Experiment 20000477 PARAMETER Experiment Name: Zm_5mM_SA_P Parameter: Treatment Value: 5mM SA vs. No Treatment
  misc_feature: MA Experiment ID: 20000478 Result: Up-regulated in Transcription
  misc_feature: MA Experiment 20000478 PARAMETER Experiment Name: Zm_5mM_SA_P Parameter: Age (day) Value: 11
  misc_feature: MA Experiment 20000478 PARAMETER Experiment Name: Zm_5mM_SA_P Parameter: Organism Value: Zea mays
  misc_feature: MA Experiment 20000478 PARAMETER Experiment Name: Zm_5mM_SA_P Parameter: Plant Line Value: 35A19
  misc_feature: MA Experiment 20000478 PARAMETER Experiment Name: Zm_5mM_SA_P Parameter: Timepoint (hr) Value: 72
  misc_feature: MA Experiment 20000478 PARAMETER Experiment Name: Zm_5mM_SA_P Parameter: Tissue Value: Aerial
  misc_feature: MA Experiment 20000478 PARAMETER Experiment Name: Zm_5mM_SA_P Parameter: Treatment Value: 5mM SA vs. No Treatment
  misc_feature: MA Experiment ID: 20000535 Result: Down-regulated in Transcription
  misc_feature: MA Experiment 20000535 PARAMETER Experiment Name: Zm_Hybrid_Seed_Dev_P Parameter: DAP Value: 30 vs. 12
  misc_feature: MA Experiment 20000535 PARAMETER Experiment Name: Zm_Hybrid_Seed_Dev_P Parameter: Organism Value: Zea mays
  misc_feature: MA Experiment 20000535 PARAMETER Experiment Name: Zm_Hybrid_Seed_Dev_P Parameter: Plant Line Value: 35A19
  misc_feature: MA Experiment 20000535 PARAMETER Experiment Name: Zm_Hybrid_Seed_Dev_P Parameter: Tissue Value: Embryo vs. Unfert Floret
  misc_feature: MA Experiment ID: 20000626 Result: Up-regulated in Transcription
  misc_feature: MA Experiment 20000626 PARAMETER Experiment Name: Zm_Herbicide-Treatments_P Parameter: Timepoint (hr) Value: 12
  misc_feature: MA Experiment 20000626 PARAMETER Experiment Name: Zm_Herbicide-Treatments_P Parameter: Tissue Value: Aerial
  misc_feature: MA Experiment 20000626 PARAMETER Experiment Name: Zm_Herbicide-Treatments_P Parameter: Treatment Value: Roundup vs. No Treatment
accatcaagctttcaggcagggcaagcaactcgagtagtagttgccagccacacctcctgtcttcctttttccttctcgcattgtggaggagaaggatcaagtgctcataagcaagctagcttgacgaagtataggaaattaggaatacaaataaactcatcctcctcatatataaacgctcgatctccagatatggccggcctgtccctgctgcatcccatggccttcgccttcggcctcctcggcaacatcatctccttcatgacctacctggccccactgccgacgttctaccggatctacaagaacaagtcgacggaggggttccagtcggtgccgtacgtggtggccctcttcagcgccatgctgtggatctactacgcgctgctcaagtccaacgagctcctgctcatcaccatcaactccgccggctgcgtcatcgagaccctctacatcgccatgtacctcctctacgcgcccaagaaggcaaagctgttcacggccaagatcctcctcctcctcaacgtgggcgtgttcgggctcatcctcctcctcacgctgctgctctccgccggacagcgccgcgtcgtcgtcctcggctgggtctgcgtcgccttctccgttagcgtcttcgtcgcgccgctcagcatcatccgccaggtggtgagaacaaggagcgtcgagttcatgcccttctcgctctccctctccctcaccgtcagcgccgtcgtctggttcctctacggcctcctcatcaaggacaaatacgtcgctctgccaaacgtcatcggcttcagcttcggcgtggtccagatgggtctctacgcgctctaccgcaacgcgacgcccagggtgcctgccaaggacgtggccgacgacgccagcaaggacaaggcgcccggcgaacatgtggtggtcaccattgccaagctgaccgcggcgacgacggcacctgcagctgccgtggcagaggatcttgtcaaggtccacgacggccacccggaggaagcagccaagggcgccgccaagccggcggagaacggcgcgggacgcagcgacgccgagcaagtctagattcctcgctcgatcagatcagaattcatgaagaagaacatgcgtatgtatgtgtatccggtaggtcgtaacataacataaattaagtgcgcatgcagtttggcaactcatgttgtttcatttcgttctcgcgcaatatgcgcatgtattaattttagattgtcattgttgtagttcttgcctccgattattattagtgtgtccgtcaccttccatgtaataacaaaaaaaatatatataaatggtcctattaaagcaaaagctaaagttcgtttttatgcc

SEQ ID NO: 11072 - protein, 357 aa, Zea mays subsp. mays
  peptide (1)..(357): Ceres Seq. ID no. 12345593
  misc_feature (76)..(163): Pfam Name: MtN3/saliva family Pfam Description: MtN3/saliva family
  misc_feature (75)..(321): Homolog of NCBI NO: 14715258 NR Description: N3 like protein [Medicago truncatula]
  misc_feature (68)..(289): Homolog of NCBI NO: 1619602 NR Description: MtN3 [Medicago truncatula]
  misc_feature (75)..(354): Homolog of NCBI NO: 15229019 NR Description: MTN3-like protein; protein id: At3g48740.1, by cDNA: gi_13605687, supported by cDNA: gi_16930410, supported
  misc_feature (75)..(322): Homolog of NCBI NO: 15237803 NR Description: MtN3-like protein; protein id: At5g23660.1, by cDNA: gi_15982722, supported by cDNA: gi_16323439, supported
  misc_feature (72)..(348): Homolog of NCBI NO: 21593422 NR Description: senescence-associated protein (SAG29)
  misc_feature (74)..(308): Homolog of NCBI NO: 11345413 NR Description: NEC1 [Petunia x hybrida]
  misc_feature (75)..(322): Homolog of NCBI NO: 15241278 NR Description: MtN3-like protein; protein id: At5g50800.1,
  misc_feature (75)..(322): Homolog of NCBI NO: 21593109 NR Description: MtN3-like protein [Arabidopsis thaliana]
  misc_feature (72)..(348): Homolog of NCBI NO: 15240040 NR Description: senescence-associated protein (SAG29); protein At5g13170.1, supported by cDNA: 38843., supported by cDNA:
  misc_feature (71)..(300): Homolog of NCBI NO: 15225014 NR Description: similar to MtN3 protein; protein id: At2g39060.1, by cDNA: 20810. [Arabidopsis thaliana] >gi|25354616|pir||F84812
PSSFQAGQATRVVVASHTSCLPFSFSHCGGEGSSAHKQASLTKYRKLGIQINSSSSYINARSPDMAGLSLLHPMAFAFGLLGNIISFMTYLAPLPTFYRIYKNKSTEGFQSVPYVVALFSAMLWIYYALLKSNELLLITINSAGCVIETLYIAMYLLYAPKKAKLFTAKILLLLNVGVFGLILLLTLLLSAGQRRVVVLGWVCVAFSVSVFVAPLSIIRQVVRTRSVEFMPFSLSLSLTVSAVVWFLYGLLIKDKYVALPNVIGFSFGVVQMGLYALYRNATPRVPAKDVADDASKDKAPGEHVVVTIAKLTAATTAPAAAVAEDLVKVHDGHPEEAAKGAAKPAENGAGRSDAEQV

SEQ ID NO: 11073 - protein, 293 aa, Zea mays subsp. mays
  peptide (1)..(293): Ceres Seq. ID no. 12345594
  misc_feature (12)..(99): Pfam Name: MtN3/saliva family Pfam Description: MtN3/saliva family
  misc_feature (11)..(257): Homolog of NCBI NO: 14715258 NR Description: N3 like protein [Medicago truncatula]
  misc_feature (4)..(225): Homolog of NCBI NO: 1619602 NR Description: MtN3 [Medicago truncatula]
  misc_feature (11)..(290): Homolog of NCBI NO: 15229019 NR Description: MTN3-like protein; protein id: At3g48740.1, by cDNA: gi_13605687, supported by cDNA: gi_16930410, supported
  misc_feature (11)..(258): Homolog of NCBI NO: 15237803 NR Description: MtN3-like protein; protein id: At5g23660.1, by cDNA: gi_15982722, supported by cDNA: gi_16323439, supported
  misc_feature (8)..(284): Homolog of NCBI NO: 21593422 NR Description: senescence-associated protein (SAG29)
  misc_feature (10)..(244): Homolog of NCBI NO: 11345413 NR Description: NEC1 [Petunia x hybrida]
  misc_feature (11)..(258): Homolog of NCBI NO: 15241278 NR Description: MtN3-like protein; protein id: At5g50800.1,
  misc_feature (11)..(258): Homolog of NCBI NO: 21593109 NR Description: MtN3-like protein [Arabidopsis thaliana]
  misc_feature (8)..(284): Homolog of NCBI NO: 15240040 NR Description: senescence-associated protein (SAG29); protein At5g13170.1, supported by cDNA: 38843., supported by cDNA:
  misc_feature (7)..(236): Homolog of NCBI NO: 15225014 NR Description: similar to MtN3 protein; protein id: At2g39060.1, by cDNA: 20810. [Arabidopsis thaliana] >gi|25354616|pir||F84812
MAGLSLLHPMAFAFGLLGNIISFMTYLAPLPTFYRIYKNKSTEGFQSVPYVVALFSAMLWIYYALLKSNELLLITINSAGCVIETLYIAMYLLYAPKKAKLFTAKILLLLNVGVFGLILLLTLLLSAGQRRVVVLGWVCVAFSVSVFVAPLSIIRQVVRTRSVEFMPFSLSLSLTVSAVVWFLYGLLIKDKYVALPNVIGFSFGVVQMGLYALYRNATPRVPAKDVADDASKDKAPGEHVVVTIAKLTAATTAPAAAVAEDLVKVHDGHPEEAAKGAAKPAENGAGRSDAEQV

SEQ ID NO: 11074 - protein, 284 aa, Zea mays subsp. mays
  peptide (1)..(284): Ceres Seq. ID no. 12345595
  misc_feature (3)..(90): Pfam Name: MtN3/saliva family Pfam Description: MtN3/saliva family
  misc_feature (2)..(248): Homolog of NCBI NO: 14715258 NR Description: N3 like protein [Medicago truncatula]
  misc_feature (1)..(216): Homolog of NCBI NO: 1619602 NR Description: MtN3 [Medicago truncatula]
  misc_feature (2)..(281): Homolog of NCBI NO: 15229019 NR Description: MTN3-like protein; protein id: At3g48740.1, by cDNA: gi_13605687, supported by cDNA: gi_16930410, supported
  misc_feature (2)..(249): Homolog of NCBI NO: 15237803 NR Description: MtN3-like protein; protein id: At5g23660.1, by cDNA: gi_15982722, supported by cDNA: gi_16323439, supported
  misc_feature (1)..(275): Homolog of NCBI NO: 21593422 NR Description: senescence-associated protein (SAG29)
  misc_feature (1)..(235): Homolog of NCBI NO: 11345413 NR Description: NEC1 [Petunia x hybrida]
  misc_feature (2)..(249): Homolog of NCBI NO: 15241278 NR Description: MtN3-like protein; protein id: At5g50800.1,
  misc_feature (2)..(249): Homolog of NCBI NO: 21593109 NR Description: MtN3-like protein [Arabidopsis thaliana]
  misc_feature (1)..(275): Homolog of NCBI NO: 15240040 NR Description: senescence-associated protein (SAG29); protein At5g13170.1, supported by cDNA: 38843., supported by cDNA:
  misc_feature (1)..(227): Homolog of NCBI NO: 15225014 NR Description: similar to MtN3 protein; protein id: At2g39060.1, by cDNA: 20810. [Arabidopsis thaliana] >gi|25354616|pir||F84812
MAFAFGLLGNIISFMTYLAPLPTFYRIYKNKSTEGFQSVPYVVALFSAMLWIYYALLKSNELLLITINSAGCVIETLYIAMYLLYAPKKAKLFTAKILLLLNVGVFGLILLLTLLLSAGQRRVVVLGWVCVAFSVSVFVAPLSIIRQVVRTRSVEFMPFSLSLSLTVSAVVWFLYGLLIKDKYVALPNVIGFSFGVVQMGLYALYRNATPRVPAKDVADDASKDKAPGEHVVVTIAKLTAATTAPAAAVAEDLVKVHDGHPEEAAKGAAKPAENGAGRSDAEQV

SEQ ID NO: 11075 - DNA, 1177 bp, Zea mays subsp. mays
  misc_feature (1)..(1177): Ceres Seq. ID no. 12374151
  misc_feature: MA Experiment ID: 108536 Result: Down-regulated in Transcription
  misc_feature: MA Experiment 108536 PARAMETER Experiment Name: Zm_Meristem_P Parameter: Age (day) Value: 8
  misc_feature: MA Experiment 108536 PARAMETER Experiment Name: Zm_Meristem_P Parameter: Organism Value: Zea mays
  misc_feature: MA Experiment 108536 PARAMETER Experiment Name: Zm_Meristem_P Parameter: Plant Line Value: 35A19
  misc_feature: MA Experiment 108536 PARAMETER Experiment Name: Zm_Meristem_P Parameter: Tissue Value: Shoot Meristem vs. Above Shoot Meristem
  misc_feature: MA Experiment ID: 108543 Result: Down-regulated in Transcription
  misc_feature: MA Experiment ID: 20000492 Result: Down-regulated in Transcription
  misc_feature: MA Experiment 20000492 PARAMETER Experiment Name: Zm_Hybrid_Seed_Dev_P Parameter: DAP Value: 12
  misc_feature: MA Experiment 20000492 PARAMETER Experiment Name: Zm_Hybrid_Seed_Dev_P Parameter: Organism Value: Zea mays
  misc_feature: MA Experiment 20000492 PARAMETER Experiment Name: Zm_Hybrid_Seed_Dev_P Parameter: Plant Line Value: 35A19
  misc_feature: MA Experiment 20000492 PARAMETER Experiment Name: Zm_Hybrid_Seed_Dev_P Parameter: Tissue Value: Fert Kernel vs. Unfert Floret
  misc_feature: MA Experiment ID: 20000535 Result: Down-regulated in Transcription
  misc_feature: MA Experiment 20000535 PARAMETER Experiment Name: Zm_Hybrid_Seed_Dev_P Parameter: DAP Value: 30 vs. 12
  misc_feature: MA Experiment 20000535 PARAMETER Experiment Name: Zm_Hybrid_Seed_Dev_P Parameter: Organism Value: Zea mays
  misc_feature: MA Experiment 20000535 PARAMETER Experiment Name: Zm_Hybrid_Seed_Dev_P Parameter: Plant Line Value: 35A19
  misc_feature: MA Experiment 20000535 PARAMETER Experiment Name: Zm_Hybrid_Seed_Dev_P Parameter: Tissue Value: Embryo vs. Unfert Floret
atcagatctccagctagcttccttgctacttactcccctacccgctgcaccctcgccatggatccgccgagctccgatatcgtagtcgacactccatacttccgcatctacagtgaccggcgcatcgaccgcttggtcggcaccgataccgtgccggcgggctttgatcccaccaccggcgtcacctccaaagacgtcgttgtagacagcgacgccggcgtctacgttcgcctgtacctcccggacacggctacggggtccgatgattccaagaagctcccggtgctagtctacttccacggcggcggctttgtcacccactcggcagcgtctccgccctatcagtccttcctcaacaccctggccgcgaaggccggcctgctcatcgtctccgtgaactaccgcctcgcgccagagcacccgctgcctgcaggctacgaggactccttccgcgcgctcaggtggacggcctctggtagcggggacccctggctgtcacatcacggcgacctgggccgcatcttcctggccggcgacagcgccggtgggaacttcgtccacaacatcgctgtgatggcagccgcgtcggaggtgccagtgcgaatcaggggtgcggtcctcctgcacgcggggttcggtggcagggagcgcatcgacggagagacgccggagactgtggcgctgatggagaagctgtggggggtcgtgtgcctcgaggcgacggacggcctgaacgacccgcggataaatccgttggctgccgccgcggcgccgagcctgcggaacctgccgtgtgagagggtgctcgtctgcgcggcagagttggacttcctgcggccgaggaacagggcgtactacgaggccctcgcagcaagctggcggggcggcacggtggagtggttcgagtcgaagggcaaggagcacgtcttcttcctctacaaccccggctgcggcgaggccgtggagctcatggatcgtctggtcgcgttctttgctgggaactgaaattcgtcatgtgtggatgtgaccgcgaccacatccacatgcagtgagacggatggatcaaacgaagatgcagctcatcgccgaatcgaatggttgagctgtgtccaggaaaagaaaactaaaagtgactagaataattgagctcggagccttggattgatcagtttgtgct

SEQ ID NO: 11076 - protein, 334 aa, Zea mays subsp. mays
  peptide (1)..(334): Ceres Seq. ID no. 12374152
  misc_feature (26)..(332): Homolog of NCBI NO: 38344841 NR Description: OSJNBa0064H22.22 [Oryza sativa (japonica
  misc_feature (32)..(331): Homolog of NCBI NO: 21536771 NR Description: unknown [Arabidopsis thaliana]
  misc_feature (32)..(331): Homolog of NCBI NO: 18401743 NR Description: expressed protein; protein id: At1g47480.1, by cDNA: 111056. [Arabidopsis thaliana] >gi|25405208|pir||A96515
  misc_feature (25)..(333): Homolog of NCBI NO: 18086341 NR Description: AT3g48690/T8P19_200 [Arabidopsis thaliana]
  misc_feature (25)..(333): Homolog of NCBI NO: 15228425 NR Description: putative protein; protein id: At3g48690.1, by cDNA: gi_18086340 [Arabidopsis thaliana]
  misc_feature (25)..(334): Homolog of NCBI NO: 15228426 NR Description: putative protein; protein id: At3g48700.1
  misc_feature (8)..(333): Homolog of NCBI NO: 21537287 NR Description: putative esterase [Arabidopsis thaliana]
  misc_feature (24)..(330): Homolog of NCBI NO: 34393975 NR Description: putative PrMC3 [Oryza sativa (japonica
  misc_feature (8)..(333): Homolog of NCBI NO: 18402731 NR Description: expressed protein; protein id: At1g49650.1, by cDNA: 12638. [Arabidopsis thaliana]
  misc_feature (24)..(330): Homolog of NCBI NO: 34393904 NR Description: putative cell death associated protein [Oryza
IRSPASFLATYSPTRCTLAMDPPSSDIVVDTPYFRIYSDRRIDRLVGTDTVPAGFDPTTGVTSKDVVVDSDAGVYVRLYLPDTATGSDDSKKLPVLVYFHGGGFVTHSAASPPYQSFLNTLAAKAGLLIVSVNYRLAPEHPLPAGYEDSFRALRWTASGSGDPWLSHHGDLGRIFLAGDSAGGNFVHNIAVMAAASEVPVRIRGAVLLHAGFGGRERIDGETPETVALMEKLWGVVCLEATDGLNDPRINPLAAAAAPSLRNLPCERVLVCAAELDFLRPRNRAYYEALAASWRGGTVEWFESKGKEHVFFLYNPGCGEAVELMDRLVAFFAGN

SEQ ID NO: 11077 - protein, 315 aa, Zea mays subsp. mays
  peptide (1)..(315): Ceres Seq. ID no. 12374153
  misc_feature (7)..(313): Homolog of NCBI NO: 38344841 NR Description: OSJNBa0064H22.22 [Oryza sativa (japonica
  misc_feature (13)..(312): Homolog of NCBI NO: 21536771 NR Description: unknown [Arabidopsis thaliana]
  misc_feature (13)..(312): Homolog of NCBI NO: 18401743 NR Description: expressed protein; protein id: At1g47480.1, by cDNA: 111056. [Arabidopsis thaliana] >gi|25405208|pir||A96515
  misc_feature (6)..(314): Homolog of NCBI NO: 18086341 NR Description: AT3g48690/T8P19_200 [Arabidopsis thaliana]
  misc_feature (6)..(314): Homolog of NCBI NO: 15228425 NR Description: putative protein; protein id: At3g48690.1, by cDNA: gi_18086340 [Arabidopsis thaliana]
  misc_feature (6)..(315): Homolog of NCBI NO: 15228426 NR Description: putative protein; protein id: At3g48700.1
  misc_feature (1)..(314): Homolog of NCBI NO: 21537287 NR Description: putative esterase [Arabidopsis thaliana]
  misc_feature (5)..(311): Homolog of NCBI NO: 34393975 NR Description: putative PrMC3 [Oryza sativa (japonica
  misc_feature (1)..(314): Homolog of NCBI NO: 18402731 NR Description: expressed protein; protein id: At1g49650.1, by cDNA: 12638. [Arabidopsis thaliana]
  misc_feature (5)..(311): Homolog of NCBI NO: 34393904 NR Description: putative cell death associated protein [Oryza
MDPPSSDIVVDTPYFRIYSDRRIDRLVGTDTVPAGFDPTTGVTSKDVVVDSDAGVYVRLYLPDTATGSDDSKKLPVLVYFHGGGFVTHSAASPPYQSFLNTLAAKAGLLIVSVNYRLAPEHPLPAGYEDSFRALRWTASGSGDPWLSHHGDLGRIFLAGDSAGGNFVHNIAVMAAASEVPVRIRGAVLLHAGFGGRERIDGETPETVALMEKLWGVVCLEATDGLNDPRINPLAAAAAPSLRNLPCERVLVCAAELDFLRPRNRAYYEALAASWRGGTVEWFESKGKEHVFFLYNPGCGEAVELMDRLVAFFAGN

SEQ ID NO: 11078 - DNA, 1749 bp, Zea mays subsp. mays
  misc_feature (1)..(1749): Ceres Seq. ID no. 12390530
  misc_feature: MA Experiment ID: 108689 Result: Up-regulated in Transcription
  misc_feature: MA Experiment 108689 PARAMETER Experiment Name: Zm_Drought_Roots_P Parameter: Age (day) Value: 9
  misc_feature: MA Experiment 108689 PARAMETER Experiment Name: Zm_Drought_Roots_P Parameter: Organism Value: Zea mays
  misc_feature: MA Experiment 108689 PARAMETER Experiment Name: Zm_Drought_Roots_P Parameter: Plant Line Value: 35A19
  misc_feature: MA Experiment 108689 PARAMETER Experiment Name: Zm_Drought_Roots_P Parameter: Timepoint (hr) Value: 24
  misc_feature: MA Experiment 108689 PARAMETER Experiment Name: Zm_Drought_Roots_P Parameter: Tissue Value: Roots
  misc_feature: MA Experiment 108689 PARAMETER Experiment Name: Zm_Drought_Roots_P Parameter: Treatment Value: Drought vs. No Drought
agttcccatccattggtgtggacgtgtggtggttgcgttgcgttgcttcgagttggaggttggttggagttggagtgggccgcgtgccgcgtgcgagatgatctgagtggagaggccatggagtggtgtgattagcggttgctgggtcaggagaaggcggcgtgtgttttgatcctactcgcgtttgaggggccccgatttcgagcgggtgttcaattttggtgccggatttttaaggaggatccaatttaggaagaattttggttttggggacaatggttttggactgcctgatattcgattcataggttggtcaaacgcttaggagtagagaatttttttttcccggaaaacaagagccatttttctaattgtgctactcgtcaatcaatccatggaagctgaactctggaagaagaaactttcctaattagacccggtatttcgtggttggccgttggcgtctaaagcgcgttttagtttaaatatgaacacattttcctgtttactccgcccaaaatctttccgctggatctacttgtgaatcgggtttgtttgttttttacctgagctattcttgtcgatttaggatttcaagtcggcagatccaagggaacgccgaattttgcctgatttcttcgcaatttttggtccgaccaagaggttcctagcctatttttttcctcgcgagaagcaagggctctcccttttcttctttcgccatgtccatggcgttgagccgcttcacgcaatggctgtggccggggggcgccgcggcgcgggtggacacccacgagcaccccagcggggggctaacgagctcctccttccctgacttcccctccgggttccgggagcccgacaccgtcacgttctacaccggccgccagcgcgcgcgcccgaggagggtcaggaatcgtcgccgcagccgcggggaggcccgtgtcgaccgggagtacgacatggtcatcgtcccgtccgacggcggtggctgcctgtctggctccgactccgacgactccgactggtccatcggctggctcgagccacaggcgccggagcttcagacggacggcgaccccgagaactgcttcgccgtcctcgtgccgtgttaccgccacggccgccaagagcagcagccccggaggcaggagggcaggtttcttggcgccggcgccctcaccgatggtggtccctctgatggaaagaattttgtagagcagtggctttcttctttccagaactaatatcgtcagacctcgcctaagctaccctgtaaatagtatcactctgttttagttctactacgtttgtcctagtcgcacaacgtatcgatgaaggaagacatgaaaaagccctaaaaaaagaaggaaatctaaaaagaaaaatgaggagcagtgggattctgaagcggcaccaaatgggtatgtccttcctgaggtgttcccaggccattctactcttgcaaagcaatgcgaaagctgaactacacaaactgcacgccatcaaaaatgattttgccgtcctgatatgtgcggagtgctaacctgatgattgataacacgtagagatgaactgctattccattgttaatttgtcccacttgctcgtggacctcgaattctactgcatgtacattatgttcttgcagtgtatatatatagtcttgcccagagctgcagtggcgtgattgttcagtctgcctgtatatagtgttcttgcagtgtatataagccttgcgcagagctg

SEQ ID NO: 11079 - protein, 174 aa, Zea mays subsp. mays
  peptide (1)..(174): Ceres Seq. ID no. 12390531
  misc_feature (1)..(173): Homolog of NCBI NO: 15144509 NR Description: unknown [Lycopersicon esculentum]
  misc_feature (73)..(173): Homolog of NCBI NO: 15809848 NR Description: AT4g38060/F20D10_180 [Arabidopsis thaliana] unknown protein [Arabidopsis thaliana]
  misc_feature (1)..(171): Homolog of NCBI NO: 15238477 NR Description: putative protein; protein id: At5g65480.1, by cDNA: gi_16604319, supported by cDNA: gi_19699193 [Arabidopsis >gi|8978277|dbj|BAA98168.1| gene_id:K19O4.1~pir||T05633~similar
  misc_feature (1)..(173): Homolog of NCBI NO: 15144509 NR Description: unknown [Lycopersicon esculentum]
  misc_feature (73)..(173): Homolog of NCBI NO: 15809848 NR Description: AT4g38060/F20D10_180 [Arabidopsis thaliana] unknown protein [Arabidopsis thaliana]
  misc_feature (1)..(171): Homolog of NCBI NO: 15238477 NR Description: putative protein; protein id: At5g65480.1, by cDNA: gi_16604319, supported by cDNA: gi_19699193 [Arabidopsis >gi|8978277|dbj|BAA98168.1| gene_id:K19O4.1~pir||T05633~similar
MSMALSRFTQWLWPGGAAARVDTHEHPSGGLTSSSFPDFPSGFREPDTVTFYTGRQRARPRRVRNRRRSRGEARVDREYDMVIVPSDGGGCLSGSDSDDSDWSIGWLEPQAPELQTDGDPENCFAVLVPCYRHGRQEQQPRRQEGRFLGAGALTDGGPSDGKNFVEQWLSSFQN

SEQ ID NO: 11080 - protein, 172 aa, Zea mays subsp. mays
  peptide (1)..(172): Ceres Seq. ID no. 12390532
  misc_feature (1)..(171): Homolog of NCBI NO: 15144509 NR Description: unknown [Lycopersicon esculentum]
  misc_feature (71)..(171): Homolog of NCBI NO: 15809848 NR Description: AT4g38060/F20D10_180 [Arabidopsis thaliana] unknown protein [Arabidopsis thaliana]
  misc_feature (1)..(169): Homolog of NCBI NO: 15238477 NR Description: putative protein; protein id: At5g65480.1, by cDNA: gi_16604319, supported by cDNA: gi_19699193 [Arabidopsis >gi|8978277|dbj|BAA98168.1| gene_id:K19O4.1~pir||T05633~similar
  misc_feature (1)..(171): Homolog of NCBI NO: 15144509 NR Description: unknown [Lycopersicon esculentum]
  misc_feature (71)..(171): Homolog of NCBI NO: 15809848 NR Description: AT4g38060/F20D10_180 [Arabidopsis thaliana] unknown protein [Arabidopsis thaliana]
  misc_feature (1)..(169): Homolog of NCBI NO: 15238477 NR Description: putative protein; protein id: At5g65480.1, by cDNA: gi_16604319, supported by cDNA: gi_19699193 [Arabidopsis >gi|8978277|dbj|BAA98168.1| gene_id:K19O4.1~pir||T05633~similar
MALSRFTQWLWPGGAAARVDTHEHPSGGLTSSSFPDFPSGFREPDTVTFYTGRQRARPRRVRNRRRSRGEARVDREYDMVIVPSDGGGCLSGSDSDDSDWSIGWLEPQAPELQTDGDPENCFAVLVPCYRHGRQEQQPRRQEGRFLGAGALTDGGPSDGKNFVEQWLSSFQN

SEQ ID NO: 11081 - protein, 94 aa, Zea mays subsp. mays
  peptide (1)..(94): Ceres Seq. ID no. 12390533
  misc_feature (1)..(93): Homolog of NCBI NO: 15144509 NR Description: unknown [Lycopersicon esculentum]
  misc_feature (1)..(93): Homolog of NCBI NO: 15809848 NR Description: AT4g38060/F20D10_180 [Arabidopsis thaliana] unknown protein [Arabidopsis thaliana]
  misc_feature (1)..(91): Homolog of NCBI NO: 15238477 NR Description: putative protein; protein id: At5g65480.1, by cDNA: gi_16604319, supported by cDNA: gi_19699193 [Arabidopsis >gi|8978277|dbj|BAA98168.1| gene_id:K19O4.1~pir||T05633~similar
  misc_feature (1)..(93): Homolog of NCBI NO: 15144509 NR Description: unknown [Lycopersicon esculentum]
  misc_feature (1)..(93): Homolog of NCBI NO: 15809848 NR Description: AT4g38060/F20D10_180 [Arabidopsis thaliana] unknown protein [Arabidopsis thaliana]
  misc_feature (1)..(91): Homolog of NCBI NO: 15238477 NR Description: putative protein; protein id: At5g65480.1, by cDNA: gi_16604319, supported by cDNA: gi_19699193 [Arabidopsis >gi|8978277|dbj|BAA98168.1| gene_id:K19O4.1~pir||T05633~similar
MVIVPSDGGGCLSGSDSDDSDWSIGWLEPQAPELQTDGDPENCFAVLVPCYRHGRQEQQPRRQEGRFLGAGALTDGGPSDGKNFVEQWLSSFQN

SEQ ID NO: 11082 - DNA, 1652 bp, Zea mays subsp. mays
  misc_feature (1)..(1652): Ceres Seq. ID no. 12411954
  misc_feature: MA Experiment ID: 108522 Result: Down-regulated in Transcription
  misc_feature: MA Experiment 108522 PARAMETER Experiment Name: Zm_42deg_Heat_P Parameter: Age (day) Value: 8
  misc_feature: MA Experiment 108522 PARAMETER Experiment Name: Zm_42deg_Heat_P Parameter: Organism Value: Zea mays
  misc_feature: MA Experiment 108522 PARAMETER Experiment Name: Zm_42deg_Heat_P Parameter: Plant Line Value: 35A19
  misc_feature: MA Experiment 108522 PARAMETER Experiment Name: Zm_42deg_Heat_P Parameter: Temperature (deg C) Value: 42 vs. 22
  misc_feature: MA Experiment 108522 PARAMETER Experiment Name: Zm_42deg_Heat_P Parameter: Timepoint (hr) Value: 1
  misc_feature: MA Experiment 108522 PARAMETER Experiment Name: Zm_42deg_Heat_P Parameter: Tissue Value: Aerial
  misc_feature: MA Experiment ID: 108556 Result: Down-regulated in Transcription
  misc_feature: MA Experiment 108556 PARAMETER Experiment Name: Zm_Drought_P Parameter: Age (day) Value: 9
  misc_feature: MA Experiment 108556 PARAMETER Experiment Name: Zm_Drought_P Parameter: Organism Value: Zea mays
  misc_feature: MA Experiment 108556 PARAMETER Experiment Name: Zm_Drought_P Parameter: Plant Line Value: 35A19
  misc_feature: MA Experiment 108556 PARAMETER Experiment Name: Zm_Drought_P Parameter: Timepoint (hr) Value: 24
  misc_feature: MA Experiment 108556 PARAMETER Experiment Name: Zm_Drought_P Parameter: Tissue Value: Aerial
  misc_feature: MA Experiment 108556 PARAMETER Experiment Name: Zm_Drought_P Parameter: Treatment Value: Drought vs. No Drought
aggtttgtgtgaccgttgcaacgaaacaaaaaaagccaaagggatcccaaacgaaaacgagccagctgagcaaacacaacactcgcatcggcacccacactgccactcatcacattggcacccctccgacacgggccgggacttctcggactgcaggcagccaggcacgcaccagcaacaccccccacccgccggctcggagcggggccccacccgaatcacacagatcgggacgccggaggaggagcaacgccgtcccgcatcaccggagcaacgcgggcgcggagaggccagccagcgcaggcgcagttcaagctttggattcccggatcccacaccaccggtctctctcggggagtgtaatccagcgagcgttgagttgaaagccgcgcaagtggagatgagtactctgaagaaatccgacaagaaggctgccctcgacttcgcagcatggagtttcaatgtcaccacatcggttggactcatcatggtcaacaaggccttgatggctacgtatgggttcagtttcgccacaacattaaccgggcttcattttgtgactactaccttgatgactatcttatttcgttggttaggcctgagtcagccatcccacttacccctagcagatctagttaaatttgtgatattttcgaacttgtcaattgttgggatgaatgtgagcttgatgtggaactctgttggcttttatcagatagcaaagctgtgcatgatacctgcatcatgtcttctggaggttgtttttgatcatgtacattattcccgggacacaaagctgagcataatggtcgtgcttataggagttgcagtctgcacggttactgatgtcagtgtgaatgcaagaggtctaattgctgctgttatagctgtctggagcacagctttgcaacaatactatgtccattttctccaacgcaagtactccctgaactcattcaacctcctgggccacacagctccagcccaagctgggtcactgctgctagtgggaccatttgcggattacttgttgacaggcaaaagggtggatcagttcagtttgtcatcgcttgctctgtttttcctggcactctcatgcttcatcgccattggtgttaatctgagccaattcatctgcatcgggcggttctccgccgtatccttccaagtcctaggccatatgaagaccgtacttgttctgtcccttgggttccttttctttggcaaggagggcctgaaccttcaggtagtccttgggatggtcctggccgttctcggaatgatatggtacgggaacgcgtctgctaaaccaggtggcaaagagcggcgcagcatcctgccggtgaggtctgcgagtctcaagggaagttccgaagaaaaggccggtgccgagaaatagtcttgctatatctgactgcaaacattttattagatggggaatttttcgttccgaaggttaaatctctggtgaggtgacgcgagtatcacagattggaagctctgcattatgtctgacgcgcacaaaacaaacgcgtcccttgtagagactctggattgttatagttacaggtatactgtaaagcttcattttttttggcgctctgaatcgtttgcagtgagggggaaagacggacatggtttacggagggttc

SEQ ID NO: 11083 - protein, 465 aa, Zea mays subsp. mays
  peptide (1)..(465): Ceres Seq. ID no. 12411955
  misc_feature (135)..(458): Homolog of NCBI NO: 18420440 NR Description: putative protein; protein id: At4g39390.1, by cDNA: 35002., supported by cDNA: gi_20259515 [Arabidopsis >gi|20259516|gb|AAM13878.1| unknown protein [Arabidopsis
  misc_feature (135)..(458): Homolog of NCBI NO: 21593003 NR Description: unknown [Arabidopsis thaliana]
  misc_feature (134)..(460): Homolog of NCBI NO: 30313364 NR Description: putative transmembrane protein [Oryza sativa]
  misc_feature (134)..(465): Homolog of NCBI NO: 15234794 NR Description: hypothetical protein; protein id: At4g09810.1
  misc_feature (134)..(465): Homolog of NCBI NO: 18399097 NR Description: expressed protein; protein id: At1g34020.1, by cDNA: 7642. [Arabidopsis thaliana] >gi|25354483|pir||A86464
  misc_feature (134)..(465): Homolog of NCBI NO: 21595054 NR Description: unknown [Arabidopsis thaliana]
  misc_feature (135)..(458): Homolog of NCBI NO: 7486049 NR Description: hypothetical protein F23K16.20 - Arabidopsis >gi|5042155|emb|CAB44674.1| putative protein [Arabidopsis >gi|7270923|emb|CAB80602.1| putative protein [Arabidopsis
  misc_feature (139)..(447): Homolog of NCBI NO: 18394949 NR Description: expressed protein; protein id: At1g21070.1, by cDNA: 108746. [Arabidopsis thaliana] >gi|25354485|pir||G86343
  misc_feature (134)..(447): Homolog of NCBI NO: 21536703 NR Description: unknown [Arabidopsis thaliana]
  misc_feature (139)..(440): Homolog of NCBI NO: 18411172 NR Description: expressed protein; protein id: At1g76670.1, by cDNA: gi_14532697, supported by cDNA: gi_16604379, supported cDNA: gi_18491194 [Arabidopsis thaliana] >gi|25354481|pir||A96795
GLCDRCNETKKAKGIPNENEPAEQTQHSHRHPHCHSSHWHPSDTGRDFSDCRQPGTHQQHPPPAGSERGPTRITQIGTPEEEQRRPASPEQRGRGEASQRRRSSSFGFPDPTPPVSLGECNPASVELKAAQVEMSTLKKSDKKAALDFAAWSFNVTTSVGLIMVNKALMATYGFSFATTLTGLHFVTTTLMTILFRWLGLSQPSHLPLADLVKFVIFSNLSIVGMNVSLMWNSVGFYQIAKLCMIPASCLLEVVFDHVHYSRDTKLSIMVVLIGVAVCTVTDVSVNARGLIAAVIAVWSTALQQYYVHFLQRKYSLNSFNLLGHTAPAQAGSLLLVGPFADYLLTGKRVDQFSLSSLALFFLALSCFIAIGVNLSQFICIGRFSAVSFQVLGHMKTVLVLSLGFLFFGKEGLNLQVVLGMVLAVLGMIWYGNASAKPGGKERRSILPVRSASLKGSSEEKAGAEK

SEQ ID NO: 11084 - protein, 332 aa, Zea mays subsp. mays
  peptide (1)..(332): Ceres Seq. ID no. 12411956
  misc_feature (2)..(325): Homolog of NCBI NO: 18420440 NR Description: putative protein; protein id: At4g39390.1, by cDNA: 35002., supported by cDNA: gi_20259515 [Arabidopsis >gi|20259516|gb|AAM13878.1| unknown protein [Arabidopsis
  misc_feature (2)..(325): Homolog of NCBI NO: 21593003 NR Description: unknown [Arabidopsis thaliana]
  misc_feature (1)..(327): Homolog of NCBI NO: 30313364 NR Description: putative transmembrane protein [Oryza sativa]
  misc_feature (1)..(332): Homolog of NCBI NO: 15234794 NR Description: hypothetical protein; protein id: At4g09810.1
  misc_feature (1)..(332): Homolog of NCBI NO: 18399097 NR Description: expressed protein; protein id: At1g34020.1, by cDNA: 7642. [Arabidopsis thaliana] >gi|25354483|pir||A86464
  misc_feature (1)..(332): Homolog of NCBI NO: 21595054 NR Description: unknown [Arabidopsis thaliana]
  misc_feature (2)..(325): Homolog of NCBI NO: 7486049 NR Description: hypothetical protein F23K16.20 - Arabidopsis >gi|5042155|emb|CAB44674.1| putative protein [Arabidopsis >gi|7270923|emb|CAB80602.1| putative protein [Arabidopsis
  misc_feature (6)..(314): Homolog of NCBI NO: 18394949 NR Description: expressed protein; protein id: At1g21070.1, by cDNA: 108746. [Arabidopsis thaliana] >gi|25354485|pir||G86343
  misc_feature (1)..(314): Homolog of NCBI NO: 21536703 NR Description: unknown [Arabidopsis thaliana]
  misc_feature (6)..(307): Homolog of NCBI NO: 18411172 NR Description: expressed protein; protein id: At1g76670.1, by cDNA: gi_14532697, supported by cDNA: gi_16604379, supported cDNA: gi_18491194 [Arabidopsis thaliana] >gi|25354481|pir||A96795
MSTLKKSDKKAALDFAAWSFNVTTSVGLIMVNKALMATYGFSFATTLTGLHFVTTTLMTILFRWLGLSQPSHLPLADLVKFVIFSNLSIVGMNVSLMWNSVGFYQIAKLCMIPASCLLEVVFDHVHYSRDTKLSIMVVLIGVAVCTVTDVSVNARGLIAAVIAVWSTALQQYYVHFLQRKYSLNSFNLLGHTAPAQAGSLLLVGPFADYLLTGKRVDQFSLSSLALFFLALSCFIAIGVNLSQFICIGRFSAVSFQVLGHMKTVLVLSLGFLFFGKEGLNLQVVLGMVLAVLGMIWYGNASAKPGGKERRSILPVRSASLKGSSEEKAGAEK

SEQ ID NO: 11085 - protein, 303 aa, Zea mays subsp. mays
  peptide (1)..(303): Ceres Seq. ID no. 12411957
  misc_feature (1)..(296): Homolog of NCBI NO: 18420440 NR Description: putative protein; protein id: At4g39390.1, by cDNA: 35002., supported by cDNA: gi_20259515 [Arabidopsis >gi|20259516|gb|AAM13878.1| unknown protein [Arabidopsis
  misc_feature (1)..(296): Homolog of NCBI NO: 21593003 NR Description: unknown [Arabidopsis thaliana]
  misc_feature (1)..(298): Homolog of NCBI NO: 30313364 NR Description: putative transmembrane protein [Oryza sativa]
  misc_feature (1)..(303): Homolog of NCBI NO: 15234794 NR Description: hypothetical protein; protein id: At4g09810.1
  misc_feature (1)..(303): Homolog of NCBI NO: 18399097 NR Description: expressed protein; protein id: At1g34020.1, by cDNA: 7642. [Arabidopsis thaliana] >gi|25354483|pir||A86464
  misc_feature (1)..(303): Homolog of NCBI NO: 21595054 NR Description: unknown [Arabidopsis thaliana]
  misc_feature (1)..(296): Homolog of NCBI NO: 7486049 NR Description: hypothetical protein F23K16.20 - Arabidopsis >gi|5042155|emb|CAB44674.1| putative protein [Arabidopsis >gi|7270923|emb|CAB80602.1| putative protein [Arabidopsis
  misc_feature (1)..(285): Homolog of NCBI NO: 18394949 NR Description: expressed protein; protein id: At1g21070.1, by cDNA: 108746. [Arabidopsis thaliana] >gi|25354485|pir||G86343
  misc_feature (1)..(285): Homolog of NCBI NO: 21536703 NR Description: unknown [Arabidopsis thaliana]
  misc_feature (1)..(278): Homolog of NCBI NO: 18411172 NR Description: expressed protein; protein id: At1g76670.1, by cDNA: gi_14532697, supported by cDNA: gi_16604379, supported cDNA: gi_18491194 [Arabidopsis thaliana] >gi|25354481|pir||A96795
MVNKALMATYGFSFATTLTGLHFVTTTLMTILFRWLGLSQPSHLPLADLVKFVIFSNLSIVGMNVSLMWNSVGFYQIAKLCMIPASCLLEVVFDHVHYSRDTKLSIMVVLIGVAVCTVTDVSVNARGLIAAVIAVWSTALQQYYVHFLQRKYSLNSFNLLGHTAPAQAGSLLLVGPFADYLLTGKRVDQFSLSSLALFFLALSCFIAIGVNLSQFICIGRFSAVSFQVLGHMKTVLVLSLGFLFFGKEGLNLQVVLGMVLAVLGMIWYGNASAKPGGKERRSILPVRSASLKGSSEEKAGAEK

SEQ ID NO: 11086 - DNA, 1032 bp, Zea mays subsp. mays
  misc_feature (1)..(1032): Ceres Seq. ID no. 12413807
  misc_feature: MA Experiment ID: 108515 Result: Up-regulated in Transcription
  misc_feature: MA Experiment 108515 PARAMETER Experiment Name: Zm_2mM_SA_P Parameter: Age (day) Value: 8
  misc_feature: MA Experiment 108515 PARAMETER Experiment Name: Zm_2mM_SA_P Parameter: Organism Value: Zea mays
  misc_feature: MA Experiment 108515 PARAMETER Experiment Name: Zm_2mM_SA_P Parameter: Plant Line Value: 35A19
  misc_feature: MA Experiment 108515 PARAMETER Experiment Name: Zm_2mM_SA_P Parameter: Timepoint (hr) Value: 12
  misc_feature: MA Experiment 108515 PARAMETER Experiment Name: Zm_2mM_SA_P Parameter: Tissue Value: Aerial
  misc_feature: MA Experiment 108515 PARAMETER Experiment Name: Zm_2mM_SA_P Parameter: Treatment Value: 2mM SA vs. No Treatment
  misc_feature: MA Experiment ID: 108522 Result: Up-regulated in Transcription
  misc_feature: MA Experiment 108522 PARAMETER Experiment Name: Zm_42deg_Heat_P Parameter: Age (day) Value: 8
  misc_feature: MA Experiment 108522 PARAMETER Experiment Name: Zm_42deg_Heat_P Parameter: Organism Value: Zea mays
  misc_feature: MA Experiment 108522 PARAMETER Experiment Name: Zm_42deg_Heat_P Parameter: Plant Line Value: 35A19
  misc_feature: MA Experiment 108522 PARAMETER Experiment Name: Zm_42deg_Heat_P Parameter: Temperature (deg C) Value: 42 vs. 22
  misc_feature: MA Experiment 108522 PARAMETER Experiment Name: Zm_42deg_Heat_P Parameter: Timepoint (hr) Value: 1
  misc_feature: MA Experiment 108522 PARAMETER Experiment Name: Zm_42deg_Heat_P Parameter: Tissue Value: Aerial
  misc_feature: MA Experiment ID: 108523 Result: Up-regulated in Transcription
  misc_feature: MA Experiment 108523 PARAMETER Experiment Name: Zm_42deg_Heat_P Parameter: Age (day) Value: 8
  misc_feature: MA Experiment 108523 PARAMETER Experiment Name: Zm_42deg_Heat_P Parameter: Organism Value: Zea mays
  misc_feature: MA Experiment 108523 PARAMETER Experiment Name: Zm_42deg_Heat_P Parameter: Plant Line Value: 35A19
  misc_feature: MA Experiment 108523 PARAMETER Experiment Name: Zm_42deg_Heat_P Parameter: Temperature (deg C) Value: 42 vs. 22
  misc_feature: MA Experiment 108523 PARAMETER Experiment Name: Zm_42deg_Heat_P Parameter: Timepoint (hr) Value: 6
  misc_feature: MA Experiment 108523 PARAMETER Experiment Name: Zm_42deg_Heat_P Parameter: Tissue Value: Aerial
  misc_feature: MA Experiment ID: 108527 Result: Up-regulated in Transcription
  misc_feature: MA Experiment 108527 PARAMETER Experiment Name: Zm_5mM_NO_P Parameter: Age (day) Value: 8
  misc_feature: MA Experiment 108527 PARAMETER Experiment Name: Zm_5mM_NO_P Parameter: Organism Value: Zea mays
  misc_feature: MA Experiment 108527 PARAMETER Experiment Name: Zm_5mM_NO_P Parameter: Plant Line Value: 35A19
  misc_feature: MA Experiment 108527 PARAMETER Experiment Name: Zm_5mM_NO_P Parameter: Timepoint (hr) Value: 6
  misc_feature: MA Experiment 108527 PARAMETER Experiment Name: Zm_5mM_NO_P Parameter: Tissue Value: Aerial
  misc_feature: MA Experiment 108527 PARAMETER Experiment Name: Zm_5mM_NO_P Parameter: Treatment Value: 5mM NO vs. No Treatment
  misc_feature: MA Experiment ID: 108535 Result: Down-regulated in Transcription
  misc_feature: MA Experiment 108535 PARAMETER Experiment Name: Zm_Meristem_P Parameter: Age (day) Value: 8
  misc_feature: MA Experiment 108535 PARAMETER Experiment Name: Zm_Meristem_P Parameter: Organism Value: Zea mays
  misc_feature: MA Experiment 108535 PARAMETER Experiment Name: Zm_Meristem_P Parameter: Plant Line Value: 35A19
  misc_feature: MA Experiment 108535 PARAMETER Experiment Name: Zm_Meristem_P Parameter: Tissue Value: Root Meristem vs. Above Root Meristem
  misc_feature: MA Experiment ID: 20000477 Result: Up-regulated in Transcription
  misc_feature: MA Experiment 20000477 PARAMETER Experiment Name: Zm_5mM_SA_P Parameter: Age (day) Value: 10
  misc_feature: MA Experiment 20000477 PARAMETER Experiment Name: Zm_5mM_SA_P Parameter: Organism Value: Zea mays
  misc_feature: MA Experiment 20000477 PARAMETER Experiment Name: Zm_5mM_SA_P Parameter: Plant Line Value: 35A19
  misc_feature: MA Experiment 20000477 PARAMETER Experiment Name: Zm_5mM_SA_P Parameter: Timepoint (hr) Value: 48
  misc_feature: MA Experiment 20000477 PARAMETER Experiment Name: Zm_5mM_SA_P Parameter: Tissue Value: Aerial
  misc_feature: MA Experiment 20000477 PARAMETER Experiment Name: Zm_5mM_SA_P Parameter: Treatment Value: 5mM SA vs. No Treatment
  misc_feature: MA Experiment ID: 20000478 Result: Up-regulated in Transcription
  misc_feature: MA Experiment 20000478 PARAMETER Experiment Name: Zm_5mM_SA_P Parameter: Age (day) Value: 11
  misc_feature: MA Experiment 20000478 PARAMETER Experiment Name: Zm_5mM_SA_P Parameter: Organism Value: Zea mays
  misc_feature: MA Experiment 20000478 PARAMETER Experiment Name: Zm_5mM_SA_P Parameter: Plant Line Value: 35A19
  misc_feature: MA Experiment 20000478 PARAMETER Experiment Name: Zm_5mM_SA_P Parameter: Timepoint (hr) Value: 72
  misc_feature: MA Experiment 20000478 PARAMETER Experiment Name: Zm_5mM_SA_P Parameter: Tissue Value: Aerial
  misc_feature: MA Experiment 20000478 PARAMETER Experiment Name: Zm_5mM_SA_P Parameter: Treatment Value: 5mM SA vs. No Treatment
  misc_feature: MA Experiment ID: 20000626 Result: Up-regulated in Transcription
  misc_feature: MA Experiment 20000626 PARAMETER Experiment Name: Zm_Herbicide-Treatments_P Parameter: Timepoint (hr) Value: 12
  misc_feature: MA Experiment 20000626 PARAMETER Experiment Name: Zm_Herbicide-Treatments_P Parameter: Tissue Value: Aerial
  misc_feature: MA Experiment 20000626 PARAMETER Experiment Name: Zm_Herbicide-Treatments_P Parameter: Treatment Value: Roundup vs. No Treatment
  misc_feature: MA Experiment ID: 20000627 Result: Up-regulated in Transcription
  misc_feature: MA Experiment 20000627 PARAMETER Experiment Name: Zm_Herbicide-Treatments_P Parameter: Timepoint (hr) Value: 12
  misc_feature: MA Experiment 20000627 PARAMETER Experiment Name: Zm_Herbicide-Treatments_P Parameter: Tissue Value: Aerial
  misc_feature: MA Experiment 20000627 PARAMETER Experiment Name: Zm_Herbicide-Treatments_P Parameter: Treatment Value: Finale vs. No Treatment
  misc_feature: MA Experiment ID: 20000630 Result: Up-regulated in Transcription
  misc_feature: MA Experiment 20000630 PARAMETER Experiment Name: Zm_Herbicide-Treatments_P Parameter: Timepoint (hr) Value: 4
  misc_feature: MA Experiment 20000630 PARAMETER Experiment Name: Zm_Herbicide-Treatments_P Parameter: Tissue Value: Aerial
  misc_feature: MA Experiment 20000630 PARAMETER Experiment Name: Zm_Herbicide-Treatments_P Parameter: Treatment Value: Roundup vs. No Treatment
attctcacgggcagcagttctgccactctgcaagttcaacttgatccgcgcttctcgtgtcccctgccccttctgtcctcgccaccgcccagcttctcctcagtcctcaccctcgtgtgccttcggatccgcggttctcggagtcggagagagttgcaggtggtggctggtcgcttgcggtagccggtaggcgggttcgctgcgggtggtcggcggcgcgatggtttccttcgagatgaacgacctcaagaagattgggctgggcttgactggatttggagttctattcacattgctcgggatcattatgttgtttgacaagggattcctggcgatggggaatattctcttcgtttctggtgtcttactgaccattgggttgaagccaactgtgcagttcttcaccaagcctaagaatcacaagggttcaatatttttcgggtttggctttttcctggttctcattggatggcctgtctcaggaatgctggtggagtcgtatggcttcatcacgctcttcagcggcttctggccaacagctgctgtttacctgcaaaagagcccttccttcggttggatattccaccaccctcttgtgacttcgctgatcactcggttcagaggaagacgggtcccggtgtgagtggataggatcaccccgagggcatgcgaaatcgcctctactgtacagaagtaggccaattgacatatgcactttattcgtttatgttcgtcgattctacctggtttaaagagagacaaggtggccgctgttgctggtattggatcttcctacgctgctaccagtagtctgtccatagcgtaactacattgattgcaagtgagcatctgtcggttgttaataaataggcagatgtatcgatggtgataacatggtggtttctctgaatgacgatggctgagggagctgtgaactggtttggaaaccagccagcttgtgagagacagttgtgttacactgctactgctatattgttaactagttaaaaaaaaaaaaaaaaaaaaaaagaa

SEQ ID NO: 11087 - protein, 140 aa, Zea mays subsp. mays
  peptide (1)..(140): Ceres Seq. ID no. 12413808
  misc_feature (31)..(129): Pfam Name: Got1-like family Pfam Description: Got1-like family
  misc_feature (11)..(129): Homolog of NCBI NO: 33146513 NR Description: NFkB activating protein-like [Oryza sativa
  misc_feature (1)..(140): Homolog of NCBI NO: 30678779 NR Description: expressed protein [Arabidopsis thaliana]
  misc_feature (1)..(140): Homolog of NCBI NO: 15229139 NR Description: putative protein; protein id: At3g49420.1, by cDNA: 124223., supported by cDNA: gi_17065529, supported by gi_20258894 [Arabidopsis thaliana] >gi|15240976|ref|NP_195763.1|
  misc_feature (1)..(134): Homolog of NCBI NO: 12324443 NR Description: unknown protein; 50647-51606 [Arabidopsis
  misc_feature (1)..(100): Homolog of NCBI NO: 6714435 NR Description: unknown protein [Arabidopsis thaliana]
  misc_feature (5)..(126): Homolog of NCBI NO: 24642432 NR Description: CG32576-PA [Drosophila melanogaster]
  misc_feature (4)..(137): Homolog of NCBI NO: 22329359 NR Description: unknown protein; protein id: At1g05785.1 thaliana] >gi|26452699|dbj|BAC43432.1| unknown protein thaliana] >gi|28973521|gb|AAO64085.1| unknown protein
  misc_feature (5)..(126): Homolog of NCBI NO: 17945675 NR Description: RE29988p [Drosophila melanogaster]
  misc_feature (1)..(132): Homolog of NCBI NO: 7634779 NR Description: HDCMA39P [Homo sapiens]
  misc_feature (1)..(132): Homolog of NCBI NO: 26384022 NR Description: unnamed protein product [Mus musculus]
MVSFEMNDLKKIGLGLTGFGVLFTLLGIIMLFDKGFLAMGNILFVSGVLLTIGLKPTVQFFTKPKNHKGSIFFGFGFFLVLIGWPVSGMLVESYGFITLFSGFWPTAAVYLQKSPSFGWIFHHPLVTSLITRFRGRRVPV

SEQ ID NO: 11088 - protein, 135 aa, Zea mays subsp. mays
  peptide (1)..(135): Ceres Seq. ID no. 12413809
  misc_feature (26)..(124): Pfam Name: Got1-like family Pfam Description: Got1-like family
  misc_feature (6)..(124): Homolog of NCBI NO: 33146513 NR Description: NFkB activating protein-like [Oryza sativa
  misc_feature (1)..(135): Homolog of NCBI NO: 30678779 NR Description: expressed protein [Arabidopsis thaliana]
  misc_feature (1)..(135): Homolog of NCBI NO: 15229139 NR Description: putative protein; protein id: At3g49420.1, by cDNA: 124223., supported by cDNA: gi_17065529, supported by gi_20258894 [Arabidopsis thaliana] >gi|15240976|ref|NP_195763.1|
  misc_feature (1)..(129): Homolog of NCBI NO: 12324443 NR Description: unknown protein; 50647-51606 [Arabidopsis
  misc_feature (1)..(95): Homolog of NCBI NO: 6714435 NR Description: unknown protein [Arabidopsis thaliana]
  misc_feature (1)..(121): Homolog of NCBI NO: 24642432 NR Description: CG32576-PA [Drosophila melanogaster]
  misc_feature (1)..(132): Homolog of NCBI NO: 22329359 NR Description: unknown protein; protein id: At1g05785.1 thaliana] >gi|26452699|dbj|BAC43432.1| unknown protein thaliana] >gi|28973521|gb|AAO64085.1| unknown protein
  misc_feature (1)..(121): Homolog of NCBI NO: 17945675 NR Description: RE29988p [Drosophila melanogaster]
  misc_feature (1)..(127): Homolog of NCBI NO: 7634779 NR Description: HDCMA39P [Homo sapiens]
  misc_feature (1)..(127): Homolog of NCBI NO: 26384022 NR Description: unnamed protein product [Mus musculus]
MNDLKKIGLGLTGFGVLFTLLGIIMLFDKGFLAMGNILFVSGVLLTIGLKPTVQFFTKPKNHKGSIFFGFGFFLVLIGWPVSGMLVESYGFITLFSGFWPTAAVYLQKSPSFGWIFHHPLVTSLITRFRGRRVPV

SEQ ID NO: 11089 - protein, 111 aa, Zea mays subsp. mays
  peptide (1)..(111): Ceres Seq. ID no. 12413810
  misc_feature (2)..(100): Pfam Name: Got1-like family Pfam Description: Got1-like family
  misc_feature (1)..(100): Homolog of NCBI NO: 33146513 NR Description: NFkB activating protein-like [Oryza sativa
  misc_feature (1)..(111): Homolog of NCBI NO: 30678779 NR Description: expressed protein [Arabidopsis thaliana]
  misc_feature (1)..(111): Homolog of NCBI NO: 15229139 NR Description: putative protein; protein id: At3g49420.1, by cDNA: 124223., supported by cDNA: gi_17065529, supported by gi_20258894 [Arabidopsis thaliana] >gi|15240976|ref|NP_195763.1|
  misc_feature (1)..(105): Homolog of NCBI NO: 12324443 NR Description: unknown protein; 50647-51606 [Arabidopsis
  misc_feature (1)..(71): Homolog of NCBI NO: 6714435 NR Description: unknown protein [Arabidopsis thaliana]
  misc_feature (1)..(97): Homolog of NCBI NO: 24642432 NR Description: CG32576-PA [Drosophila melanogaster]
  misc_feature (1)..(108): Homolog of NCBI NO: 22329359 NR Description: unknown protein; protein id: At1g05785.1 thaliana] >gi|26452699|dbj|BAC43432.1| unknown protein thaliana] >gi|28973521|gb|AAO64085.1| unknown protein
  misc_feature (1)..(97): Homolog of NCBI NO: 17945675 NR Description: RE29988p [Drosophila melanogaster]
  misc_feature (1)..(103): Homolog of NCBI NO: 7634779 NR Description: HDCMA39P [Homo sapiens]
  misc_feature (1)..(103): Homolog of NCBI NO: 26384022 NR Description: unnamed protein product [Mus musculus]
MLFDKGFLAMGNILFVSGVLLTIGLKPTVQFFTKPKNHKGSIFFGFGFFLVLIGWPVSGMLVESYGFITLFSGFWPTAAVYLQKSPSFGWIFHHPLVTSLITRFRGRRVPV

SEQ ID NO: 11090 - DNA, 1300 bp, Zea mays subsp. mays
  misc_feature (1)..(1300): Ceres Seq. ID no. 12342524
  misc_feature: MA Experiment ID: 108522 Result: Down-regulated in Transcription
  misc_feature: MA Experiment 108522 PARAMETER Experiment Name: Zm_42deg_Heat_P Parameter: Age (day) Value: 8
  misc_feature: MA Experiment 108522 PARAMETER Experiment Name: Zm_42deg_Heat_P Parameter: Organism Value: Zea mays
  misc_feature: MA Experiment 108522 PARAMETER Experiment Name: Zm_42deg_Heat_P Parameter: Plant Line Value: 35A19
  misc_feature: MA Experiment 108522 PARAMETER Experiment Name: Zm_42deg_Heat_P Parameter: Temperature (deg C) Value: 42 vs. 22
  misc_feature: MA Experiment 108522 PARAMETER Experiment Name: Zm_42deg_Heat_P Parameter: Timepoint (hr) Value: 1
  misc_feature: MA Experiment 108522 PARAMETER Experiment Name: Zm_42deg_Heat_P Parameter: Tissue Value: Aerial
  misc_feature: MA Experiment ID: 108597 Result: Up-regulated in Transcription
  misc_feature: MA Experiment 108597 PARAMETER Experiment Name: Zm_100uM_ABA_P Parameter: Age (day) Value: 9
  misc_feature: MA Experiment 108597 PARAMETER Experiment Name: Zm_100uM_ABA_P Parameter: Organism Value: Zea mays
  misc_feature: MA Experiment 108597 PARAMETER Experiment Name: Zm_100uM_ABA_P Parameter: Plant Line Value: 35A19
  misc_feature: MA Experiment 108597 PARAMETER Experiment Name: Zm_100uM_ABA_P Parameter: Timepoint (hr) Value: 24
  misc_feature: MA Experiment 108597 PARAMETER Experiment Name: Zm_100uM_ABA_P Parameter: Tissue Value: Aerial
  misc_feature: MA Experiment 108597 PARAMETER Experiment Name: Zm_100uM_ABA_P Parameter: Treatment Value: 100uM ABA vs. No Treatment
  misc_feature: MA Experiment ID: 108689 Result: Up-regulated in Transcription
  misc_feature: MA Experiment 108689 PARAMETER Experiment Name: Zm_Drought_Roots_P Parameter: Age (day) Value: 9
  misc_feature: MA Experiment 108689 PARAMETER Experiment Name: Zm_Drought_Roots_P Parameter: Organism Value: Zea mays
  misc_feature: MA Experiment 108689 PARAMETER Experiment Name: Zm_Drought_Roots_P Parameter: Plant Line Value: 35A19
  misc_feature: MA Experiment 108689 PARAMETER Experiment Name: Zm_Drought_Roots_P Parameter: Timepoint (hr) Value: 24
  misc_feature: MA Experiment 108689 PARAMETER Experiment Name: Zm_Drought_Roots_P Parameter: Tissue Value: Roots
  misc_feature: MA Experiment 108689 PARAMETER Experiment Name: Zm_Drought_Roots_P Parameter: Treatment Value: Drought vs. No Drought
  misc_feature: MA Experiment ID: 20000479 Result: Up-regulated in Transcription
  misc_feature: MA Experiment 20000479 PARAMETER Experiment Name: Zm_Drought_P Parameter: Age (day) Value: 10
  misc_feature: MA Experiment 20000479 PARAMETER Experiment Name: Zm_Drought_P Parameter: Organism Value: Zea mays
  misc_feature: MA Experiment 20000479 PARAMETER Experiment Name: Zm_Drought_P Parameter: Plant Line Value: 35A19
  misc_feature: MA Experiment 20000479 PARAMETER Experiment Name: Zm_Drought_P Parameter: Timepoint (hr) Value: 48
  misc_feature: MA Experiment 20000479 PARAMETER Experiment Name: Zm_Drought_P Parameter: Tissue Value: Aerial
  misc_feature: MA Experiment 20000479 PARAMETER Experiment Name: Zm_Drought_P Parameter: Treatment Value: Drought vs. No Drought
  misc_feature: MA Experiment ID: 20000480 Result: Up-regulated in Transcription
  misc_feature: MA Experiment 20000480 PARAMETER Experiment Name: Zm_Drought_P Parameter: Age (day) Value: 11
  misc_feature: MA Experiment 20000480 PARAMETER Experiment Name: Zm_Drought_P Parameter: Organism Value: Zea mays
  misc_feature: MA Experiment 20000480 PARAMETER Experiment Name: Zm_Drought_P Parameter: Plant Line Value: 35A19
  misc_feature: MA Experiment 20000480 PARAMETER Experiment Name: Zm_Drought_P Parameter: Timepoint (hr) Value: 72
  misc_feature: MA Experiment 20000480 PARAMETER Experiment Name: Zm_Drought_P Parameter: Tissue Value: Aerial
  misc_feature: MA Experiment 20000480 PARAMETER Experiment Name: Zm_Drought_P Parameter: Treatment Value: Drought vs. No Drought
aaataagcacttgttcatcatcatcagagtaaacacagcagaaccctagcgcgccgttcctccgacgactcacatcccacccactcacccaccccatggcggccaagctctccaccagcgccgacgccccggcctcggtgcggctctccgcagcagcgcaggcggctgcgatccagccctcctctccgcgcttcttcttctcctcgctggccgggaccaacccggcctccccgcatcgccgcatcgccattgccgtcgatctctccgacgagtccgccttcgccgtcaagtgggccgtgcagaactacctccgccccggggacgccgtcgtgctgctccacgtgcgccccacctccgttctctacggcgccgactggggttccatcccggtctccgtcgctgacgaggccgacgctgccgaggacgccgccgccgccgccgagggcggcccctccgaggaggagctgcagaagaagcgggaggaggaatacgacgccttcacctctaccaaggcgcaggacctcgcgcagccgcttgtcgatgcccagatccccttcaagatccatgtcgtcaaggaccacgacatgaaggagcgcctctgcctcgaggctgagcgccttggcctgtccgctatgatcatggggagccgcggttttggggcctctcggaaaggcggcaaggggaggcttgggagtgttagtgattactgtgtacaccactgtgtatgccccgttgtggttgttcgctaccctgatgatgctgcagatgccagtggagatgcatcaggggcgacagatgagttgcacactgtaccagaggacgaacctgtttatcacgatgcgcctgaggtgcagaaagaaaactgaggcaatggccgcaagcagctgaagaacgaaggaaaacatggggcctgtagtgactagtgaggcgattctgtgtatctgaaagatgggactggctgtttatcttcgcttctgtatatcaactgcgtgtcatgatcagtggctgcttcgcgtttgagtttcatatcggagtcctagatcatcgaagtctttgttggtttgcttgtgagatgtttatgttgtgaacaccatgtagagtactcttctcgtaggtagaagctgccttgaagatgcttatgcagttatgctggggtctgggctctcttgtcttgttttgcggagccggtgatgagctttatgttctcaaatggtagttatctacacggtattatgtgctctgttcagcctgtttactgtattgcatattcgtcaatggagaatcactacttattattctc

SEQ ID NO: 11091 - protein, 256 aa, Zea mays subsp. mays; identical to SEQ ID NO: 1536
  peptide (1)..(256): Ceres Seq. ID no. 12342525
  misc_feature (46)..(217): Pfam Name: Universal stress protein family Pfam Description: Universal stress protein family
  misc_feature (8)..(254): Homolog of NCBI NO: 34910112 NR Description: B1100D10.31 [Oryza sativa (japonica
  misc_feature (1)..(256): Homolog of NCBI NO: 28971968 NR Description: OSJNBb0041B22.10 [Oryza sativa (japonica
  misc_feature (1)..(255): Homolog of NCBI NO: 33146953 NR Description: CHP-rich zinc finger protein-like [Oryza sativa
  misc_feature (41)..(253): Homolog of NCBI NO: 25402657 NR Description: protein T23J18.3 [imported] - Arabidopsis >gi|6554203|gb|AAF16649.1|AC011661_27 T23J18.3 [Arabidopsis
  misc_feature (41)..(253): Homolog of NCBI NO: 30682187 NR Description: expressed protein [Arabidopsis thaliana]
  misc_feature (28)..(235): Homolog of NCBI NO: 7486798 NR Description: hypothetical protein M4I22.130 - Arabidopsis >gi|3269293|emb|CAA19726.1| putative protein [Arabidopsis >gi|7269585|emb|CAB79587.1| putative protein [Arabidopsis
  misc_feature (28)..(235): Homolog of NCBI NO: 18416966 NR Description: putative protein; protein id: At4g27320.1, by cDNA: 10313. [Arabidopsis thaliana] unknown [Arabidopsis thaliana] >gi|21703134|gb|AAM74507.1|
  misc_feature (36)..(221): Homolog of NCBI NO: 8885586 NR Description: gene_id:F24B18.5~pir||T05756~similar to unknown
  misc_feature (36)..(221): Homolog of NCBI NO: 18423628 NR Description: putative protein; protein id: At5g54430.1, by cDNA: 37617., supported by cDNA: gi_17979328 [Arabidopsis >gi|17979329|gb|AAL49890.1| unknown protein [Arabidopsis
  misc_feature (138)..(227): Homolog of NCBI NO: 15232490 NR Description: CHP-rich zinc finger protein, putative; protein

SEQ ID NO: 11092 - DNA, 1361 bp, Zea mays subsp. mays
  misc_feature (1)..(1361): Ceres Seq. ID no. 12379398
  misc_feature: MA Experiment ID: 108527 Result: Up-regulated in Transcription
  misc_feature: MA Experiment 108527 PARAMETER Experiment Name: Zm_5mM_NO_P Parameter: Age (day) Value: 8
  misc_feature: MA Experiment 108527 PARAMETER Experiment Name: Zm_5mM_NO_P Parameter: Organism Value: Zea mays
  misc_feature: MA Experiment 108527 PARAMETER Experiment Name: Zm_5mM_NO_P Parameter: Plant Line Value: 35A19
  misc_feature: MA Experiment 108527 PARAMETER Experiment Name: Zm_5mM_NO_P Parameter: Timepoint (hr) Value: 6
  misc_feature: MA Experiment 108527 PARAMETER Experiment Name: Zm_5mM_NO_P Parameter: Tissue Value: Aerial
  misc_feature: MA Experiment 108527 PARAMETER Experiment Name: Zm_5mM_NO_P Parameter: Treatment Value: 5mM NO vs. No Treatment
  misc_feature: MA Experiment ID: 108535 Result: Down-regulated in Transcription
  misc_feature: MA Experiment 108535 PARAMETER Experiment Name: Zm_Meristem_P Parameter: Age (day) Value: 8
  misc_feature: MA Experiment 108535 PARAMETER Experiment Name: Zm_Meristem_P Parameter: Organism Value: Zea mays
  misc_feature: MA Experiment 108535 PARAMETER Experiment Name: Zm_Meristem_P Parameter: Plant Line Value: 35A19
  misc_feature: MA Experiment 108535 PARAMETER Experiment Name: Zm_Meristem_P Parameter: Tissue Value: Root Meristem vs. Above Root Meristem
  misc_feature: MA Experiment ID: 108543 Result: Down-regulated in Transcription
  misc_feature: MA Experiment ID: 108556 Result: Down-regulated in Transcription
  misc_feature: MA Experiment 108556 PARAMETER Experiment Name: Zm_Drought_P Parameter: Age (day) Value: 9
  misc_feature: MA Experiment 108556 PARAMETER Experiment Name: Zm_Drought_P Parameter: Organism Value: Zea mays
  misc_feature: MA Experiment 108556 PARAMETER Experiment Name: Zm_Drought_P Parameter: Plant Line Value: 35A19
  misc_feature: MA Experiment 108556 PARAMETER Experiment Name: Zm_Drought_P Parameter: Timepoint (hr) Value: 24
  misc_feature: MA Experiment 108556 PARAMETER Experiment Name: Zm_Drought_P Parameter: Tissue Value: Aerial
  misc_feature: MA Experiment 108556 PARAMETER Experiment Name: Zm_Drought_P Parameter: Treatment Value: Drought vs. No Drought
  misc_feature: MA Experiment ID: 108688 Result: Down-regulated in Transcription
  misc_feature: MA Experiment 108688 PARAMETER Experiment Name: Zm_Embryos-Flowers__P Parameter: Tissue Value: Immature Flowers vs. Aerial+
  misc_feature: MA Experiment ID: 20000534 Result: Down-regulated in Transcription
  misc_feature: MA Experiment 20000534 PARAMETER Experiment Name: Zm_Hybrid_Pollen_P Parameter: Age (day) Value: 8
  misc_feature: MA Experiment 20000534 PARAMETER Experiment Name: Zm_Hybrid_Pollen_P Parameter: Organism Value: Zea mays
  misc_feature: MA Experiment 20000534 PARAMETER Experiment Name: Zm_Hybrid_Pollen_P Parameter: Plant Line Value: 35A19
  misc_feature: MA Experiment 20000534 PARAMETER Experiment Name: Zm_Hybrid_Pollen_P Parameter: Tissue Value: Pollen vs. Aerial
  misc_feature: MA Experiment ID: 20000535 Result: Down-regulated in Transcription
  misc_feature: MA Experiment 20000535 PARAMETER Experiment Name: Zm_Hybrid_Seed_Dev_P Parameter: DAP Value: 30 vs. 12
  misc_feature: MA Experiment 20000535 PARAMETER Experiment Name: Zm_Hybrid_Seed_Dev_P Parameter: Organism Value: Zea mays
  misc_feature: MA Experiment 20000535 PARAMETER Experiment Name: Zm_Hybrid_Seed_Dev_P Parameter: Plant Line Value: 35A19
  misc_feature: MA Experiment 20000535 PARAMETER Experiment Name: Zm_Hybrid_Seed_Dev_P Parameter: Tissue Value: Embryo vs. Unfert Floret
accggtcccgagggctatcgaacgtaactaccgtcctctgtctcggcgtcggcgagcaacagaacagacagaggaggggaggcgaggcgaggcggaaatggggctccgcgtccgcgcttcctcgcttctgctatccctcgccatcgagctcgcggccgtgctcgtctcagtgtcggcgcagcagaagttcgggatcaactacgggcagatcgcgaacaatctcccggacccgacgcaggtggcgaccctcctccgatcgatgaacgtgaacaaggtgaagctctacgacgcggacccccgggtgctgacggcgttcgcgaacacgggcgtggagttcatcatcgccgtgggcaacgagaacctgcagaccatggccggcagccccgccgcggcgcggcagtgggtggcggcgaacgtgcggccctacatcccggccacgcgcatcacctgcgtcaccgtgggcaacgaggtcttctccggcaacgacacggccacgatggccagcctcctccccgctatgaaggccgtccacgcggcgctcgcggacctgggcctcggcggccaggccaccgtctcgtcggcgcactccgtgaacgtgctcgccgccagcttcccgccgtcgtcgggcgcgttccgggaggacctggcggagtacatgaagcccatcctggacttccacgcccagacggggtcgccgttcctcatcaacgcctacccgttcttcgcgtacaaggcgagcccgggcagcgtgtcgctgccgtacgtgctgttcgagcccaacccgggggtgcgcgaccccagcaccggcctcagctacgacaacatgctgtacgcccagatcgacgccgtgtacgccgccatgaaggccatggggcacacggacgtgggcgtccggatctcggagaccgggtggccgtccaggggcgacgaggacgagaccggggccacggtgcagaacgccgccgcgtacaacggcaacctcatgcagagggtcgccatgagccaggggacgccgctcaagcccaacgtgcccgtcgacgtctacgtgttcgcgctcttcaacgagaacatgaagccagggcccacgtcggagcgcaactacgggctgttctaccccaacggctcgccggtgtacgcgctcagcgccggctccggcggcggttcaggtccgggcgggtcgctcaacccgtactacacatccatgttctcctcctcgtccagatccgcggtgagcgcgaccttcttgacagagagagtgatgctgttactgctgctgcaagcaactgtaatactccgacactactgctagtcagtgaataccttgtaatcttgtatacgaaaaaaaaaatgcatctcaattc

SEQ ID NO: 11093 - protein, 435 aa, Zea mays subsp. mays
  peptide (1)..(435): Ceres Seq. ID no. 12379399
  misc_feature (63)..(381): Pfam Name: Glycosyl hydrolases family 17 Pfam Description: Glycosyl hydrolases family 17
  misc_feature (33)..(414): Homolog of NCBI NO: 34908492 NR Description: putative beta-1,3-glucanase [Oryza sativa
  misc_feature (43)..(378): Homolog of NCBI NO: 38346337 NR Description: OSJNBa0073L04.8 [Oryza sativa (japonica
  misc_feature (61)..(378): Homolog of NCBI NO: 18401444 NR Description: glycosyl hydrolase family 17; protein id: supported by cDNA: 1126., supported by cDNA: gi_17473571,
  misc_feature (61)..(378): Homolog of NCBI NO: 25316425 NR Description: probable beta-1,3-glucanase [imported] -
  misc_feature (39)..(422): Homolog of NCBI NO: 419789 NR Description: hypothetical protein - potato
  misc_feature (40)..(393): Homolog of NCBI NO: 25316443 NR Description: CDS protein F9L11.6 [imported] - Arabidopsis
  misc_feature (40)..(393): Homolog of NCBI NO: 30692765 NR Description: glycosyl hydrolase family 17 [Arabidopsis
  misc_feature (33)..(391): Homolog of NCBI NO: 6006371 NR Description: Similar to hypothetical protein - potato (S31196)
  misc_feature (42)..(393): Homolog of NCBI NO: 37531294 NR Description: putative beta-1,3-glucanase [Oryza sativa
  misc_feature (39)..(393): Homolog of NCBI NO: 15238298 NR Description: glycosyl hydrolase family 17; protein id: supported by cDNA: 11988., supported by cDNA: gi_15451219
PVPRAIERNYRPLSRRRRATEQTEEGRRGEAEMGLRVRASSLLLSLAIELAAVLVSVSAQQKFGINYGQIANNLPDPTQVATLLRSMNVNKVKLYDADPRVLTAFANTGVEFIIAVGNENLQTMAGSPAAARQWVAANVRPYIPATRITCVTVGNEVFSGNDTATMASLLPAMKAVHAALADLGLGGQATVSSAHSVNVLAASFPPSSGAFREDLAEYMKPILDFHAQTGSPFLINAYPFFAYKASPGSVSLPYVLFEPNPGVRDPSTGLSYDNMLYAQIDAVYAAMKAMGHTDVGVRISETGWPSRGDEDETGATVQNAAAYNGNLMQRVAMSQGTPLKPNVPVDVYVFALFNENMKPGPTSERNYGLFYPNGSPVYALSAGSGGGSGPGGSLNPYYTSMFSSSSRSAVSATFLTERVMLLLLLQATVILRHYC

SEQ ID NO: 11094 - protein, 403 aa, Zea mays subsp. mays
  peptide (1)..(403): Ceres Seq. ID no. 12379400
  misc_feature (31)..(349): Pfam Name: Glycosyl hydrolases family 17 Pfam Description: Glycosyl hydrolases family 17
  misc_feature (1)..(382): Homolog of NCBI NO: 34908492 NR Description: putative beta-1,3-glucanase [Oryza sativa
  misc_feature (11)..(346): Homolog of NCBI NO: 38346337 NR Description: OSJNBa0073L04.8 [Oryza sativa (japonica
  misc_feature (29)..(346): Homolog of NCBI NO: 18401444 NR Description: glycosyl hydrolase family 17; protein id: supported by cDNA: 1126., supported by cDNA: gi_17473571,
  misc_feature (29)..(346): Homolog of NCBI NO: 25316425 NR Description: probable beta-1,3-glucanase [imported] -
  misc_feature (7)..(390): Homolog of NCBI NO: 419789 NR Description: hypothetical protein - potato
  misc_feature (8)..(361): Homolog of NCBI NO: 25316443 NR Description: CDS protein F9L11.6 [imported] - Arabidopsis
  misc_feature (8)..(361): Homolog of NCBI NO: 30692765 NR Description: glycosyl hydrolase family 17 [Arabidopsis
  misc_feature (1)..(359): Homolog of NCBI NO: 6006371 NR Description: Similar to hypothetical protein - potato (S31196)
  misc_feature (10)..(361): Homolog of NCBI NO: 37531294 NR Description: putative beta-1,3-glucanase [Oryza sativa
  misc_feature (7)..(361): Homolog of NCBI NO: 15238298 NR Description: glycosyl hydrolase family 17; protein id: supported by cDNA: 11988., supported by cDNA: gi_15451219
MGLRVRASSLLLSLAIELAAVLVSVSAQQKFGINYGQIANNLPDPTQVATLLRSMNVNKVKLYDADPRVLTAFANTGVEFIIAVGNENLQTMAGSPAAARQWVAANVRPYIPATRITCVTVGNEVFSGNDTATMASLLPAMKAVHAALADLGLGGQATVSSAHSVNVLAASFPPSSGAFREDLAEYMKPILDFHAQTGSPFLINAYPFFAYKASPGSVSLPYVLFEPNPGVRDPSTGLSYDNMLYAQIDAVYAAMKAMGHTDVGVRISETGWPSRGDEDETGATVQNAAAYNGNLMQRVAMSQGTPLKPNVPVDVYVFALFNENMKPGPTSERNYGLFYPNGSPVYALSAGSGGGSGPGGSLNPYYTSMFSSSSRSAVSATFLTERVMLLLLLQATVILRHYC

SEQ ID NO: 11095 - protein, 349 aa, Zea mays subsp. mays
  peptide (1)..(349): Ceres Seq. ID no. 12379401
  misc_feature (1)..(295): Pfam Name: Glycosyl hydrolases family 17 Pfam Description: Glycosyl hydrolases family 17
  misc_feature (1)..(328): Homolog of NCBI NO: 34908492 NR Description: putative beta-1,3-glucanase [Oryza sativa
  misc_feature (1)..(292): Homolog of NCBI NO: 38346337 NR Description: OSJNBa0073L04.8 [Oryza sativa (japonica
  misc_feature (1)..(292): Homolog of NCBI NO: 18401444 NR Description: glycosyl hydrolase family 17; protein id: supported by cDNA: 1126., supported by cDNA: gi_17473571,
  misc_feature (1)..(292): Homolog of NCBI NO: 25316425 NR Description: probable beta-1,3-glucanase [imported] -
  misc_feature (1)..(336): Homolog of NCBI NO: 419789 NR Description: hypothetical protein - potato
  misc_feature (1)..(307): Homolog of NCBI NO: 25316443 NR Description: CDS protein F9L11.6 [imported] - Arabidopsis
  misc_feature (1)..(307): Homolog of NCBI NO: 30692765 NR Description: glycosyl hydrolase family 17 [Arabidopsis
  misc_feature (1)..(305): Homolog of NCBI NO: 6006371 NR Description: Similar to hypothetical protein - potato (S31196)
  misc_feature (1)..(307): Homolog of NCBI NO: 37531294 NR Description: putative beta-1,3-glucanase [Oryza sativa
  misc_feature (1)..(307): Homolog of NCBI NO: 15238298 NR Description: glycosyl hydrolase family 17; protein id: supported by cDNA: 11988., supported by cDNA: gi_15451219
MNVNKVKLYDADPRVLTAFANTGVEFIIAVGNENLQTMAGSPAAARQWVAANVRPYIPATRITCVTVGNEVFSGNDTATMASLLPAMKAVHAALADLGLGGQATVSSAHSVNVLAASFPPSSGAFREDLAEYMKPILDFHAQTGSPFLINAYPFFAYKASPGSVSLPYVLFEPNPGVRDPSTGLSYDNMLYAQIDAVYAAMKAMGHTDVGVRISETGWPSRGDEDETGATVQNAAAYNGNLMQRVAMSQGTPLKPNVPVDVYVFALFNENMKPGPTSERNYGLFYPNGSPVYALSAGSGGGSGPGGSLNPYYTSMFSSSSRSAVSATFLTERVMLLLLLQATVILRHYC

SEQ ID NO: 11096 - DNA, 1546 bp, Zea mays subsp. mays
  misc_feature (1)..(1546): Ceres Seq. ID no. 12342194
  misc_feature: MA Experiment ID: 108527 Result: Up-regulated in Transcription
  misc_feature: MA Experiment 108527 PARAMETER Experiment Name: Zm_5mM_NO_P Parameter: Age (day) Value: 8
  misc_feature: MA Experiment 108527 PARAMETER Experiment Name: Zm_5mM_NO_P Parameter: Organism Value: Zea mays
  misc_feature: MA Experiment 108527 PARAMETER Experiment Name: Zm_5mM_NO_P Parameter: Plant Line Value: 35A19
  misc_feature: MA Experiment 108527 PARAMETER Experiment Name: Zm_5mM_NO_P Parameter: Timepoint (hr) Value: 6
  misc_feature: MA Experiment 108527 PARAMETER Experiment Name: Zm_5mM_NO_P Parameter: Tissue Value: Aerial
  misc_feature: MA Experiment 108527 PARAMETER Experiment Name: Zm_5mM_NO_P Parameter: Treatment Value: 5mM NO vs. No Treatment
  misc_feature: MA Experiment ID: 108559 Result: Up-regulated in Transcription
  misc_feature: MA Experiment 108559 PARAMETER Experiment Name: Zm_5mM_NO_P Parameter: Age (day) Value: 8
  misc_feature: MA Experiment 108559 PARAMETER Experiment Name: Zm_5mM_NO_P Parameter: Organism Value: Zea mays
  misc_feature: MA Experiment 108559 PARAMETER Experiment Name: Zm_5mM_NO_P Parameter: Plant Line Value: 35A19
  misc_feature: MA Experiment 108559 PARAMETER Experiment Name: Zm_5mM_NO_P Parameter: Timepoint (hr) Value: 12
  misc_feature: MA Experiment 108559 PARAMETER Experiment Name: Zm_5mM_NO_P Parameter: Tissue Value: Aerial
  misc_feature: MA Experiment 108559 PARAMETER Experiment Name: Zm_5mM_NO_P Parameter: Treatment Value: 5mM NO vs. No Treatment
  misc_feature: MA Experiment ID: 20000535 Result: Down-regulated in Transcription
  misc_feature: MA Experiment 20000535 PARAMETER Experiment Name: Zm_Hybrid_Seed_Dev_P Parameter: DAP Value: 30 vs. 12
  misc_feature: MA Experiment 20000535 PARAMETER Experiment Name: Zm_Hybrid_Seed_Dev_P Parameter: Organism Value: Zea mays
  misc_feature: MA Experiment 20000535 PARAMETER Experiment Name: Zm_Hybrid_Seed_Dev_P Parameter: Plant Line Value: 35A19
  misc_feature: MA Experiment 20000535 PARAMETER Experiment Name: Zm_Hybrid_Seed_Dev_P Parameter: Tissue Value: Embryo vs. Unfert Floret
agggaagcttcttccactacagtccttgaggccgcccatcaacgactagacgctggtcaagctgcaccaaccctagccccataaccctaggtccctcctccacgcccccttccagagaggcgaggaaggaggcgaaaggaaccatggattcctccggcggcggcggtggagcgcagatcaagggtatggcgacgcacgggggccgctacgtgctgtacaacgtgtacggaaacctcttcgaggtctcctccaagtacgccccacccatccgccccatcggtcgcggcgcctacggcattgtctgcgcggctgtcaactcgcagtcaggggaggaggttgcgatcaagaaggttggcaatgcgttcgacaaccacatcgacgccaagcggacgctcagggaaatcaagctgctgcgccacatggaccatgagaacatccttgccttaaaggatgtaattcggcccccaactagagagaactttaatgacgtgtacattgttactgagttaatggatacagatctccatcagatcgtacgctcaaatcagccattgactgatgatcattgccagtacttcttgtatcagttgttacgagggctaaaatatgtgcactcagcaaatatattgcaccgcgatctgaagccgagcaatttgttcctaaatgcaaattgtgacctcaagattgcagactttgggcttgcaaggaccacttcagagacagatctcatgacagagtatgtggtcactcgttggtaccgggcaccagagctgctgttgaactgttcacagtatactgctgccattgatgtctggtcagttggatgcatactaggtgaaatcgttactcgtcaacccctgtttcctggacgggattacatccagcaattaaaattgatcactgagctcataggctctccagatgatgcaagcctgggatttcttcgaagtgataatgcaaaaagatacatgaaacaactaccacagtttccaagacaggacttccgcctgcgtttccgcaacatgtctcctggcgcagtcgatttgttggaaaggatgcttgtgtttgatccaagcagacggattacagttgatgaggctctgcatcatccatacttggcttcacttcatgagatcaatgatgaacctacctgccctgcacctttcagctttgattttgagcaaccatcctttacagaagcgcatataaaagaactcatctggagggaatctttagcatttaacccagagcctccctactaatatcaaaaggatgatgagttatctgctagaggcatatgaagatctctaggtccagcggacgcaagaacttatgtctgtgtcagtgtgcgttgattatttacgtgctgtttgttgggcatacgggcatgggttggtgctgcaattgcaactctattatggcttgtgagagcaaacaaacgtctgtattcattttcagatgcctgaacccaggcttgtattataccgcttgactccataaattattcttgtgtatctatgcttgtaattttgcagacaattactcg

SEQ ID NO: 11097 - protein, 372 aa, Zea mays subsp. mays
  peptide (1)..(372): Ceres Seq. ID no. 12342195
  misc_feature (40)..(325): Pfam Name: Protein kinase domain Pfam Description: Protein kinase domain
  misc_feature (1)..(370): Homolog of NCBI NO: 25052804 NR Description: mitogen-activated protein kinase 4 [Petroselinum
  misc_feature (12)..(371): Homolog of NCBI NO: 2129855 NR Description: mitogen-activated protein kinase MMK2 (EC
  misc_feature (12)..(371): Homolog of NCBI NO: 2499613 NR Description: MITOGEN-ACTIVATED PROTEIN KINASE HOMOLOG MMK2
  misc_feature (1)..(369): Homolog of NCBI NO: 27312014 NR Description: mitogen-activated protein kinase [Malus
  misc_feature (2)..(369): Homolog of NCBI NO: 15234152 NR Description: MAP kinase 4 (MPK4); protein id: At4g01370.1, by cDNA: 7653., supported by cDNA: gi_13430637, supported by gi_14532813, supported by cDNA: gi_457399 [Arabidopsis thaliana]
  misc_feature (2)..(369): Homolog of NCBI NO: 2129645 NR Description: mitogen-activated protein kinase 4 (EC 2.7.1.-) - thaliana >gi|457400|dbj|BAA04867.1| MAP kinase [Arabidopsis
  misc_feature (2)..(369): Homolog of NCBI NO: 21165527 NR Description: mitogen-activated protein kinase [Solanum
  misc_feature (13)..(368): Homolog of NCBI NO: 18378855 NR Description: MAP kinase, putative; protein id: At1g01560.1
  misc_feature (1)..(370): Homolog of NCBI NO: 21431796 NR Description: Mitogen-activated protein kinase homolog 5 (MAP
  misc_feature (1)..(369): Homolog of NCBI NO: 29500879 NR Description: mitogen-activated protein kinase [Oryza sativa
MDSSGGGGGAQIKGMATHGGRYVLYNVYGNLFEVSSKYAPPIRPIGRGAYGIVCAAVNSQSGEEVAIKKVGNAFDNHIDAKRTLREIKLLRHMDHENILALKDVIRPPTRENFNDVYIVTELMDTDLHQIVRSNQPLTDDHCQYFLYQLLRGLKYVHSANILHRDLKPSNLFLNANCDLKIADFGLARTTSETDLMTEYVVTRWYRAPELLLNCSQYTAAIDVWSVGCILGEIVTRQPLFPGRDYIQQLKLITELIGSPDDASLGFLRSDNAKRYMKQLPQFPRQDFRLRFRNMSPGAVDLLERMLVFDPSRRITVDEALHHPYLASLHEINDEPTCPAPFSFDFEQPSFTEAHIKELIWRESLAFNPEPPY

SEQ ID NO: 11098 - protein, 358 aa, Zea mays subsp. mays
  peptide (1)..(358): Ceres Seq. ID no. 12342196
  misc_feature (26)..(311): Pfam Name: Protein kinase domain Pfam Description: Protein kinase domain
  misc_feature (1)..(356): Homolog of NCBI NO: 25052804 NR Description: mitogen-activated protein kinase 4 [Petroselinum
  misc_feature (1)..(357): Homolog of NCBI NO: 2129855 NR Description: mitogen-activated protein kinase MMK2 (EC
  misc_feature (1)..(357): Homolog of NCBI NO: 2499613 NR Description: MITOGEN-ACTIVATED PROTEIN KINASE HOMOLOG MMK2
  misc_feature (1)..(355): Homolog of NCBI NO: 27312014 NR Description: mitogen-activated protein kinase [Malus
  misc_feature (1)..(355): Homolog of NCBI NO: 15234152 NR Description: MAP kinase 4 (MPK4); protein id: At4g01370.1, by cDNA: 7653., supported by cDNA: gi_13430637, supported by gi_14532813, supported by cDNA: gi_457399 [Arabidopsis thaliana]
  misc_feature (1)..(355): Homolog of NCBI NO: 2129645 NR Description: mitogen-activated protein kinase 4 (EC 2.7.1.-) - thaliana >gi|457400|dbj|BAA04867.1| MAP kinase [Arabidopsis
  misc_feature (1)..(355): Homolog of NCBI NO: 21165527 NR Description: mitogen-activated protein kinase [Solanum
  misc_feature (1)..(354): Homolog of NCBI NO: 18378855 NR Description: MAP kinase, putative; protein id: At1g01560.1
  misc_feature (1)..(356): Homolog of NCBI NO: 21431796 NR Description: Mitogen-activated protein kinase homolog 5 (MAP
  misc_feature (1)..(355): Homolog of NCBI NO: 29500879 NR Description: mitogen-activated protein kinase [Oryza sativa
MATHGGRYVLYNVYGNLFEVSSKYAPPIRPIGRGAYGIVCAAVNSQSGEEVAIKKVGNAFDNHIDAKRTLREIKLLRHMDHENILALKDVIRPPTRENFNDVYIVTELMDTDLHQIVRSNQPLTDDHCQYFLYQLLRGLKYVHSANILHRDLKPSNLFLNANCDLKIADFGLARTTSETDLMTEYVVTRWYRAPELLLNCSQYTAAIDVWSVGCILGEIVTRQPLFPGRDYIQQLKLITELIGSPDDASLGFLRSDNAKRYMKQLPQFPRQDFRLRFRNMSPGAVDLLERMLVFDPSRRITVDEALHHPYLASLHEINDEPTCPAPFSFDFEQPSFTEAHIKELIWRESLAFNPEPPY

SEQ ID NO: 11099 - protein, 280 aa, Zea mays subsp. mays
  peptide (1)..(280): Ceres Seq. ID no. 12342197
  misc_feature (1)..(233): Pfam Name: Protein kinase domain Pfam Description: Protein kinase domain
  misc_feature (1)..(279): Homolog of NCBI NO: 2499613 NR Description: MITOGEN-ACTIVATED PROTEIN KINASE HOMOLOG MMK2
  misc_feature (1)..(277): Homolog of NCBI NO: 27312014 NR Description: mitogen-activated protein kinase [Malus
  misc_feature (1)..(277): Homolog of NCBI NO: 15234152 NR Description: MAP kinase 4 (MPK4); protein id: At4g01370.1, by cDNA: 7653., supported by cDNA: gi_13430637, supported by gi_14532813, supported by cDNA: gi_457399 [Arabidopsis thaliana]
  misc_feature (1)..(277): Homolog of NCBI NO: 2129645 NR Description: mitogen-activated protein kinase 4 (EC 2.7.1.-) - thaliana >gi|457400|dbj|BAA04867.1| MAP kinase [Arabidopsis
  misc_feature (1)..(278): Homolog of NCBI NO: 25052804 NR Description: mitogen-activated protein kinase 4 [Petroselinum
  misc_feature (1)..(279): Homolog of NCBI NO: 2129855 NR Description: mitogen-activated protein kinase MMK2 (EC
  misc_feature (1)..(277): Homolog of NCBI NO: 21165527 NR Description: mitogen-activated protein kinase [Solanum
  misc_feature (1)..(276): Homolog of NCBI NO: 18378855 NR Description: MAP kinase, putative; protein id: At1g01560.1
  misc_feature (1)..(278): Homolog of NCBI NO: 21431796 NR Description: Mitogen-activated protein kinase homolog 5 (MAP
  misc_feature (1)..(277): Homolog of NCBI NO: 29500879 NR Description: mitogen-activated protein kinase [Oryza sativa
MDHENILALKDVIRPPTRENFNDVYIVTELMDTDLHQIVRSNQPLTDDHCQYFLYQLLRGLKYVHSANILHRDLKPSNLFLNANCDLKIADFGLARTTSETDLMTEYVVTRWYRAPELLLNCSQYTAAIDVWSVGCILGEIVTRQPLFPGRDYIQQLKLITELIGSPDDASLGFLRSDNAKRYMKQLPQFPRQDFRLRFRNMSPGAVDLLERMLVFDPSRRITVDEALHHPYLASLHEINDEPTCPAPFSFDFEQPSFTEAHIKELIWRESLAFNPEPPY

SEQ ID NO: 11100 - DNA, 1621 bp, Zea mays subsp. mays
  misc_feature (1)..(1621): Ceres Seq. ID no. 12357943
  misc_feature: MA Experiment ID: 108535 Result: Up-regulated in Transcription
  misc_feature: MA Experiment 108535 PARAMETER Experiment Name: Zm_Meristem_P Parameter: Age (day) Value: 8
  misc_feature: MA Experiment 108535 PARAMETER Experiment Name: Zm_Meristem_P Parameter: Organism Value: Zea mays
  misc_feature: MA Experiment 108535 PARAMETER Experiment Name: Zm_Meristem_P Parameter: Plant Line Value: 35A19
  misc_feature: MA Experiment 108535 PARAMETER Experiment Name: Zm_Meristem_P Parameter: Tissue Value: Root Meristem vs. Above Root Meristem
atactcgatttctatttctctcaatcggttctctcgttctcctacctcccttgcgctctgcgactctcttcttgtctctggtggcgacgagctgacgattgggcggccgccgccgccgacctacgccaggtgcccgagtctccacctttggaccttcaccggcgacgaacacccaccagttgacttggacagccagaactttggaaatggcaagatcaccaaaaggtaggaacctccaagctcgtcaacgtaggtcagcttcttcagatgtgcccttgaggtcctgtgagacgaaaggaacaagcaaaggaaatgatgtgtcagtgacatctgagaagaatgaatggaaaggagcaacttgcccagtttgcttggagcatccacatgatgctgttctcctcctgtgtacctctcaccacaagggctgccggccatatatgtgtggtaccaactaccgtcattccaactgccttgaacactttaaaggagcttatgcaaaggaaaaaatggctcttggtgtttcagctgagtctgcatctggccttccattatcctcaaacacactgccatcaagcaaccagccatgtgtaatggaacttgcctgccctctgtgccgtggagaggttaaaggatggactgtggttgagcctgctcgtcagtatctgaaccggaaaaggagaaattgcatgcatgatgggtgctcattccatggctcgtataaggagctttgcaagcatgtgaaatcgaagcaccctacagcaaaacctcgtgaagttgatcctgctactgcagatgagtggaaaaggtttgaatgtgagagagagcggcaggatgccatcagcactatcaggtccatgaacccaggatctgtgatcatgggggattatgtccttgagttgaatggtggtggcaacaaccatttgctctcagatggagataactttgacttaggggaaaggctcaacttcttcacatccttagatcgtactttgaatgagagaattgacctgtacgactcgtcagatggtttggatgaggggtttgacttcttggcatccctgtttacccatggcaggagaatctctactggaggctcattgagcagggcttatagaagacacagggacaggcctagacgttcaacgaattctgctgatgcttctgacattcagcatgagtcagctagcactcaaaggggacagcgtgctgttcgggctacaggcaggacttcacggcgccaccaccacctacgcgaggcagctgagagatgaaatcatttttagaggcggggtgctttttcatgctatccatgtgcaggggacgcaaaataacacaccatggtatgttgctgctctagtggtcggaggtccgtcagattcttccttttttttgtcccattgttgagacagcaaccgaggatataagattggatggagatgaggtctctgtttggcttgtgctgatgcctgcatgatgtgctctgcgatgtgcatccagttttgggatcaagcagctccacttttccggtgctgcctttgcatggattttgtgaatgcccttgccttgagtttcctttccctttctgttgatcaaaggaaacttcaaacagattgttttggcc

SEQ ID NO: 11101 - protein, 354 aa, Zea mays subsp. mays
  peptide (1)..(354): Ceres Seq. ID no. 12357944
  misc_feature (1)..(260): Homolog of NCBI NO: 38344827 NR Description: OSJNBa0064H22.8 [Oryza sativa (japonica
  misc_feature (130)..(246): Homolog of NCBI NO: 15236507 NR Description: hypothetical protein; protein id: At4g08460.1, by cDNA: gi_18389229 [Arabidopsis thaliana]
  misc_feature (43)..(100): Homolog of NCBI NO: 15236507 NR Description: hypothetical protein; protein id: At4g08460.1, by cDNA: gi_18389229 [Arabidopsis thaliana]
  misc_feature (122)..(235): Homolog of NCBI NO: 25365932 NR Description: unknown protein T32E8.10 [imported] - Arabidopsis
  misc_feature (122)..(235): Homolog of NCBI NO: 30699285 NR Description: expressed protein [Arabidopsis thaliana] unknown protein [Arabidopsis thaliana]
  misc_feature (44)..(99): Homolog of NCBI NO: 25365932 NR Description: unknown protein T32E8.10 [imported] - Arabidopsis
  misc_feature (44)..(99): Homolog of NCBI NO: 30699285 NR Description: expressed protein [Arabidopsis thaliana] unknown protein [Arabidopsis thaliana]
  misc_feature (1)..(258): Homolog of NCBI NO: 15221290 NR Description: unknown protein; protein id: At1g68140.1, by cDNA: gi_17064999 [Arabidopsis thaliana]
  misc_feature (116)..(234): Homolog of NCBI NO: 38346521 NR Description: OSJNBa0027H09.16 [Oryza sativa (japonica
  misc_feature (37)..(121): Homolog of NCBI NO: 38346521 NR Description: OSJNBa0027H09.16 [Oryza sativa (japonica
MARSPKGRNLQARQRRSASSDVPLRSCETKGTSKGNDVSVTSEKNEWKGATCPVCLEHPHDAVLLLCTSHHKGCRPYMCGTNYRHSNCLEHFKGAYAKEKMALGVSAESASGLPLSSNTLPSSNQPCVMELACPLCRGEVKGWTVVEPARQYLNRKRRNCMHDGCSFHGSYKELCKHVKSKHPTAKPREVDPATADEWKRFECERERQDAISTIRSMNPGSVIMGDYVLELNGGGNNHLLSDGDNFDLGERLNFFTSLDRTLNERIDLYDSSDGLDEGFDFLASLFTHGRRISTGGSLSRAYRRHRDRPRRSTNSADASDIQHESASTQRGQRAVRATGRTSRRHHHLREAAER

SEQ ID NO: 11102 - protein, 277 aa, Zea mays subsp. mays
  peptide (1)..(277): Ceres Seq. ID no. 12357945
  misc_feature (1)..(183): Homolog of NCBI NO: 38344827 NR Description: OSJNBa0064H22.8 [Oryza sativa (japonica
  misc_feature (53)..(169): Homolog of NCBI NO: 15236507 NR Description: hypothetical protein; protein id: At4g08460.1, by cDNA: gi_18389229 [Arabidopsis thaliana]
  misc_feature (1)..(23): Homolog of NCBI NO: 15236507 NR Description: hypothetical protein; protein id: At4g08460.1, by cDNA: gi_18389229 [Arabidopsis thaliana]
  misc_feature (45)..(158): Homolog of NCBI NO: 25365932 NR Description: unknown protein T32E8.10 [imported] - Arabidopsis
  misc_feature (45)..(158): Homolog of NCBI NO: 30699285 NR Description: expressed protein [Arabidopsis thaliana] unknown protein [Arabidopsis thaliana]
  misc_feature (1)..(22): Homolog of NCBI NO: 25365932 NR Description: unknown protein T32E8.10 [imported] - Arabidopsis
  misc_feature (1)..(22): Homolog of NCBI NO: 30699285 NR Description: expressed protein [Arabidopsis thaliana] unknown protein [Arabidopsis thaliana]
  misc_feature (1)..(181): Homolog of NCBI NO: 15221290 NR Description: unknown protein; protein id: At1g68140.1, by cDNA: gi_17064999 [Arabidopsis thaliana]
  misc_feature (39)..(157): Homolog of NCBI NO: 38346521 NR Description: OSJNBa0027H09.16 [Oryza sativa (japonica
  misc_feature (1)..(44): Homolog of NCBI NO: 38346521 NR Description: OSJNBa0027H09.16 [Oryza sativa (japonica
MCGTNYRHSNCLEHFKGAYAKEKMALGVSAESASGLPLSSNTLPSSNQPCVMELACPLCRGEVKGWTVVEPARQYLNRKRRNCMHDGCSFHGSYKELCKHVKSKHPTAKPREVDPATADEWKRFECERERQDAISTIRSMNPGSVIMGDYVLELNGGGNNHLLSDGDNFDLGERLNFFTSLDRTLNERIDLYDSSDGLDEGFDFLASLFTHGRRISTGGSLSRAYRRHRDRPRRSTNSADASDIQHESASTQRGQRAVRATGRTSRRHHHLREAAER

SEQ ID NO: 11103 - protein, 254 aa, Zea mays subsp. mays
  peptide (1)..(254): Ceres Seq. ID no. 12357946
  misc_feature (1)..(160): Homolog of NCBI NO: 38344827 NR Description: OSJNBa0064H22.8 [Oryza sativa (japonica
  misc_feature (30)..(146): Homolog of NCBI NO: 15236507 NR Description: hypothetical protein; protein id: At4g08460.1, by cDNA: gi_18389229 [Arabidopsis thaliana]
  misc_feature (22)..(135): Homolog of NCBI NO: 25365932 NR Description: unknown protein T32E8.10 [imported] - Arabidopsis
  misc_feature (22)..(135): Homolog of NCBI NO: 30699285 NR Description: expressed protein [Arabidopsis thaliana] unknown protein [Arabidopsis thaliana]
  misc_feature (1)..(158): Homolog of NCBI NO: 15221290 NR Description: unknown protein; protein id: At1g68140.1, by cDNA: gi_17064999 [Arabidopsis thaliana]
  misc_feature (16)..(134): Homolog of NCBI NO: 38346521 NR Description: OSJNBa0027H09.16 [Oryza sativa (japonica
  misc_feature (1)..(21): Homolog of NCBI NO: 38346521 NR Description: OSJNBa0027H09.16 [Oryza sativa (japonica
  misc_feature (30)..(146): Homolog of NCBI NO: 7487028 NR Description: hypothetical protein T15F16.1 - Arabidopsis >gi|3377813|gb|AAC28186.1| T15F16.1 gene product [Arabidopsis
  misc_feature (28)..(133): Homolog of NCBI NO: 15230170 NR Description: unknown protein; protein id: At3g24740.1, by cDNA: gi_19715578 [Arabidopsis thaliana] gb|AAF16548.1~gene_id:K7P8.3~similar to unknown protein
  misc_feature (1)..(116): Homolog of NCBI NO: 34912600 NR Description: P0046B10.17 [Oryza sativa (japonica
MALGVSAESASGLPLSSNTLPSSNQPCVMELACPLCRGEVKGWTVVEPARQYLNRKRRNCMHDGCSFHGSYKELCKHVKSKHPTAKPREVDPATADEWKRFECERERQDAISTIRSMNPGSVIMGDYVLELNGGGNNHLLSDGDNFDLGERLNFFTSLDRTLNERIDLYDSSDGLDEGFDFLASLFTHGRRISTGGSLSRAYRRHRDRPRRSTNSADASDIQHESASTQRGQRAVRATGRTSRRHHHLREAAER

SEQ ID NO: 11104 - DNA, 672 bp, Zea mays subsp. mays
  misc_feature (1)..(672): Ceres Seq. ID no. 12386635
  misc_feature: MA Experiment ID: 108535 Result: Up-regulated in Transcription
  misc_feature: MA Experiment 108535 PARAMETER Experiment Name: Zm_Meristem_P Parameter: Age (day) Value: 8
  misc_feature: MA Experiment 108535 PARAMETER Experiment Name: Zm_Meristem_P Parameter: Organism Value: Zea mays
  misc_feature: MA Experiment 108535 PARAMETER Experiment Name: Zm_Meristem_P Parameter: Plant Line Value: 35A19
  misc_feature: MA Experiment 108535 PARAMETER Experiment Name: Zm_Meristem_P Parameter: Tissue Value: Root Meristem vs. Above Root Meristem
  misc_feature: MA Experiment ID: 20000492 Result: Up-regulated in Transcription
  misc_feature: MA Experiment 20000492 PARAMETER Experiment Name: Zm_Hybrid_Seed_Dev_P Parameter: DAP Value: 12
  misc_feature: MA Experiment 20000492 PARAMETER Experiment Name: Zm_Hybrid_Seed_Dev_P Parameter: Organism Value: Zea mays
  misc_feature: MA Experiment 20000492 PARAMETER Experiment Name: Zm_Hybrid_Seed_Dev_P Parameter: Plant Line Value: 35A19
  misc_feature: MA Experiment 20000492 PARAMETER Experiment Name: Zm_Hybrid_Seed_Dev_P Parameter: Tissue Value: Fert Kernel vs. Unfert Floret
gagcctcgaaccctaacccccaccacgtaactccttggaattaccgaaatgccactcttcttctccaaattcgcaccattggtcccccgcgtccgccgcctttccatcgccgcggcgacagccgccggcgaggaccctaagctgtctcgaatcgcggatgagctcctcgccctatcccccgccgagctggacgactatgcggcgctcctgcgcctcaagctccgcctgtcgctcacctccagcgcagctgctggagcctcctccggccggggccggggacgccgcggctgcagccgtggaggccgccgcggcggtgaagacggcgttcgacttgaagatcgagaagtacgaggccgcggcgaagattaagatcatcaaggaggtgcgcgcgatgacggacctgggtctgaaggaggcaaaggagctcgtggagaaggcgcccatagtggtgcgcgcggggttgcctaaagaggaggccgaggcgctcgccgctaagctcaaggccgccggtgccgctgttgcactcgagtgatcccacgaaggtgtcgcctcttttttttttgttcctagtgttcttagacgatgcaacgtatctttgcgccttaatttgtttgtaatggaattcaatagattggatatgggtataaagaggatgcaacgtctaagaacact

SEQ ID NO: 11105 - protein, 124 aa, Zea mays subsp. mays
  peptide (1)..(124): Ceres Seq. ID no. 12386636
  misc_feature (57)..(124): Pfam Name: Ribosomal protein L7/L12 C-terminal domain Pfam Description: Ribosomal protein L7/L12 C-terminal domain
  misc_feature (39)..(124): Homolog of NCBI NO: 34913132 NR Description: contains EST AU058363(E50673)~ribosomal-like
  misc_feature (40)..(124): Homolog of NCBI NO: 15235649 NR Description: ribosomal - like protein; protein id: supported by cDNA: 41011., supported by cDNA: gi_18377871, by cDNA: gi_20334823 [Arabidopsis thaliana]
  misc_feature (38)..(124): Homolog of NCBI NO: 18409467 NR Description: expressed protein; protein id: At1g70190.1, by cDNA: gi_13430421, supported by cDNA: gi_15293180 [Arabidopsis
  misc_feature (1)..(124): Homolog of NCBI NO: 15230614 NR Description: hypothetical protein; protein id: At3g06040.1, by cDNA: gi_17381069 [Arabidopsis thaliana]
  misc_feature (35)..(124): Homolog of NCBI NO: 15234393 NR Description: ribosomal protein; protein id: At4g36420.1, by cDNA: gi_15450414, supported by cDNA: gi_17104652 [Arabidopsis
  misc_feature (37)..(124): Homolog of NCBI NO: 15209174 NR Description: hypothetical protein [Solanum demissum]
  misc_feature (36)..(124): Homolog of NCBI NO: 31201963 NR Description: ENSANGP00000015113 [Anopheles gambiae]
  misc_feature (40)..(124): Homolog of NCBI NO: 15227539 NR Description: 50S ribosomal protein L7/L12; protein id: [Arabidopsis thaliana] >gi|7488305|pir||T02713 50S ribosomal
  misc_feature (43)..(123): Homolog of NCBI NO: 730573 NR Description: 50S ribosomal protein L7/L12
  misc_feature (35)..(124): Homolog of NCBI NO: 22970438 NR Description: hypothetical protein [Chloroflexus aurantiacus]
MSSSPYPPPSWTTMRRSCASSSACRSPPAQLLEPPPAGAGDAAAAAVEAAAAVKTAFDLKIEKYEAAAKIKIIKEVRAMTDLGLKEAKELVEKAPIVVRAGLPKEEAEALAAKLKAAGAAVALE

SEQ ID NO: 11106 - protein, 111 aa, Zea mays subsp. mays
  peptide (1)..(111): Ceres Seq. ID no. 12386637
  misc_feature (44)..(111): Pfam Name: Ribosomal protein L7/L12 C-terminal domain Pfam Description: Ribosomal protein L7/L12 C-terminal domain
  misc_feature (26)..(111): Homolog of NCBI NO: 34913132 NR Description: contains EST AU058363(E50673)~ribosomal-like
  misc_feature (27)..(111): Homolog of NCBI NO: 15235649 NR Description: ribosomal - like protein; protein id: supported by cDNA: 41011., supported by cDNA: gi_18377871, by cDNA: gi_20334823 [Arabidopsis thaliana]
  misc_feature (25)..(111): Homolog of NCBI NO: 18409467 NR Description: expressed protein; protein id: At1g70190.1, by cDNA: gi_13430421, supported by cDNA: gi_15293180 [Arabidopsis
  misc_feature (1)..(111): Homolog of NCBI NO: 15230614 NR Description: hypothetical protein; protein id: At3g06040.1, by cDNA: gi_17381069 [Arabidopsis thaliana]
  misc_feature (22)..(111): Homolog of NCBI NO: 15234393 NR Description: ribosomal protein; protein id: At4g36420.1, by cDNA: gi_15450414, supported by cDNA: gi_17104652 [Arabidopsis
  misc_feature (24)..(111): Homolog of NCBI NO: 15209174 NR Description: hypothetical protein [Solanum demissum]
  misc_feature (23)..(111): Homolog of NCBI NO: 31201963 NR Description: ENSANGP00000015113 [Anopheles gambiae]
  misc_feature (27)..(111): Homolog of NCBI NO: 15227539 NR Description: 50S ribosomal protein L7/L12; protein id: [Arabidopsis thaliana] >gi|7488305|pir||T02713 50S ribosomal
  misc_feature (30)..(110): Homolog of NCBI NO: 730573 NR Description: 50S ribosomal protein L7/L12
  misc_feature (22)..(111): Homolog of NCBI NO: 22970438 NR Description: hypothetical protein [Chloroflexus aurantiacus]
MRRSCASSSACRSPPAQLLEPPPAGAGDAAAAAVEAAAAVKTAFDLKIEKYEAAAKIKIIKEVRAMTDLGLKEAKELVEKAPIVVRAGLPKEEAEALAAKLKAAGAAVALE

SEQ ID NO: 11107 - protein, 106 aa, Zea mays subsp. mays
  peptide (1)..(106): Ceres Seq. ID no. 12386638
  misc_feature (1)..(72): Homolog of NCBI NO: 15235649 NR Description: ribosomal - like protein; protein id: supported by cDNA: 41011., supported by cDNA: gi_18377871, by cDNA: gi_20334823 [Arabidopsis thaliana]
  misc_feature (1)..(96): Homolog of NCBI NO: 34913132 NR Description: contains EST AU058363(E50673)~ribosomal-like
  misc_feature (18)..(75): Homolog of NCBI NO: 31201963 NR Description: ENSANGP00000015113 [Anopheles gambiae]
MPLFFSKFAPLVPRVRRLSIAAATAAGEDPKLSRIADELLALSPAELDDYAALLRLKLRLSLTSSAAAGASSGRGRGRRGCSRGGRRGGEDGVRLEDREVRGRGED

SEQ ID NO: 11108 - DNA, 1244 bp, Zea mays subsp. mays
  misc_feature (1)..(1244): Ceres Seq. ID no. 12342112
  misc_feature: MA Experiment ID: 20000479 Result: Up-regulated in Transcription
  misc_feature: MA Experiment 20000479 PARAMETER Experiment Name: Zm_Drought_P Parameter: Age (day) Value: 10
  misc_feature: MA Experiment 20000479 PARAMETER Experiment Name: Zm_Drought_P Parameter: Organism Value: Zea mays
  misc_feature: MA Experiment 20000479 PARAMETER Experiment Name: Zm_Drought_P Parameter: Plant Line Value: 35A19
  misc_feature: MA Experiment 20000479 PARAMETER Experiment Name: Zm_Drought_P Parameter: Timepoint (hr) Value: 48
  misc_feature: MA Experiment 20000479 PARAMETER Experiment Name: Zm_Drought_P Parameter: Tissue Value: Aerial
  misc_feature: MA Experiment 20000479 PARAMETER Experiment Name: Zm_Drought_P Parameter: Treatment Value: Drought vs. No Drought
gttcgccgctcttcgctcctcggtcctcagccctcacacgccgcccgcccgcgacgaagcccgcatagccgccgccaagcgccggagttgccacctaccgcgcgcccatctgccgccgatgctgcgcactcatctgctacccgaggcttggcggcggccactgccccaggaggcaggagcgcgacaccaaagtccgcgcatttccttccaccgagccgcaccaagatccgggatccaaggtggccaagttcgttgcggcggccctgaacttcgatggctgtcctcgtcacggaattcgtcctcagattcacagccatggactacaatgtgcgtgaatgcagactataccactcctgctgattctgtcgccacctcggagcaagcaggtggtgaagctgaggccaccttagaaacaggtggtgaagctgcggccaccttggagcaaacaggtggcgaaaccgaagagccgaccattgtagcacctgctaatgaatatacagtgcaggaggctgctcctcagcagaagtgtgcaaagatacacgacttttgcctagggataccttttggtggacttttactctccatgggccttattggatttctcttctggaggagccctgcgagtcttacctttggtgttgcacctggccttgccatattggccctggctgtacttagcctcaatgtctggaggagcgggaagtccagcttaccgttcatactggcgcaagcaggcattgccgctgcggtagcatggaagcacggccaggcgtacaccactacgaggaagctgcttccgtggggcttctacgtcgcgctaagtgccgcaatgatctgcttctactcctacgttcttcttgccggagggaatccgcctcctaagaaggcgaaggcgaaggctgctgcttgatttgatgttgaaggcattcaccggagcgtctcataattgcactacctttctctggtaaatagggttgtggtatggcctctgtttacttagtaaaagactgaggagataagactgtcccccctatgctgcataactgttgttgtttcctttatatatacatgatcaataagggctgggttggttccattccatcccactacccatctcatttatggtggtaaatagggttggcctttcttttttggctttggtttgaagtgtttgacgagattttgtacatttcctttttagagagaagcacattctatcacaagaggctcgacatgctattgcc

SEQ ID NO: 11109 - protein, 302 aa, Zea mays subsp. mays
  peptide (1)..(302): Ceres Seq. ID no. 12342113
  misc_feature (182)..(285): Pfam Name: Uncharacterised protein family (UPF0136) Pfam Description: Uncharacterised protein family (UPF0136)
  misc_feature (139)..(298): Homolog of NCBI NO: 38344745 NR Description: OSJNBa0089K21.3 [Oryza sativa (japonica
  misc_feature (117)..(302): Homolog of NCBI NO: 18410685 NR Description: expressed protein; protein id: At3g57280.1, by cDNA: 14487., supported by cDNA: gi_14517380, supported by gi_15450538 [Arabidopsis thaliana] >gi|14517381|gb|AAK62581.1|
  misc_feature (117)..(302): Homolog of NCBI NO: 11290570 NR Description: hypothetical protein F28O9.130 - Arabidopsis >gi|6735307|emb|CAB68134.1| hypothetical protein [Arabidopsis
  misc_feature (179)..(297): Homolog of NCBI NO: 18403201 NR Description: expressed protein; protein id: At1g50740.1, by cDNA: 34587., supported by cDNA: gi_18491152, supported by
  misc_feature (179)..(297): Homolog of NCBI NO: 15232290 NR Description: unknown protein; protein id: At3g20510.1 thaliana] >gi|11994139|dbj|BAB01160.1|
  misc_feature (179)..(295): Homolog of NCBI NO: 34896628 NR Description: hypothetical protein [Oryza sativa]
  misc_feature (124)..(295): Homolog of NCBI NO: 7488560 NR Description: inner envelope membrane protein precursor,
  misc_feature (124)..(286): Homolog of NCBI NO: 25365973 NR Description: hypothetical protein At2g38550 [imported] -
  misc_feature (124)..(286): Homolog of NCBI NO: 21554522 NR Description: putative non-green plastid inner envelope
  misc_feature (124)..(286): Homolog of NCBI NO: 18404784 NR Description: putative non-green plastid inner envelope protein; protein id: At2g38550.1, supported by cDNA: 25626.
FAALRSSVLSPHTPPARDEARIAAAKRRSCHLPRAHLPPMLRTHLLPEAWRRPLPQEAGARHQSPRISFHRAAPRSGIQGGQVRCGGPELRWLSSSRNSSSDSQPWTTMCVNADYTTPADSVATSEQAGGEAEATLETGGEAAATLEQTGGETEEPTIVAPANEYTVQEAAPQQKCAKIHDFCLGIPFGGLLLSMGLIGFLFWRSPASLTFGVAPGLAILALAVLSLNVWRSGKSSLPFILAQAGIAAAVAWKHGQAYTTTRKLLPWGFYVALSAAMICFYSYVLLAGGNPPPKKAKAKAAA

SEQ ID NO: 11110 - protein, 263 aa, Zea mays subsp. mays
  peptide (1)..(263): Ceres Seq. ID no. 12342114
  misc_feature (143)..(246): Pfam Name: Uncharacterised protein family (UPF0136) Pfam Description: Uncharacterised protein family (UPF0136)
  misc_feature (100)..(259): Homolog of NCBI NO: 38344745 NR Description: OSJNBa0089K21.3 [Oryza sativa (japonica
  misc_feature (78)..(263): Homolog of NCBI NO: 18410685 NR Description: expressed protein; protein id: At3g57280.1, by cDNA: 14487., supported by cDNA: gi_14517380, supported by gi_15450538 [Arabidopsis thaliana] >gi|14517381|gb|AAK62581.1|
  misc_feature (78)..(263): Homolog of NCBI NO: 11290570 NR Description: hypothetical protein F28O9.130 - Arabidopsis >gi|6735307|emb|CAB68134.1| hypothetical protein [Arabidopsis
  misc_feature (140)..(258): Homolog of NCBI NO: 18403201 NR Description: expressed protein; protein id: At1g50740.1, by cDNA: 34587., supported by cDNA: gi_18491152, supported by
  misc_feature (140)..(258): Homolog of NCBI NO: 15232290 NR Description: unknown protein; protein id: At3g20510.1 thaliana] >gi|11994139|dbj|BAB01160.1|
  misc_feature (140)..(256): Homolog of NCBI NO: 34896628 NR Description: hypothetical protein [Oryza sativa]
  misc_feature (85)..(256): Homolog of NCBI NO: 7488560 NR Description: inner envelope membrane protein precursor,
  misc_feature (85)..(247): Homolog of NCBI NO: 25365973 NR Description: hypothetical protein At2g38550 [imported] -
  misc_feature (85)..(247): Homolog of NCBI NO: 21554522 NR Description: putative non-green plastid inner envelope
  misc_feature (85)..(247): Homolog of NCBI NO: 18404784 NR Description: putative non-green plastid inner envelope protein; protein id: At2g38550.1, supported by cDNA: 25626.
MLRTHLLPEAWRRPLPQEAGARHQSPRISFHRAAPRSGIQGGQVRCGGPELRWLSSSRNSSSDSQPWTTMCVNADYTTPADSVATSEQAGGEAEATLETGGEAAATLEQTGGETEEPTIVAPANEYTVQEAAPQQKCAKIHDFCLGIPFGGLLLSMGLIGFLFWRSPASLTFGVAPGLAILALAVLSLNVWRSGKSSLPFILAQAGIAAAVAWKHGQAYTTTRKLLPWGFYVALSAAMICFYSYVLLAGGNPPPKKAKAKAAA

SEQ ID NO: 11111 - protein, 194 aa, Zea mays subsp. mays
  peptide (1)..(194): Ceres Seq. ID no. 12342115
  misc_feature (74)..(177): Pfam Name: Uncharacterised protein family (UPF0136) Pfam Description: Uncharacterised protein family (UPF0136)
  misc_feature (31)..(190): Homolog of NCBI NO: 38344745 NR Description: OSJNBa0089K21.3 [Oryza sativa (japonica
  misc_feature (9)..(194): Homolog of NCBI NO: 18410685 NR Description: expressed protein; protein id: At3g57280.1, by cDNA: 14487., supported by cDNA: gi_14517380, supported by gi_15450538 [Arabidopsis thaliana] >gi|14517381|gb|AAK62581.1|
  misc_feature (9)..(194): Homolog of NCBI NO: 11290570 NR Description: hypothetical protein F28O9.130 - Arabidopsis >gi|6735307|emb|CAB68134.1| hypothetical protein [Arabidopsis
  misc_feature (71)..(189): Homolog of NCBI NO: 18403201 NR Description: expressed protein; protein id: At1g50740.1, by cDNA: 34587., supported by cDNA: gi_18491152, supported by
  misc_feature (71)..(189): Homolog of NCBI NO: 15232290 NR Description: unknown protein; protein id: At3g20510.1 thaliana] >gi|11994139|dbj|BAB01160.1|
  misc_feature (71)..(187): Homolog of NCBI NO: 34896628 NR Description: hypothetical protein [Oryza sativa]
  misc_feature (16)..(187): Homolog of NCBI NO: 7488560 NR Description: inner envelope membrane protein precursor,
  misc_feature (16)..(178): Homolog of NCBI NO: 25365973 NR Description: hypothetical protein At2g38550 [imported] -
  misc_feature (16)..(178): Homolog of NCBI NO: 21554522 NR Description: putative non-green plastid inner envelope
  misc_feature (16)..(178): Homolog of NCBI NO: 18404784 NR Description: putative non-green plastid inner envelope protein; protein id: At2g38550.1, supported by cDNA: 25626.
MCVNADYTTPADSVATSEQAGGEAEATLETGGEAAATLEQTGGETEEPTIVAPANEYTVQEAAPQQKCAKIHDFCLGIPFGGLLLSMGLIGFLFWRSPASLTFGVAPGLAILALAVLSLNVWRSGKSSLPFILAQAGIAAAVAWKHGQAYTTTRKLLPWGFYVALSAAMICFYSYVLLAGGNPPPKKAKAKAAA

SEQ ID NO: 11112 - DNA, 757 bp, Zea mays subsp. mays
  misc_feature (1)..(757): Ceres Seq. ID no. 12355612
  misc_feature: MA Experiment ID: 108528 Result: Up-regulated in Transcription
  misc_feature: MA Experiment 108528 PARAMETER Experiment Name: Zm_Imbibed_Seeds_P Parameter: Age (day) Value: 5 vs. 2
  misc_feature: MA Experiment 108528 PARAMETER Experiment Name: Zm_Imbibed_Seeds_P Parameter: Organism Value: Zea mays
  misc_feature: MA Experiment 108528 PARAMETER Experiment Name: Zm_Imbibed_Seeds_P Parameter: Plant Line Value: 35A19
  misc_feature: MA Experiment 108528 PARAMETER Experiment Name: Zm_Imbibed_Seeds_P Parameter: Tissue Value: Aerial vs. Embryo
  misc_feature: MA Experiment ID: 108530 Result: Up-regulated in Transcription
  misc_feature: MA Experiment 108530 PARAMETER Experiment Name: Zm_Imbibed_Seeds_P Parameter: Age (day) Value: 6 vs. 2
  misc_feature: MA Experiment 108530 PARAMETER Experiment Name: Zm_Imbibed_Seeds_P Parameter: Organism Value: Zea mays
  misc_feature: MA Experiment 108530 PARAMETER Experiment Name: Zm_Imbibed_Seeds_P Parameter: Plant Line Value: 35A19
  misc_feature: MA Experiment 108530 PARAMETER Experiment Name: Zm_Imbibed_Seeds_P Parameter: Tissue Value: Aerial vs. Embryo
  misc_feature: MA Experiment ID: 108547 Result: Up-regulated in Transcription
  misc_feature: MA Experiment 108547 PARAMETER Experiment Name: Zm_Imbibed_Seeds_P Parameter: Age (day) Value: 4 vs. 2
  misc_feature: MA Experiment 108547 PARAMETER Experiment Name: Zm_Imbibed_Seeds_P Parameter: Organism Value: Zea mays
  misc_feature: MA Experiment 108547 PARAMETER Experiment Name: Zm_Imbibed_Seeds_P Parameter: Plant Line Value: 35A19
  misc_feature: MA Experiment 108547 PARAMETER Experiment Name: Zm_Imbibed_Seeds_P Parameter: Tissue Value: Aerial vs. Embryo
aagccaaacactccggcagctgtggtggagacgcctccgcctcccaaacacccgaatcaaactaacagccaccgatggcgtcgccatcgcggttgctcccgcccacgcctccttcggccgcccagccccgcggcccgcgggatcgcctcgccttgccgcgcctccggtgcctcgccgccgccgcagcctccgcctcgcccactgatggcgctgtgctgctggagcgtggcgggttccgcggcggtggccgtgcgggagttcgtcacgcttgacgagctccgcgctgccgtgcgcctccgcgtccgcaccttccacgagtacgcagacgactccgtcggaaccgaggatcacagaaaggctcttgcagatagggagtttgaagcattacaggataggatttctgggaagatgataaattttcgaagagtttcttgcataaacgggactgttccactgtccccatcattaatgtcagctgaggaactttgttctatgtgcaagtttgtggaggatggaaaagagagattagtagttggtagtttagaccttaatcagtgtctttggctaccagatgaattgactggaaagaggcctggggtacgaccgttgtttcctctttctacgctattgcagaatacttatgatcaaaacatatttttgatagttgttattggtatttttgaacttgctttggtcatcgctttgttgttgttttggcaataaagatagactcactacatctaacttctttcttgtc

SEQ ID NO: 11113 - protein, 240 aa, Zea mays subsp. mays
  peptide (1)..(240): Ceres Seq. ID no. 12355613
  misc_feature (12)..(200): Homolog of NCBI NO: 28812153 NR Description: B1015H11.33 [Oryza sativa (japonica
  misc_feature (66)..(198): Homolog of NCBI NO: 21536955 NR Description: unknown [Arabidopsis thaliana]
  misc_feature (66)..(198): Homolog of NCBI NO: 18417112 NR Description: putative protein; protein id: At4g28030.1, by cDNA: 11590., supported by cDNA: gi_15081770 [Arabidopsis >gi|15081771|gb|AAK82540.1| AT4g28030/T13J8_140 [Arabidopsis
KPNTPAAVVETPPPPKHPNQTNSHRWRRHRGCSRPRLLRPPSPAARGIASPCRASGASPPPQPPPRPLMALCCWSVAGSAAVAVREFVTLDELRAAVRLRVRTFHEYADDSVGTEDHRKALADREFEALQDRISGKMINFRRVSCINGTVPLSPSLMSAEELCSMCKFVEDGKERLVVGSLDLNQCLWLPDELTGKRPGVRPLFPLSTLLQNTYDQNIFLIVVIGIFELALVIALLLFWQ

SEQ ID NO: 11114 - protein, 172 aa, Zea mays subsp. mays
  peptide (1)..(172): Ceres Seq. ID no. 12355614
  misc_feature (1)..(132): Homolog of NCBI NO: 28812153 NR Description: B1015H11.33 [Oryza sativa (japonica
  misc_feature (1)..(130): Homolog of NCBI NO: 21536955 NR Description: unknown [Arabidopsis thaliana]
  misc_feature (1)..(130): Homolog of NCBI NO: 18417112 NR Description: putative protein; protein id: At4g28030.1, by cDNA: 11590., supported by cDNA: gi_15081770 [Arabidopsis >gi|15081771|gb|AAK82540.1| AT4g28030/T13J8_140 [Arabidopsis
MALCCWSVAGSAAVAVREFVTLDELRAAVRLRVRTFHEYADDSVGTEDHRKALADREFEALQDRISGKMINFRRVSCINGTVPLSPSLMSAEELCSMCKFVEDGKERLVVGSLDLNQCLWLPDELTGKRPGVRPLFPLSTLLQNTYDQNIFLIVVIGIFELALVIALLLFWQ

SEQ ID NO: 11115 - DNA, 1426 bp, Zea mays subsp. mays
  misc_feature (1)..(1426): Ceres Seq. ID no. 12441479
  misc_feature: MA Experiment ID: 108535 Result: Up-regulated in Transcription
  misc_feature: MA Experiment 108535 PARAMETER Experiment Name: Zm_Meristem_P Parameter: Age (day) Value: 8
  misc_feature: MA Experiment 108535 PARAMETER Experiment Name: Zm_Meristem_P Parameter: Organism Value: Zea mays
  misc_feature: MA Experiment 108535 PARAMETER Experiment Name: Zm_Meristem_P Parameter: Plant Line Value: 35A19
  misc_feature: MA Experiment 108535 PARAMETER Experiment Name: Zm_Meristem_P Parameter: Tissue Value: Root Meristem vs. Above Root Meristem
  misc_feature: MA Experiment ID: 108544 Result: Down-regulated in Transcription
  misc_feature: MA Experiment ID: 20000488 Result: Up-regulated in Transcription
  misc_feature: MA Experiment 20000488 PARAMETER Experiment Name: Zm_50mM_NH4NO3_L_to_H_P Parameter: Organism Value: Zea mays
  misc_feature: MA Experiment 20000488 PARAMETER Experiment Name: Zm_50mM_NH4NO3_L_to_H_P Parameter: Timepoint (hr) Value: 8
  misc_feature: MA Experiment 20000488 PARAMETER Experiment Name: Zm_50mM_NH4NO3_L_to_H_P Parameter: Tissue Value: Leaves
  misc_feature: MA Experiment 20000488 PARAMETER Experiment Name: Zm_50mM_NH4NO3_L_to_H_P Parameter: Treatment Value: 50mM NH4NO3 vs. 100mM Mannitol
  misc_feature: MA Experiment ID: 20000535 Result: Up-regulated in Transcription
  misc_feature: MA Experiment 20000535 PARAMETER Experiment Name: Zm_Hybrid_Seed_Dev_P Parameter: DAP Value: 30 vs. 12
  misc_feature: MA Experiment 20000535 PARAMETER Experiment Name: Zm_Hybrid_Seed_Dev_P Parameter: Organism Value: Zea mays
  misc_feature: MA Experiment 20000535 PARAMETER Experiment Name: Zm_Hybrid_Seed_Dev_P Parameter: Plant Line Value: 35A19
  misc_feature: MA Experiment 20000535 PARAMETER Experiment Name: Zm_Hybrid_Seed_Dev_P Parameter: Tissue Value: Embryo vs. Unfert Floret
  misc_feature: MA Experiment ID: 20001606 Result: Up-regulated in Transcription
  misc_feature: MA Experiment 20001606 PARAMETER Experiment Name: Zm_50ppm_KNO3_L-to-H_P Parameter: Age (day) Value: 19
  misc_feature: MA Experiment 20001606 PARAMETER Experiment Name: Zm_50ppm_KNO3_L-to-H_P Parameter: Organism Value: Zea mays
  misc_feature: MA Experiment 20001606 PARAMETER Experiment Name: Zm_50ppm_KNO3_L-to-H_P Parameter: Plant Line Value: 35A19
  misc_feature: MA Experiment 20001606 PARAMETER Experiment Name: Zm_50ppm_KNO3_L-to-H_P Parameter: Timepoint (hr) Value: 8
  misc_feature: MA Experiment 20001606 PARAMETER Experiment Name: Zm_50ppm_KNO3_L-to-H_P Parameter: Tissue Value: Shoots
  misc_feature: MA Experiment 20001606 PARAMETER Experiment Name: Zm_50ppm_KNO3_L-to-H_P Parameter: Treatment Value: 50ppm KNO3 vs. 50ppm KCl
gcacgagaccattacctagaacatcctaatcgaaaacacaccttccctcggtcccttccatctcctagccgccgccgccgccgccgctgcccaaaaccctacctaccctcttcttcccctcactctcctttcatctccattctaatggcggcccaacccgtccggcggcggctgctgctcagaaagccgagacgaagaagtccgccgtggcgcctgctgggaaggctgcccagcctgcggcgaccaccaagttcccgaccaagcccgctcctccctcgcagacggttcgggatgcacgcggcggtggctcatcagctcgtggaggctttggccgtggtgaacgtggccgtggcagaggtggacggggatatggccagaaccgtggcttcagtggtgacaatggcaatgacttccagggaggttatggtggcggaggctatggggatggtgctgtaactggtggatctgaaggagaaagggagagagacactcgtcccccgtaccgtggcggaggcagacgtggtggttacaggaatgttgagtttgctgatgactctgagaggccaccacggagaaactatgagcgccacagcgggactggccatggctatgagatgaagcgtgatggcgcagggcgagggaactggggcactgccactgatgaacttattgcccaggatgcagaggactctccgaagatggaggaggctgctcctgttgctgagaaacaaggtgagcagaatgatgccccagcagcagatgagaacaaaggtaacaaggatgctactgcaaatgaggaggaagaaaaggaagaggacaaggagatgactctggaggaatttgagaaaataagagaggagaagaggaaagcactacttgcattgaaggctgaggagaggaaagttgaagttgacaaggatttgcagtctctgcagccactttcaaacaagaaagaaaatgatgaagttttcattaagctgggttctgacaaggataagaagaaggaaaatgctgagcgtgatgagcgtgccaagaagtcggtgagcatcaacgagttcctgaaacctgctgaaggagaaaggtactatggcggccgtggccgtggaaggggccgtggggagcgtggtggttttagaggcggatacggagggggatacagtcgtggcccagctgctgctgctccatccattgaagatcaagctcagttcccaagccttggtgggaagtgaagggcgcccagctgctgctgtcaccgagcgttgtgttgtctgctgttgtcatatttaaattttgtccgacgttaaatttctgtgccacggtttaaacggaacaaataatgatgttgcatgtggctatctttagttatgtggtacttgacgttgaataccggagttgttgtttatcagaattaacctccaatttttgt

SEQ ID NO: 11116 - protein, 204 aa, Zea mays subsp. mays
  peptide (1)..(204): Ceres Seq. ID no. 12441480
  misc_feature (1)..(146): Pfam Name: Hyaluronan / mRNA binding family Pfam Description: Hyaluronan / mRNA binding family
  misc_feature (1)..(204): Homolog of NCBI NO: 34910712 NR Description: putative nuclear RNA binding protein A [Oryza
  misc_feature (1)..(204): Homolog of NCBI NO: 7488863 NR Description: probable transcription factor - fava bean
  misc_feature (1)..(204): Homolog of NCBI NO: 39725276 NR Description: salt tolerance protein 1 [Beta vulgaris]
  misc_feature (1)..(202): Homolog of NCBI NO: 39725278 NR Description: salt tolerance protein 2 [Beta vulgaris]
  misc_feature (1)..(204): Homolog of NCBI NO: 6492266 NR Description: nuclear RNA binding protein A [Spinacia oleracea]
  misc_feature (1)..(202): Homolog of NCBI NO: 15238039 NR Description: putative protein; protein id: At5g47210.1, by cDNA: 19104. [Arabidopsis thaliana] gene_id:MQL5.6~pir||G71444~similar to unknown protein
  misc_feature (1)..(202): Homolog of NCBI NO: 21553991 NR Description: nuclear RNA binding protein A-like protein
  misc_feature (1)..(204): Homolog of NCBI NO: 34912396 NR Description: putative putative nuclear RNA binding protein A
  misc_feature (1)..(204): Homolog of NCBI NO: 15235894 NR Description: nuclear antigen homolog; protein id: At4g16830.1, by cDNA: 118826., supported by cDNA: gi_17380879, supported by gi_20465928 [Arabidopsis thaliana] >gi|7488137|pir||F71435
  misc_feature (1)..(204): Homolog of NCBI NO: 21537052 NR Description: nuclear antigen homolog [Arabidopsis thaliana]
MKRDGAGRGNWGTATDELIAQDAEDSPKMEEAAPVAEKQGEQNDAPAADENKGNKDATANEEEEKEEDKEMTLEEFEKIREEKRKALLALKAEERKVEVDKDLQSLQPLSNKKENDEVFIKLGSDKDKKKENAERDERAKKSVSINEFLKPAEGERYYGGRGRGRGRGERGGFRGGYGGGYSRGPAAAAPSIEDQAQFPSLGGK

SEQ ID NO: 11117 - protein, 176 aa, Zea mays subsp. mays
  peptide (1)..(176): Ceres Seq. ID no. 12441481
  misc_feature (1)..(118): Pfam Name: Hyaluronan / mRNA binding family Pfam Description: Hyaluronan / mRNA binding family
  misc_feature (1)..(176): Homolog of NCBI NO: 34910712 NR Description: putative nuclear RNA binding protein A [Oryza
  misc_feature (1)..(176): Homolog of NCBI NO: 7488863 NR Description: probable transcription factor - fava bean
  misc_feature (1)..(176): Homolog of NCBI NO: 39725276 NR Description: salt tolerance protein 1 [Beta vulgaris]
  misc_feature (1)..(174): Homolog of NCBI NO: 39725278 NR Description: salt tolerance protein 2 [Beta vulgaris]
  misc_feature (1)..(176): Homolog of NCBI NO: 6492266 NR Description: nuclear RNA binding protein A [Spinacia oleracea]
  misc_feature (1)..(174): Homolog of NCBI NO: 15238039 NR Description: putative protein; protein id: At5g47210.1, by cDNA: 19104. [Arabidopsis thaliana] gene_id:MQL5.6~pir||G71444~similar to unknown protein
  misc_feature (1)..(174): Homolog of NCBI NO: 21553991 NR Description: nuclear RNA binding protein A-like protein
  misc_feature (1)..(176): Homolog of NCBI NO: 34912396 NR Description: putative putative nuclear RNA binding protein A
  misc_feature (1)..(176): Homolog of NCBI NO: 15235894 NR Description: nuclear antigen homolog; protein id: At4g16830.1, by cDNA: 118826., supported by cDNA: gi_17380879, supported by gi_20465928 [Arabidopsis thaliana] >gi|7488137|pir||F71435
  misc_feature (1)..(176): Homolog of NCBI NO: 21537052 NR Description: nuclear antigen homolog [Arabidopsis thaliana]
MEEAAPVAEKQGEQNDAPAADENKGNKDATANEEEEKEEDKEMTLEEFEKIREEKRKALLALKAEERKVEVDKDLQSLQPLSNKKENDEVFIKLGSDKDKKKENAERDERAKKSVSINEFLKPAEGERYYGGRGRGRGRGERGGFRGGYGGGYSRGPAAAAPSIEDQAQFPSLGGK

SEQ ID NO: 11118 - protein, 151 aa, Zea mays subsp. mays
  peptide (1)..(151): Ceres Seq. ID no. 12441482
ARDHYLEHPNRKHTFPRSLPSPSRRRRRRCPKPYLPSSSPHSPFISILMAAQPVRRRLLLRKPRRRSPPWRLLGRLPSLRRPPSSRPSPLLPRRRFGMHAAVAHQLVEALAVVNVAVAEVDGDMARTVASVVTMAMTSREVMVAEAMGMVL

SEQ ID NO: 11119 - DNA, 1511 bp, Zea mays subsp. mays
  misc_feature (1)..(1511): Ceres Seq. ID no. 12351690
  misc_feature: MA Experiment ID: 108543 Result: Down-regulated in Transcription
agcccggcacaccgagccgcggcgtcaaggacgacatatccgagctcaccgaaacgctcactcgccgcctctggggcgtcgcatccttcctcgcaccgcccccgaccccgccggaggcctccaccccgcgcgccgcgactccggcacaaggggaagatgaggggattgaggatggggaggaggccgcggtgctgtccccccggactgcggggatccgcagcgatctagccgagataggcggaaggatgtggagcggtttctcgatgctgcagaacaacttggccgtggccgagatctccaagatcgcctcgtcgctcctgccgttcgggcaaggggaggcggacgagggggagtccgtgcccggcatcaccgaagaggtggtggtgttcgtcaggcacatctccacgcggcccgagacatggctcgattttcccctcttcatcagcgagcgctacgcggatgatttcgaactgtcagatgctcagtacgtgcatgctctgtctgtagagcaccttgtgccaggattatcagatttaaaggctcagatttgctctactgacatgactgaagcatgtttctggaagatctactttgtgcttttgcactcgaaactcaataagcaagatgctgaggttctttcgacgccacagatcctagaagcaagggagcagttgttgcaaagtttagggtctgagaaaaagcggggatccaagtttcccgacgagtcatccgccgagagctcgaacgcatcctccgctcctgctgaagagaaggtgattcaacctccagtcatccaagacaaagcagacgcttgggagaaatcatcgtccgaagaaccttctgaaaccgtgtccgagaaattcccagtctcaaccaccgaagtggaaatggtggacaaatcagtggttgaggaagagctgactgtggcaaatgagagcaagacctcaccggtgaagtccaagcttccctacgaggctgatgaagaggaggaagtcgacgagtggcccgatgacgatgacgaccccaccgatgaggctggccaggcggcgggtgacaggactttgctagggcgggaggaggaggacgtatcgttcagtgatctggaggacgacgaggacgatgataggaggtagaaggggatgatgggcagtagccaagttggctaggggaagctcgtactatggtcccggcgcaaccacatgctggcttcattggagtagggccgagaacgcactcacacccaaggatcaatgtttcgttagttattattattattagagtccggaagtaatgagtcccaagcagtagcaataagcatgtatgtatctgccgcgcgtgttagtgctaatggcaagtcctgctgcttctgtattattggccccgtcctgtagcttgtacatagagcgctcacggctgggttgggcctttgtgtaataaacctaccgtccgggaacttgagcttgtgtttaaaaggacctgttcattagggagggacctggggttccagttcc

SEQ ID NO: 11120 - protein, 376 aa, Zea mays subsp. mays
  peptide (1)..(376): Ceres Seq. ID no. 12351691
  misc_feature (154)..(200): Pfam Name: BSD domain Pfam Description: BSD domain
  misc_feature (1)..(373): Homolog of NCBI NO: 34909848 NR Description: OSJNBb0053G03.5 [Oryza sativa (japonica
  misc_feature (6)..(374): Homolog of NCBI NO: 18425006 NR Description: expressed protein; protein id: At5g65910.1, by cDNA: gi_14334479, supported by cDNA: gi_21281218 [Arabidopsis >gi|9759575|dbj|BAB11138.1| gene_id:K14B20.8~unknown protein
  misc_feature (145)..(374): Homolog of NCBI NO: 7486518 NR Description: hypothetical protein F6H11.10 - Arabidopsis >gi|2827699|emb|CAA16672.1| predicted protein [Arabidopsis
  misc_feature (6)..(145): Homolog of NCBI NO: 7486518 NR Description: hypothetical protein F6H11.10 - Arabidopsis >gi|2827699|emb|CAA16672.1| predicted protein [Arabidopsis
  misc_feature (6)..(373): Homolog of NCBI NO: 15229611 NR Description: putative protein; protein id: At3g49800.1, by cDNA: gi_15983353, supported by cDNA: gi_17380635 [Arabidopsis
  misc_feature (112)..(351): Homolog of NCBI NO: 28273391 NR Description: putative BSD domain containing protein [Oryza
  misc_feature (5)..(122): Homolog of NCBI NO: 28273391 NR Description: putative BSD domain containing protein [Oryza
  misc_feature (5)..(372): Homolog of NCBI NO: 21555533 NR Description: unknown [Arabidopsis thaliana]
  misc_feature (5)..(372): Homolog of NCBI NO: 18391195 NR Description: expressed protein; protein id: At1g10720.1, by cDNA: 28214., supported by cDNA: gi_18377651 [Arabidopsis
  misc_feature (138)..(372): Homolog of NCBI NO: 6573740 NR Description: F20B24.15 [Arabidopsis thaliana]
PGTPSRGVKDDISELTETLTRRLWGVASFLAPPPTPPEASTPRAATPAQGEDEGIEDGEEAAVLSPRTAGIRSDLAEIGGRMWSGFSMLQNNLAVAEISKIASSLLPFGQGEADEGESVPGITEEVVVFVRHISTRPETWLDFPLFISERYADDFELSDAQYVHALSVEHLVPGLSDLKAQICSTDMTEACFWKIYFVLLHSKLNKQDAEVLSTPQILEAREQLLQSLGSEKKRGSKFPDESSAESSNASSAPAEEKVIQPPVIQDKADAWEKSSSEEPSETVSEKFPVSTTEVEMVDKSVVEEELTVANESKTSPVKSKLPYEADEEEEVDEWPDDDDDPTDEAGQAAGDRTLLGREEEDVSFSDLEDDEDDDRR

SEQ ID NO: 11121 - protein, 295 aa, Zea mays subsp. mays
  peptide (1)..(295): Ceres Seq. ID no. 12351692
  misc_feature (73)..(119): Pfam Name: BSD domain Pfam Description: BSD domain
  misc_feature (1)..(292): Homolog of NCBI NO: 34909848 NR Description: OSJNBb0053G03.5 [Oryza sativa (japonica
  misc_feature (1)..(293): Homolog of NCBI NO: 18425006 NR Description: expressed protein; protein id: At5g65910.1, by cDNA: gi_14334479, supported by cDNA: gi_21281218 [Arabidopsis >gi|9759575|dbj|BAB11138.1| gene_id:K14B20.8~unknown protein
  misc_feature (64)..(293): Homolog of NCBI NO: 7486518 NR Description: hypothetical protein F6H11.10 - Arabidopsis >gi|2827699|emb|CAA16672.1| predicted protein [Arabidopsis
  misc_feature (1)..(64): Homolog of NCBI NO: 7486518 NR Description: hypothetical protein F6H11.10 - Arabidopsis >gi|2827699|emb|CAA16672.1| predicted protein [Arabidopsis
  misc_feature (1)..(292): Homolog of NCBI NO: 15229611 NR Description: putative protein; protein id: At3g49800.1, by cDNA: gi_15983353, supported by cDNA: gi_17380635 [Arabidopsis
  misc_feature (31)..(270): Homolog of NCBI NO: 28273391 NR Description: putative BSD domain containing protein [Oryza
  misc_feature (1)..(41): Homolog of NCBI NO: 28273391 NR Description: putative BSD domain containing protein [Oryza
  misc_feature (1)..(291): Homolog of NCBI NO: 21555533 NR Description: unknown [Arabidopsis thaliana]
  misc_feature (1)..(291): Homolog of NCBI NO: 18391195 NR Description: expressed protein; protein id: At1g10720.1, by cDNA: 28214., supported by cDNA: gi_18377651 [Arabidopsis
  misc_feature (57)..(291): Homolog of NCBI NO: 6573740 NR Description: F20B24.15 [Arabidopsis thaliana]
MWSGFSMLQNNLAVAEISKIASSLLPFGQGEADEGESVPGITEEVVVFVRHISTRPETWLDFPLFISERYADDFELSDAQYVHALSVEHLVPGLSDLKAQICSTDMTEACFWKIYFVLLHSKLNKQDAEVLSTPQILEAREQLLQSLGSEKKRGSKFPDESSAESSNASSAPAEEKVIQPPVIQDKADAWEKSSSEEPSETVSEKFPVSTTEVEMVDKSVVEEELTVANESKTSPVKSKLPYEADEEEEVDEWPDDDDDPTDEAGQAAGDRTLLGREEEDVSFSDLEDDEDDDRR

SEQ ID NO: 11122 - protein, 289 aa, Zea mays subsp. mays
  peptide (1)..(289): Ceres Seq. ID no. 12351693
  misc_feature (67)..(113): Pfam Name: BSD domain Pfam Description: BSD domain
  misc_feature (1)..(286): Homolog of NCBI NO: 34909848 NR Description: OSJNBb0053G03.5 [Oryza sativa (japonica
  misc_feature (1)..(287): Homolog of NCBI NO: 18425006 NR Description: expressed protein; protein id: At5g65910.1, by cDNA: gi_14334479, supported by cDNA: gi_21281218 [Arabidopsis >gi|9759575|dbj|BAB11138.1| gene_id:K14B20.8~unknown protein
  misc_feature (58)..(287): Homolog of NCBI NO: 7486518 NR Description: hypothetical protein F6H11.10 - Arabidopsis >gi|2827699|emb|CAA16672.1| predicted protein [Arabidopsis
  misc_feature (1)..(58): Homolog of NCBI NO: 7486518 NR Description: hypothetical protein F6H11.10 - Arabidopsis >gi|2827699|emb|CAA16672.1| predicted protein [Arabidopsis
  misc_feature (1)..(286): Homolog of NCBI NO: 15229611 NR Description: putative protein; protein id: At3g49800.1, by cDNA: gi_15983353, supported by cDNA: gi_17380635 [Arabidopsis
  misc_feature (25)..(264): Homolog of NCBI NO: 28273391 NR Description: putative BSD domain containing protein [Oryza
  misc_feature (1)..(35): Homolog of NCBI NO: 28273391 NR Description: putative BSD domain containing protein [Oryza
  misc_feature (1)..(285): Homolog of NCBI NO: 21555533 NR Description: unknown [Arabidopsis thaliana]
  misc_feature (1)..(285): Homolog of NCBI NO: 18391195 NR Description: expressed protein; protein id: At1g10720.1, by cDNA: 28214., supported by cDNA: gi_18377651 [Arabidopsis
  misc_feature (51)..(285): Homolog of NCBI NO: 6573740 NR Description: F20B24.15 [Arabidopsis thaliana]
MLQNNLAVAEISKIASSLLPFGQGEADEGESVPGITEEVVVFVRHISTRPETWLDFPLFISERYADDFELSDAQYVHALSVEHLVPGLSDLKAQICSTDMTEACFWKIYFVLLHSKLNKQDAEVLSTPQILEAREQLLQSLGSEKKRGSKFPDESSAESSNASSAPAEEKVIQPPVIQDKADAWEKSSSEEPSETVSEKFPVSTTEVEMVDKSVVEEELTVANESKTSPVKSKLPYEADEEEEVDEWPDDDDDPTDEAGQAAGDRTLLGREEEDVSFSDLEDDEDDDRR

SEQ ID NO: 11123 - DNA, 1018 bp, Zea mays subsp. mays
  misc_feature (1)..(1018): Ceres Seq. ID no. 12342116
  misc_feature: MA Experiment ID: 108535 Result: Down-regulated in Transcription
  misc_feature: MA Experiment 108535 PARAMETER Experiment Name: Zm_Meristem_P Parameter: Age (day) Value: 8
  misc_feature: MA Experiment 108535 PARAMETER Experiment Name: Zm_Meristem_P Parameter: Organism Value: Zea mays
  misc_feature: MA Experiment 108535 PARAMETER Experiment Name: Zm_Meristem_P Parameter: Plant Line Value: 35A19
  misc_feature: MA Experiment 108535 PARAMETER Experiment Name: Zm_Meristem_P Parameter: Tissue Value: Root Meristem vs. Above Root Meristem
  misc_feature: MA Experiment ID: 108547 Result: Down-regulated in Transcription
  misc_feature: MA Experiment 108547 PARAMETER Experiment Name: Zm_Imbibed_Seeds_P Parameter: Age (day) Value: 4 vs. 2
  misc_feature: MA Experiment 108547 PARAMETER Experiment Name: Zm_Imbibed_Seeds_P Parameter: Organism Value: Zea mays
  misc_feature: MA Experiment 108547 PARAMETER Experiment Name: Zm_Imbibed_Seeds_P Parameter: Plant Line Value: 35A19
  misc_feature: MA Experiment 108547 PARAMETER Experiment Name: Zm_Imbibed_Seeds_P Parameter: Tissue Value: Aerial vs. Embryo
accagaacacttgagcagactagcaaggccttcagaccgggagggctccctgtcctgtcccccgcgccgccgcggatggccggagccaccacgccggcatcaggcgccctcgtcaggctctgcctgccttcgctcctcctctttctgtaccggtgctgcagatgtgaggctgttgagatggagagaacccttgcgatgatcaagcccgatggtttgtcaggtaagtacacagaagcaatcaaggaggtcatcttggattctggatttcatatcgtcaaagaaaccgaggtccagcttgatgctgagagggcatctgtcttctatgcggagcattcccagagaagcttctttgacagcctagtcaagtacataacaagtggtccagttcttgctatggttctggaaagacctgacgccgttgcgcaatggcgcactttgattggaccaactgatgcaaaaaaggccaaaacctctcatccaaacagcattagagcaatgtgtgggctggactctgagaaaaattgcgtgcatggttcggattcaccagaatctgcagacagagagatctcatttttcttcggagaagctgaatccgtaactgtggaacatgatgagctatagacgccacactggtatcagtggcaatattggccggctcattggacaacgtgggagagtatcgactctgctgcttctagtgttcgtcatgcttcttttatgaactaaacccgaagacgctgcaatttgaggaggggatgtcagttgtcacagaggagagagtcatttttagggctagtttggaaatctcatttttttcaagagatttttattttcctaaaggaaattagtttatttttctttgagaaaatagaattcccttgggaaattagagtttctaaacgagcccttaatttcgtaaaattatgtccggagtccatatttcctatcggagcaccatggtccttgaacttgcaaaactatatggtgcaaaccaaatattgttttttcatccgtgttg

SEQ ID NO: 11124 - protein, 206 aa, Zea mays subsp. mays
  peptide (1)..(206): Ceres Seq. ID no. 12342117
  misc_feature (61)..(134): Pfam Name: Nucleoside diphosphate kinase Pfam Description: Nucleoside diphosphate kinase
  misc_feature (39)..(134): Homolog of NCBI NO: 8778480 NR Description: F1L3.7 [Arabidopsis thaliana]
  misc_feature (162)..(199): Homolog of NCBI NO: 8778480 NR Description: F1L3.7 [Arabidopsis thaliana]
  misc_feature (125)..(161): Homolog of NCBI NO: 8778480 NR Description: F1L3.7 [Arabidopsis thaliana]
  misc_feature (66)..(198): Homolog of NCBI NO: 15220107 NR Description: unknown protein; protein id: At1g17410.1
  misc_feature (66)..(161): Homolog of NCBI NO: 9665132 NR Description: Unknown protein [Arabidopsis thaliana]
  misc_feature (61)..(193): Homolog of NCBI NO: 38181932 NR Description: Unknown (protein for MGC:75677) [Silurana
  misc_feature (60)..(206): Homolog of NCBI NO: 9055290 NR Description: expressed in non-metastatic cells 6, protein; diphosphate kinase type 6; nm23/nucleoside diphosphate kinase 6;
  misc_feature (60)..(206): Homolog of NCBI NO: 12805101 NR Description: expressed in non-metastatic cells 6, protein
  misc_feature (60)..(199): Homolog of NCBI NO: 15606713 NR Description: nucleoside diphosphate kinase [Aquifex aeolicus]
  misc_feature (58)..(195): Homolog of NCBI NO: 4505413 NR Description: non-metastatic cells 5, protein expressed in diphosphate kinase) [Homo sapiens]
TRTLEQTSKAFRPGGLPVLSPAPPRMAGATTPASGALVRLCLPSLLLFLYRCCRCEAVEMERTLAMIKPDGLSGKYTEAIKEVILDSGFHIVKETEVQLDAERASVFYAEHSQRSFFDSLVKYITSGPVLAMVLERPDAVAQWRTLIGPTDAKKAKTSHPNSIRAMCGLDSEKNCVHGSDSPESADREISFFFGEAESVTVEHDEL

SEQ ID NO: 11125 - protein, 181 aa, Zea mays subsp. mays
  peptide (1)..(181): Ceres Seq. ID no. 12342118
  misc_feature (36)..(109): Pfam Name: Nucleoside diphosphate kinase Pfam Description: Nucleoside diphosphate kinase
  misc_feature (14)..(109): Homolog of NCBI NO: 8778480 NR Description: F1L3.7 [Arabidopsis thaliana]
  misc_feature (137)..(174): Homolog of NCBI NO: 8778480 NR Description: F1L3.7 [Arabidopsis thaliana]
  misc_feature (100)..(136): Homolog of NCBI NO: 8778480 NR Description: F1L3.7 [Arabidopsis thaliana]
  misc_feature (41)..(173): Homolog of NCBI NO: 15220107 NR Description: unknown protein; protein id: At1g17410.1
  misc_feature (41)..(136): Homolog of NCBI NO: 9665132 NR Description: Unknown protein [Arabidopsis thaliana]
  misc_feature (36)..(168): Homolog of NCBI NO: 38181932 NR Description: Unknown (protein for MGC:75677) [Silurana
  misc_feature (35)..(181): Homolog of NCBI NO: 9055290 NR Description: expressed in non-metastatic cells 6, protein; diphosphate kinase type 6; nm23/nucleoside diphosphate kinase 6;
  misc_feature (35)..(181): Homolog of NCBI NO: 12805101 NR Description: expressed in non-metastatic cells 6, protein
  misc_feature (35)..(174): Homolog of NCBI NO: 15606713 NR Description: nucleoside diphosphate kinase [Aquifex aeolicus]
  misc_feature (33)..(170): Homolog of NCBI NO: 4505413 NR Description: non-metastatic cells 5, protein expressed in diphosphate kinase) [Homo sapiens]
MAGATTPASGALVRLCLPSLLLFLYRCCRCEAVEMERTLAMIKPDGLSGKYTEAIKEVILDSGFHIVKETEVQLDAERASVFYAEHSQRSFFDSLVKYITSGPVLAMVLERPDAVAQWRTLIGPTDAKKAKTSHPNSIRAMCGLDSEKNCVHGSDSPESADREISFFFGEAESVTVEHDEL

SEQ ID NO: 11126 - protein, 147 aa, Zea mays subsp. mays
  peptide (1)..(147): Ceres Seq. ID no. 12342119
  misc_feature (2)..(75): Pfam Name: Nucleoside diphosphate kinase Pfam Description: Nucleoside diphosphate kinase
  misc_feature (1)..(75): Homolog of NCBI NO: 8778480 NR Description: F1L3.7 [Arabidopsis thaliana]
  misc_feature (103)..(140): Homolog of NCBI NO: 8778480 NR Description: F1L3.7 [Arabidopsis thaliana]
  misc_feature (66)..(102): Homolog of NCBI NO: 8778480 NR Description: F1L3.7 [Arabidopsis thaliana]
  misc_feature (7)..(139): Homolog of NCBI NO: 15220107 NR Description: unknown protein; protein id: At1g17410.1
  misc_feature (7)..(102): Homolog of NCBI NO: 9665132 NR Description: Unknown protein [Arabidopsis thaliana]
  misc_feature (2)..(134): Homolog of NCBI NO: 38181932 NR Description: Unknown (protein for MGC:75677) [Silurana
  misc_feature (1)..(147): Homolog of NCBI NO: 9055290 NR Description: expressed in non-metastatic cells 6, protein; diphosphate kinase type 6; nm23/nucleoside diphosphate kinase 6;
  misc_feature (1)..(147): Homolog of NCBI NO: 12805101 NR Description: expressed in non-metastatic cells 6, protein
  misc_feature (1)..(140): Homolog of NCBI NO: 15606713 NR Description: nucleoside diphosphate kinase [Aquifex aeolicus]
  misc_feature (1)..(136): Homolog of NCBI NO: 4505413 NR Description: non-metastatic cells 5, protein expressed in diphosphate kinase) [Homo sapiens]
MERTLAMIKPDGLSGKYTEAIKEVILDSGFHIVKETEVQLDAERASVFYAEHSQRSFFDSLVKYITSGPVLAMVLERPDAVAQWRTLIGPTDAKKAKTSHPNSIRAMCGLDSEKNCVHGSDSPESADREISFFFGEAESVTVEHDEL

SEQ ID NO: 11127 - DNA, 1584 bp, Zea mays subsp. mays
  misc_feature (1)..(1584): Ceres Seq. ID no. 13494719
  misc_feature: MA Experiment ID: 108535 Result: Up-regulated in Transcription
  misc_feature: MA Experiment 108535 PARAMETER Experiment Name: Zm_Meristem_P Parameter: Age (day) Value: 8
  misc_feature: MA Experiment 108535 PARAMETER Experiment Name: Zm_Meristem_P Parameter: Organism Value: Zea mays
  misc_feature: MA Experiment 108535 PARAMETER Experiment Name: Zm_Meristem_P Parameter: Plant Line Value: 35A19
  misc_feature: MA Experiment 108535 PARAMETER Experiment Name: Zm_Meristem_P Parameter: Tissue Value: Root Meristem vs. Above Root Meristem
  misc_feature: MA Experiment ID: 20000477 Result: Down-regulated in Transcription
  misc_feature: MA Experiment 20000477 PARAMETER Experiment Name: Zm_5mM_SA_P Parameter: Age (day) Value: 10
  misc_feature: MA Experiment 20000477 PARAMETER Experiment Name: Zm_5mM_SA_P Parameter: Organism Value: Zea mays
  misc_feature: MA Experiment 20000477 PARAMETER Experiment Name: Zm_5mM_SA_P Parameter: Plant Line Value: 35A19
  misc_feature: MA Experiment 20000477 PARAMETER Experiment Name: Zm_5mM_SA_P Parameter: Timepoint (hr) Value: 48
  misc_feature: MA Experiment 20000477 PARAMETER Experiment Name: Zm_5mM_SA_P Parameter: Tissue Value: Aerial
  misc_feature: MA Experiment 20000477 PARAMETER Experiment Name: Zm_5mM_SA_P Parameter: Treatment Value: 5mM SA vs. No Treatment
  misc_feature: MA Experiment ID: 20000478 Result: Down-regulated in Transcription
  misc_feature: MA Experiment 20000478 PARAMETER Experiment Name: Zm_5mM_SA_P Parameter: Age (day) Value: 11
  misc_feature: MA Experiment 20000478 PARAMETER Experiment Name: Zm_5mM_SA_P Parameter: Organism Value: Zea mays
  misc_feature: MA Experiment 20000478 PARAMETER Experiment Name: Zm_5mM_SA_P Parameter: Plant Line Value: 35A19
  misc_feature: MA Experiment 20000478 PARAMETER Experiment Name: Zm_5mM_SA_P Parameter: Timepoint (hr) Value: 72
  misc_feature: MA Experiment 20000478 PARAMETER Experiment Name: Zm_5mM_SA_P Parameter: Tissue Value: Aerial
  misc_feature: MA Experiment 20000478 PARAMETER Experiment Name: Zm_5mM_SA_P Parameter: Treatment Value: 5mM SA vs. No Treatment
  misc_feature: MA Experiment ID: 20000479 Result: Down-regulated in Transcription
  misc_feature: MA Experiment 20000479 PARAMETER Experiment Name: Zm_Drought_P Parameter: Age (day) Value: 10
  misc_feature: MA Experiment 20000479 PARAMETER Experiment Name: Zm_Drought_P Parameter: Organism Value: Zea mays
  misc_feature: MA Experiment 20000479 PARAMETER Experiment Name: Zm_Drought_P Parameter: Plant Line Value: 35A19
  misc_feature: MA Experiment 20000479 PARAMETER Experiment Name: Zm_Drought_P Parameter: Timepoint (hr) Value: 48
  misc_feature: MA Experiment 20000479 PARAMETER Experiment Name: Zm_Drought_P Parameter: Tissue Value: Aerial
  misc_feature: MA Experiment 20000479 PARAMETER Experiment Name: Zm_Drought_P Parameter: Treatment Value: Drought vs. No Drought
  misc_feature: MA Experiment ID: 20000480 Result: Down-regulated in Transcription
  misc_feature: MA Experiment 20000480 PARAMETER Experiment Name: Zm_Drought_P Parameter: Age (day) Value: 11
  misc_feature: MA Experiment 20000480 PARAMETER Experiment Name: Zm_Drought_P Parameter: Organism Value: Zea mays
  misc_feature: MA Experiment 20000480 PARAMETER Experiment Name: Zm_Drought_P Parameter: Plant Line Value: 35A19
  misc_feature: MA Experiment 20000480 PARAMETER Experiment Name: Zm_Drought_P Parameter: Timepoint (hr) Value: 72
  misc_feature: MA Experiment 20000480 PARAMETER Experiment Name: Zm_Drought_P Parameter: Tissue Value: Aerial
  misc_feature: MA Experiment 20000480 PARAMETER Experiment Name: Zm_Drought_P Parameter: Treatment Value: Drought vs. No Drought
gaaaccccagagctttaaagcttttccgattccgcaatgctcaccgttcggttccttctcgtaccgagccgcgggtagccagccaaccgccgacgcagtccacaagcgatgaagcgcttcttccagccagtgcccaaggacggctccccgtccaagaagcggctagcgggtgctgctgaaccgggcgacggccccacatcagccggtgccgccaccggcgctggcggggatgtagaggggaggcccaccgaggagccgttcaagttcctgacgtggaacgccaacagcctgctcctccggatgaagagcgactggcctgctttctcgcagctcgtcgcccgccttgaccccgacgtcatttgtgtccaggaagtgcggatgccggcagctggttccaaaggggcacctaaaaaccccagtgaactaaaagatgacacaagcttgtcacgggatgaaaagcaggtagttctacgtgctttgtcagcttcacctttcaaagactaccgtgtctggtggtctctttcagattcaaaatatgctgggacagctatgtttataaagaaaaagtttgagcctaagaaggtgtctttcaacttggatagaacatcttctaagcatgaagccgatgggcgtgttataattgcggaatttgaatcattcctttttactgaacacttattctccaaacaatggatggaaggaggaggaaaatgcatttcaaagaagacgtaagtgggacaagaggatgctagaatttgttcaacacgtggataaacccttaatctggtgtggggacttgaatgtcagtcatgaagaaatcgacgtcagccatcctgatttctttagcagcgctaagctgaatggatacaccccacccaataaagaggactgtggacagccaggattcaccccagcagagagacggcgttttggcaacatattattccaaggaaagctggtagatgcttacaggcacctgcacaaagaaaaggacatagacggtggcttctcttggtccggtcatccaattggcaagtaccgaggaaagagaatgaggatcgactacttccttgtttcggaacagttaaaggacagaatagtttcatgtgaaatgcatggccgtggcattgaattggatggattttatggaagtgaccactgccctgtttcgcttgagctttccgaagctgtagcagaagaagcaccaggacagcccaagccatccatntaaatataccnccatggtggtcattgttgagacatttccggtccttcattaaacctgactgttccatgcattgcctactntaggtagctgaggtttgattgtaggtattattatgatcccagtaggttaccagttcctgtggtcagggctggtatagtttagggatcattgccatttaagcagtgcaatttggacatctcattctgcttgaaatgttgtttgtntaagagcagccatggactacctaatacctcatggggatcgaagagattaatcccttcgtatccaattttaactagcaagggatttaatccacccctaacaagcacaataaaatcttgttcgttttttctacc

SEQ ID NO: 11128 - protein, 207 aa, Zea mays subsp. mays
  peptide (1)..(207): Ceres Seq. ID no. 13494720
  misc_feature (118)..(197): Pfam Name: Endonuclease/Exonuclease/phosphatase family Pfam Description: Endonuclease/Exonuclease/phosphatase family
  misc_feature (1)..(89): Homolog of NCBI NO: 18481705 NR Description: putative T29H11.60 protein [Sorghum bicolor]
  misc_feature (118)..(197): Homolog of NCBI NO: 18481705 NR Description: putative T29H11.60 protein [Sorghum bicolor]
  misc_feature (1)..(197): Homolog of NCBI NO: 7487536 NR Description: hypothetical protein T29H11.60 - Arabidopsis >gi|4678346|emb|CAB41156.1| putative protein [Arabidopsis
  misc_feature (1)..(118): Homolog of NCBI NO: 18408629 NR Description: endonuclease/exonuclease/phosphatase family
  misc_feature (107)..(197): Homolog of NCBI NO: 18408629 NR Description: endonuclease/exonuclease/phosphatase family
  misc_feature (1)..(184): Homolog of NCBI NO: 14578320 NR Description: PV1H14200_P [Plasmodium vivax]
  misc_feature (54)..(102): Homolog of NCBI NO: 23490314 NR Description: putative AP endonuclease-related [Plasmodium
  misc_feature (54)..(184): Homolog of NCBI NO: 23957727 NR Description: AP endonuclease (DNA-(apurinic or apyrimidinic lyase), putative [Plasmodium falciparum 3D7]
  misc_feature (95)..(184): Homolog of NCBI NO: 23490314 NR Description: putative AP endonuclease-related [Plasmodium
MKRFFQPVPKDGSPSKKRLAGAAEPGDGPTSAGAATGAGGDVEGRPTEEPFKFLTWNANSLLLRMKSDWPAFSQLVARLDPDVICVQEVRMPAAGSKGAPKNPSELKDDTSLSRDEKQVVLRALSASPFKDYRVWWSLSDSKYAGTAMFIKKKFEPKKVSFNLDRTSSKHEADGRVIIAEFESFLFTEHLFSKQWMEGGGKCISKKT
